United States Patent Application Publication US 2022/0290142 A1 - sequence listing, part 22

SEQ ID NO: 15683 - DNA, 30036 bp, Homo sapiens
agtgaggaggaggagcgagcagacttgggtggctctgcgccgcggaggccacagccgcagacttccccagtagtaccgcgccgctccgccccggagtgacgccctccgcccatgggcctggccgagggcaaccggcgggcggcgcggaggaggcggcgacaggtggcgcgcagcagggccggagccgggccgggccatggccgcctcggagcggctgtacgagttgtggctgctctactacgcgcaggtgagcccgccccgccccgcgcccgcacccgcacccgcggtgcccccagcttcgcgcgccccgcgcctgctgcacctggcgccccgcgccgctggggccgcgtagccgcgcgcgcgggcgcgcgcgcgcagggcatgctccggctccgcacacacgtgtgtgcccccagcccgccgggtgcctctggcacttatgccttggggacagagctcgcggtcgtgcacttcatagcaacccacccccgcgagcaggaccgtgcagcctgagtctttcttgctagaggagagtggcctgggccgaggcggccggacacttggcctttttacaaatggggaaactgagacctggagagacctggagactggccaggaggctagggggagggggactcaatttgtctatgagctgcctctcccttgggcgcggcctgattgggtggtcgtggccaacgggtctgggggtgtgggccaaggtagggaggtgtgtggaaggggaatgctcccacttcaggtccttcttgagttgcatccccccacaccccagcgaacaggctgtgataagctcttccctgacttgaaatgacccaccccaccccacccccattctgaggggtagacccaggacctctctaggagcagaagaaaaggttttcctctggatgcccagggtgagggtgggtccttgaggccctgagggatgtctgaaaaggttggagggaggcccgttcctcctgagctccccacccatctcagaaaatacttcaggtggagtcagaaggtgaggggagtgactcagacgtgggtgtcccatcagctgagaacctggtatcactcacaccgtctcacacacatagtcccccattttccttctgtacccacagcagggagggatcccagggtaacactcccctccccttcacccagcacctccctccctgcacctgcctggcatcatgctcctggctcaggtgtgccctgggcacaatggaccattgtgtgccctgaacagtttgtcagtggggggaattcatgctcagacacgctggccctccataaggaggctggcccactgtcttccacggacctggagtccaggccagaaggaccacagcctcttcagtccgctcaggttgtgagaggtccaggccccagcaggaggccaggcatggagtagagtccctctttggtataactcagatcgaactcgacttctgagcctctgcttcctgcctgtaaaactgacacagccctggccgggcacggtggctcacacctgtaatcccagcactttgggaggccgaggcgggcagatcacaaggtcaggagatcgagaccatcctggccaacatggtgaaaccccatctctactaaaatacaaaaattagccgggcgtggtggggtgtgcctgtaatcccagctactcgggaggctgaggcaggagaatcgcttgaaccagggaggcagaggttgcagtgagccgagatcgcgccactgcactccagcctggtgacagagtgagactccgtctcaaaaaaataaaataaaaataaaaaactgacacagccctgacctcaggggcttcctggactctgtggagaggtagccattatagctggtccagaccagagaaggctcctgttttcctggccccattgggtcccctcgccccagcttctctgcctgcatccccagtggttgtgaaggagcagagggtttgaagagaagcctaccctagtcctccttcctcggactgccccatagctatgggcaggctctaggtgcatgggcaggtaaagggggcttaaaccagctggtgagtgtgagggatgttaatgataggtcttcagcctgggtggcaggctgctgggagtgtcttggtatctcccaggacagtaactccagcatggttgcctcctgatgccccatctagctgagctctgtacatggccaccccccatcccctcaggaggtggttatggctcatatctgtgctgagcctccccctcccggagctcctcacctcgcagggcaggtatggagcataggctggcaggttgtagctttggaagcctgagcagacagtgggcagcctggggccaggcaaacaaatccaggatgtaacagcaaacccccaagccaggcggggccaggctgcctgggaagaggaagctagggccagcctcccagctcgccttcctgcccgcctgctcctgaccctgatcctggaacccccaatccagggaggagtaggctatgcaactttgagtcctgttagggacctattgtgtgtgtgcttggggagggggagtgcaaggtaaggggcagagctgaaagtgggtgtttagagaccctttagttggccagccacccagccagcaacacctgcacccctcccttcagcagtgagagctgacatcagctggcaaacctgtttccccagttgtgggtctgggtggggatggagaggggggagtaactccttcctgcccttcctcttccttaaagaccccaggtttagacccacccaccccctccccctgggggcccggctcaactgggggcctcatagtgagggagggggctgtgggtggctgctgagggaagagggaagggtcagagcatcccaggacttcactcagttggagctccttagggccctggtggggaaaccaaggcagggtcctactacgattgtcagacctcacatgcagtaggtgctccttgggtattagctgaatgactggatagaggaggtgggtcccatggcagtgaccagtcaggaagtcaccccagaggaggctgagtttgggctttgaaggctgagaggaagaaacagcaggagcagtgggacaagaagcaaattgtcaggagttggggcagggcagagctagtcaagcaggcctggtggacaggtgggggctcatctagaggactcagagcccaccagagctcccccagggtaggcataggaagggcaggagagtcttgggggactggggacagcacctgacaggctggcggttgggcagcccataaaagttaatgccacatagcatgcagatgagtggcccctgttcaggccggagcagcagtgatgttcagcaacccctccagtgaatggggtcacagagtgagggggcactgaatgtggaagggcactcagggtcacaaagttcagggcagaacaaaccctcaggtgacaggagggagcagaagctgacctgtccagctatgccactgaggcctcagaagggttcagggaggttaggtcaggctggaggcaacctcgtcctgcctacacttccctgagagttccctctccctaactgatgatctctactgcctctcagaaacctggtcaggccctccactcccccggtactttacctggtcatattcctttttttttttttttttagacagagtctcactctgtcacccaggctggagtgcaatggcatggtctcagttcactgcaacctctgcctcccgggttcaagcagttctcctacctcagcctcccgagtagctcagactacaggcgtgtgccaccacacccggctaatttttgtatttttagtagagacggggtttcactatgttggctaggctgctctcaaactcctgaccttgtgatctgcccgcctcagcctcccaaagtgctgggattacaagcgtgagccaccgcacctggctttatctggtcatatcctttttgggcttcagtttaccttcctgaaatgggtaaagggaaggtggagtcacttctttggtgcttggtcccctgcctctattaccaaggcacctgaaggagaagggcctgtagtgatagggagatgagcacacagcccaggcttgggtgggcactggtgattcctggagttgttatgacaactggggagctgatggggaagtgtggggtccccgtagaaacagggtcagttaccatggggtctatggggaccctagaaggaaattcccattttccttagtgatagtaaaagggattggtcagctcttgagccgcttgcttgaacctacttccattctgtggagtgtactttcatttcaataaatctatgctttccttgcttaaaaaaaaatagtgtccaggcgcggtgtttcacgcctgtaatcccagcactttgggaggctgaggcgggcagatcacgaggtcaggagatcaagaccatcctggctaacacagtgaaaccccatctctactaaaaaaaaaaaaaaaaaaaattagccaggcgtgatggcgagtgcctgtagtcccagctactcaggaggctgaggcaggagaatggtgtgaacctgggaggcggagcttgcagtgagttgagatcgcgccactgcactccagcctgggccggcgacagagcgagactccgtctcaaaaaaaaacaaaaaaaacaatagtacaaggggatggtcaggccctggggcagggtgggtgtcatggagatcagaaggtccaccctttcagcaccccctctccaggtaagtgggagagactggcccagccacccaggcactcaaaccactatcctcagttgtccctgccccagcaaagtcccatcttcctgcttcatcccatggcctaacatcctccaagcctgacctccagtcctggtgatgtagccagaagtcacgtttagcttgacattgtcctccccgtcctgatactgaatggggggaccccctaggcctgggataggctattccacataaacaccaccctgtcccacttctgcttgtctgtccctgaagatggagtgctcactaccgcccaggcagctctgactgagaggagtcacccactcttgagctgtgctcttctctcccttcctgctcctagctcttccctggggtccattaatgcctcttactgtcactcacagagggggctgggggttgttgcctggaattcagggagctcgggcaggccagagcccctggatctggaactccactcaccttaccctgacctcgagttgggtaggtgtggctggagaacttttacccaagaagcaaagggatggttttaaagaggttaatgttaagtaacaagctactgagagttagaacggggactggactccggaacccatgccctcacctgattcggttggtgagaggcaccagacaggaatgggtcttacaaagggtgctgatgcccctgatgggggcattccagcagagcaaacaagagcaaagcacaggcagacctgtgggggtagagacagtgattcacgcccttgggcccaggcatccagcgggtttggggtatggaggctgcaggtgaggtgggcaccaccctacagggcctcagatgtgagcttgtgatagggcatgtgactggctgatcaagccgtgatggtgacagatgtctactcgaggcccattgtgcaatggccttggggtacgtcaggcagggtctgggagcagcatggtgtcaggcagctcaatgatccctgtcagcttggcaaacaaggtgtactccctgtactccccaccaatgtcacaaccaccagccctcagccctccaggttacttcagaattccagaggagtggcagttccatgcccacccagggactgtttgagcctaagcagccctcgggagcccctcacccccagcactctcaagtgccctcacagctagttgggcataagttggggtctctgtggtggtgcacatgagaccccctcttcccagggacaccggccttccacattcccacaaccttctcccctgctgcaggacctgggcatcacttacctatggaccctggagagggcttggcaggtgtggctgctcccgacctgccttcagtgggggacagggttggggccctgacccagttaggttggggcaaggggctggactgtccctgacccgtgttcctgctcagagctggcacaaccgaccaaggcagaagctctgagaggggcatgggaagcctgagcatcatggccactcctcccaggccctggaccctcacatgcagcactgccaccatgctctcgtcccctgccattctctgccctctgaccctggctccctgagggactcccgtaccccgacacattgcagtctcaagccatggggcctaggtcagagttggcctgaggtcttccagggagaaacagtgagacccagggaggcaggacaggcagccaccccacccctgcctaatactgtgctttggagacctcgtcatcccctttcagagcccctgaaggctgtcttgattgtcccagccctgaacccagctcagcccaatctgctgaaagtttacaggactggacaggccaagggtgtggttctagggacagaaagtactatctacatactctaggagtatgtagagattgagggacccacccctgtgctgggaaggctgatcaaggtgatggccaccaggagggtgggaggttcctgctcaagtaccaaaagcccaagtcacacaaggcagtggggcatagggtgggaaaaggcctggataggaggatgtgaaccacagagggggagaggtggaagctggagaagcaggttctggttggaccagcagcctggaatgctgctcagcagttgagcctttatggggaggggttagacacggtcaaatttgggctttcaggtgctcagtagagctgcagctggcaggaagactcacattttgagtgactagcttgactgaggggcagaagagaggaagacagtattgggacatttttgaaggcagctaggggtctctgtggggccactgaggcaaggatcggggcccgcatggtcctcatgggctggcttgctagcaatcatgagtggtcctggcctagaactaaggtctggcttttagcatcctcaaaggtacactgaagacaaagtagtagataaggcatcccctgtggggcctcctgtttccccatctgcaatgggagaggttcagaagaaatggtccagggcccctggccacctctgctgtctcaggatctgggtattttgggctccttgctgattgttcgggaggaggctgccagcaggagagggtggagaggtcaataaatgtaactgacagacaaaatgtcatggttgtgtgggtctgcaccatggtggccctggcacctctctgagttgtctgggcttcagatctgcactaaactgtaccagggagttccccaatcacagggtggacggctgctctgcctaggttttttggggatctggctcaggtctgctgcagtcaggcctcttgccctggggccattcaggccttgcccgtggtctgggcccataggctgcaaaaattagccatccatccaaagatagttctggaggtccttgggtatgaggcccatggcccctggggagcagcctgaggcctgctgagtgctgactgtgatgtgtcccttgcctcttcatccttttccactctagctccccctgtccacctctctgactctaggaaagaaggctgccttttggactcagctggttaggagctccatatggggccagcctggaggagctcctgtataagccacaacccacccctggcccctgggaggggcttagagattagagcagatacgggctaggctaggatttatcagctgtgttcctgagcgaagagaactgcagagttcagatgaggtggccaggacatggcgggcggcggggcgggacaaaggtatggctgagtcttctacatcgacccctgtggcctgaggccttgcgcgcaggtcagggagctgtgggtgccttaagtgaagggtactgcagcagcaggatcagaaccctcacctggataagagctcttccaggcgccaacctcatgcttgtaaaactagtcttggcccacaagccccacccaggacaggtgactccacccctctgtaacaggtcccaccctctgtgcaggccaggtcgcttgcagcctctctcactggggcccagggtgccccggcccccccacatccctgcggtctgccgggaggaagcggtccccctcccccaccgtgactctgcgcttcctgccccagccccggggcgggaggagacatttcccgttcacaccaaagttttcctggcagcgcctagacctgggcttagccactgcccctcttgcccatggaaccagctctggggcctggggtccaggtaaccagcaagggtgggtggaggttcccggggcaaggcagggccgcacatgaggatgtgcgcatgtctgggtctgcctgtctaatggtacacgtgtgtcctgggatccacagttaaagaaggctactgaaggtggtggctgctgggctgggtgaagatggcagatgaggacccagcccaaggctcttggtagggggtggctgctgtgtgggacaccttctccagccctagcaccagtgtgggccacagccacaccccacttacgcccctcccctggctgtgtcagacctgcctaggactgcaggcattagggaggtgggagcagaaactgggaggctgagagaagcagtggggtgcctggaaaagtggtcagtatgtacctaactctctgatgctgaccttccaatgtcctgccctccctcccccgtcccccactccccttctccacaccctccactctgcctttaaccccttgtccatgccctctgtccacctccattcattcttcgcctctgtctacatccccttgtccctgccctgtttactgcatccctcctgccccccaccactgttcccctgttctgcctacagaaggacctgggttacctgcagcagtggctgaaggcctttgtaggtgccttcaagaagagcatctcactgtcctctctggagccacgaaggtgaggctggatctgcactgagggcagggacagagcagggagattgaggggtcctcagcacccgtgtctcccctttccttgcaggccagaggaggcaggtgcagaggtcccgctgctaccactggatgagctgcatgtgctggccgaacagctgcaccaggctgacctggagcaagccctcctgctgctcaagctcttcatcattctctgcaggtgtctctgttgtccactctacaagcaggggcctagaactgtgggccagagggagaggggacaaggaggggcatggtgtattattgtgacctctctcatcattgactcccccaggaacctggagaacatagaggcaggccggggccaagtgctagtgccccgagtgctggcactgttgaccaagttggtggcggaggtgaagtggcctctaccttggggggcagagggtgtatgcagggaggcaggcggtagccatggcggggctaaccctctctccccacacctacagctgaaaggatgcccaccaccccagggccgaggcacgcagttggagaatgtggccctacatgctctgcttctctgcgagggcctctttgacccttaccaaacctggcggcgccagcgcagtgggtgagacccagcccacaggaagggaacccagaggagggtggggagaggatggccgcgctgggcccaaggaggggtgacggccaggagtggtgagagccgggctgatgtacttggcctcactgcccccagggaagtcatcagctccaaggagaagagcaaatacaagttccctcctgctgctttgccccaggaattcagcgccttcttccaaggtcaggccccgcccctgcccccacttggctccacccccaaacctaggccccttcctgtcgttccttgatcctgccatacacaggaaccacttggtggtggctgcatgcaggactgggagaaccaaagaccaagcaagagtttagggacagagacaagagaagacatcttgggctggagcgagggcctcccatcaggtggaggggtggggtcaacctgcctacccagatttctcatcctctttccccgccatctcctggatccttctagccacttgtaccctactgtgatcttaaaactctctggtccaatccctttgtccccatagcctccacgcatctccacccatcccggagacacaggaggtatctccacctcctgttccctggctgctggaggatctggtgcccaggacagctgtggctgcctgttcacaggtggtcctgtgaacctgttctccctggtgaccctccacccctgggtcccctctctcctctcattggagggagactggccaggactttagataggctcagggtgggatatggcctggacagaggtgggcagggctgtgaaaaggtggtgacctattgggatattaaatgtctcagtgatgcccccatggagctgtgggcctggatctagagttggggcagcaactccaggaggggaggcacccctagggagctcctcgactttattttcccatagcctgggtgctgttattaaaacaaactggatttcatttctcctcccatcatatcccttgatgtcaacctgacgtcctcaagatgaaatcctactcctcccacagcctttctctccacttgccctgctgctcagcctggcttctgtcctctcattcccagactgctaccactgaccccacctcagggtcttagcccatgctgtgccttctcccctccaactgcattctcaggtctcccctcaaaagccccatccccaaggaggcctcccacccatccagccggaatcaagccccagccctactcttcctcctctgccaggcatgtgacccggggctagtcccttctgccctctgagtttcagtccctggcctggcatcctgtccagttttgctggcgcagggccaggtgggcctcctacgtattaggttgtgaaagcccctagaagtcccaggcaaaggcatgggcgtggggggaggtggcatcagtatagtagatacagcagagtccccagagcacggcatgggaagcaccaaccgtcacagggcagaggcagcaagagatttgcatctgagaaactaagccctggtcatcatggggaagtggaagggtatgtgctcatgctggggccctcactttggggcttaaggatctgggaagctggctagactctcagggctggtctttgtcacccttaagtcccccaaagaagggttgtccctttcaggccctctactatacagccataactccttagatgccccccagggcagagccagctcttatccctcacactggatcttttacttggcccagctccctctcccctccaccccagggcactcacctcttgtgcagccccctgggtccatagccctgcaaccttggtgacattaccctgcccacacccccctacccagagagcctacagaatgcagaccacttgcctcccatactgctgttacgtctcatccacctcttctgcgccgtcctcgctggaggaaaggtaggctgggaggtgagcctgtggactagagagcagctctttcagtatctctctgctgggtgagccccttgcccactgcccatctctgtccacacctgcaggagaacgggcagatggctgtaagtgatggctctgtgaagggcctgctgagtgtggtgcggggctggagccgtgggccagccccggacccgtgcctagtgccactggctctagaggcactggtaggtgcagtccatgtcttgcatgccagccgcgcacctcctcgtggcccagagcttcgtgccctgcttgagagctacttccatgtccttaatgctgactggccagctggtctgagctcaggccccgaagaggcccttgtcaccctccgggtcagcatgctcggtgggtatgggctcccaggctcttggggaaggggcaccatgagggaaaagcctaagtgatgatggaaggtctggatagggcagcataggaaggaaggcttaaggctgcctagaggggtctgggcagggcctgacccttgacccttccacagacgccatccccatgatgctggcatgtgaagaccggccagtgctgcaagccaccttcctcagcaacaattgctttgaacacctcactcggctcattcagaacagcaaggtgggtagggcccagcctgggggtgagggtctggaagccagaggctaggggagccacgcataggtgccaggctgctgctgagcaaacatgggctggacagagtcagtgttttgcagctggtgggatggcttgcagttcagtgggagggtgtggggcatggacaagggcccatcccttggggcctctataggactgggcttgaggcttaggacatctttgtgccccatggaagcggggcttgttatggaaggaagggagctgctctggtgccttgtttccctttccgtggccccaagtacaggggctagaggagggcaccactgctttcagatgcagtgcctgctcccacccgctcatccccccgactgcccatctgagcagggcacagggggctcagcaccctactcttccctagtgccgggcagggcacctggcagctgcccctggtcctgctctaaccccaccctctcccatcttcctcctctcttctttgcctcctccaccctgtgcctccccacttccccacagctgtacctgcagtcccgggcgccccccgagggggacagtgacctggctacccggttactgactgagcccgatgtccaaaaggtaccatcctggggctgaccagctcagacaccccctgggactccctctttgagcttttcctgcactatagctggggaaatgagcagatgtgtgtaaggcctggtgtggtctagaaatgggtgtgggtcctccatgctgtctcgcctgccttccaagtccccatcctagggaacaggacagaaggtggtctatcccctgcctggtgtttgattgggtgttgggggtctggctgtgccaagctggatggaaccttcgaaactcagccacctacctcatttctcagaaggggagacagaagcccagacactcaaggatttggctatagtcacagagaaaggggtctccctcatggtgccatttctttctgtagattcttgcacccaccctcagcgggtcactgggtgtcccccagcccctgatgatgtgatccctgattcaccttgcatgtgggctgtaggaggctgcagggtgtcagctggcagcttcacagcgggcaccctttctgggggctcaacctgtgggccccaacctccatagcccctaccctggctctgtcttcatgaggtaaccctatgtgttcaccgcatgtggtcattttcttagagcttacacgtctattcatctgcaaagcaggcagggcaaagtgactcccctctgtttttacagatgaggacactgaggcctggagggggaggactgatgccttaggtcacttggggagtcaggcaaagctgggaccaaaggccccatggagccgaatatgacctagtccctgctgagaaactctccaagccctcccaacccctgaccccctcagggtggggcaggagaggcagcagcatgcctctggctgtcaggttcagccaggctgagcctcagtgcccccacctggatctagggggaaggggcaaggtgggacttaaaggtctcgaaggttcttctggttctaacatcctgtgattgattgtccctaaatctctgacccctgtcaatcactgtgggtgatggggcacttgctggcctgtctgtactcatgtgtctagctttagggagacaggttgggggtagggccctaactccactagagaaagggggactggagggtgcagtcagagtgtccaccattaatctgtcccagtgaggcccttcccagcctttgttagagtgggtcttgctgagctgctcagagagggccctaggtcatgatagggtcacagcagttggggcaaggagtagaaggcctggtgctctgacagagttgctgatccagcacatgccacatgccttggggtgcttggctctgcaccttttttactgcagggggctgccagctgtgacaccctggcccctgcctctcctgatggcccctccccaccccaaggtcctggaccaagacacagacgccattgcagtccatgtagtcagagtgctgacctgcatcatgagtgactccccctcggccaaggtgaggctgctgcactgcagctttagtaggggtgcggggtggagttcaactgaccatatccccagaacaggcctggccggtggccataagcatcctgctccctggagcaaagcaggcgagctgggaggtgactgccctgccctaaagctcactgggcaggtgtggtcgccagtctgtcctgggagctgcatcttctctgtcagggctggatggggaatggacacttgtaggcccacctccatctacagccttctgagatgtactcacgtcccccccatccctctgcagcccactgcccaccagcactgtcacccagaggcagagctacgcaagggaaccccaaaacatgatgcccctccagagtttccagggggtctgagtttgccctccggcccatgtatgtgttcacttcttccccatactaccttacacaggaggtgtttaaggagcgcatcggctaccctcacctgcaggaggttctgcagagccatggtccccccacccatcggctgttgcaagagctgctcaacatggtgagggaaggggcttgggaccagggtcccaaaggcaaccagaactgagtcagggttaccacagatggtgagctctccaccctgggggaccgtattgactgcggccagtacatactgttacctgtagcctggccatgtctgttagtgtcactggaatgaggattctggccctgtaggggtcctggaagcaactgcatgtgagcaagccccaggattatcttaggaacatgcagttaggggttaggccaacccaggctgaaaactaaggttgagggattaacaatgctgaaggactcttagtagtagtgactgtcatctgtgcccctctgactttcctgagcctcacacacaacctgtgggcaggatggagtagatcatgttgctgactgctgccgtaggcaagtaaatggagccagaaagtcccactgttgacagggtgccacagctgaccagggactgtcattctctccacccacaggctgtggagggtgaccacagcatgtgcccacctccaccaatccgcaacgagcagccggtactggtgctggcgcagtggctgccgtcattgcccaccgctgagctgcggctcttcctagcgcaacgcctcaggtggctctgtgacagctgccctgccagccgtgccacctgtgtgcaggcaggcctggtgggctgcctgttggagacactcagcacagggctagccctggaggcccgctgccaagagcagctgctggcactgctacaagcactgggccgtgtatcaataaggcccatggagctgcgtcacctgctgcgcccccggccaggattggactcggaaccaggcggagctgaggctggaaaggcccgacacgcaggtgctgtcatccgcacattatcaggcatggccaggcaccagggtcctgcacgtgctctgcgctactttgacctcacgcccagcatggcgggcatcatggtaccccctgtacagcgatggccagggcctggcttcacctttcatgcctggctctgtctgcaccctatggatacagcacctacccctgcccccacccgaccactccagcgaaagcagctgtacaggtgggtgactgccaggggccagggacctcctgccagggtgagcaggaacaagcagacataactggcttgcctgcccccagcttctttaccagcagcggctcagggtttgaggccttcttcacggcggccgggaccctggtggtggctgtgtgcacacggaaggagtatttgaccatgagtttgcccgaagtgtcctttgccgactctgcctgggtgagaccccatccttctcatgtggcccagtagagagaggggtgctgagtcccaagtatggcctaatgtgaggcttctgttctagcactgcgtggctatcgtccatgtgcctgggcgccggcccttcagccagaacctggtccatgtctacaaagacggccatctggtcaagacagcaccccttcgctgcccctccctcagtgaggtgtgccaagcaaggtttggggaggccttgggtagatgggaggacttggaacacagtgggcaggtgtagcctggagcccttgtgtcccgtgctgccccacaggcctgactttagccactggggtccatgcagccatgggggtcactgtgaggaactggttgtaggcggagccccaggttctgctgtgacctgaccgctcccccaaccccggccccacagcctttctcctcctgctgtatcggctccgctggataccgcacaacgaccaccaccacagggctgcccacaccaccagtccccgccaccctggcctacactcaccccgccctcacccgctcccagtcagtcccagcctccacagggcttggctgggggtccgggctggtggcccccctgcaggagggcagcatcgactctaccctcgcaggcacccaggacactcggtggggcagccccacatccctggagggtgagctgggggctgtggccatctttcacgaagccctgcaggcgacggctctgaggaccctgtgcaccctgggtatgcagcattctccatctctgccacagccccaggccagaagctaggggtccggggggagaaggcatctctgggggtctctcctgtggtcaggcagtctctggatggggtttggccagaggcctagcaaggtctgaagccccctgcccacctcccagggcccaatgagacggcacccttcaagcctgagggggagctgcatgagctcagcaccaggctgctcctccattactcacctcaggtatttgggggccccaggggagtggttggctcgactgtgctacttccccggctcccacactctgcctgccaccccctcctccctctgaccctggctgcctgcccattcccctatccctaggcttgtaagaacaacatctgcctggacctgtcccccagtcatgggcttgatgggcgcctgacgggccacagagtggagacctgggatgtgaaggtctgtgagcacgtgtgggtggtgtgtgcaggaggcatgaatatggggcacatgtgtgttcggagtcagctggggagcagcgctgtgcctggggaggatttggacagtccagctcaagagagcaaaacttcctttctgggtggtctgctggggtggagtagggcaggaaactggctggaaggtccccctcactgccatcctccttcccccaggatgtggtgaactgcgttgggggtatgggtgccctgctgcccctgctggagcgagtagctgcacagcccaaagaggctgaagcaggtccagctgaaacgcatgacctcgtgggtcctgaactgacctctggtcacaacacccagggcctggttctcccattgggtaaatcttcaggtaagtgttcctggtgcctatgttgtggagagggaatcttggcatggtaggggggtggaatgcccaaggtctcctggccactggcaggcccttgacacacatctgtccccttcctgatggctggcagaggaacggatggagaggaacgcagtggctgcttttctgctgatgctgcggaacttccttcagggtcacatggtgaaccaagagagcctggtgcagtgccaggggcctgccatcatcggggccctcctgcgaaaggtggggcccggtgggacaggcatgggggttaggggtatggtcagcctgtctgaccgaggggactgagtggggaaccctgtcagtcatgaagaacctcctgggagagttgccacttgagtggggcctgaaaggccgagcagggttgggtctggaggatctggggaaaggcccagcacaggtcggggcagggacccgcacagcaggcaggaggcttgcgtgtcagaggcggcaggaagcccccaaagggttctgagcaggctggtggccatgtttgtggccgtcatggctgtgcagggaagagtggcagctgaaaagctcagacagcagacaggcagagcctgagccctcactccagctcctgtcttatcccaggtcccaagctgggccatggacatgaacgtgctcatgtccgcccagctgctgatggagcaggtggcagctgagggcagcgggcccctcctgtacctactctaccagcatttgctcttcaactttcacctctggaccctcagtgacttcgccgtgcgcctcggtaggtgtgaggacctgagcaaggggccggccatagggcagctgagcactgagaagttagaactctgctctgggggatctgagggactcacctgttaggaatccagaatgccatggggcggctgaggggactatgaccctgccctggaagtctgacaggcacatggccctggcctggaggatctgaagggcccagctcagcctagtggcctgagccctctgctcattcccgctcaggtcacatccagtacatgtccagcatagttcgggagcacagacagaagctgcggaagaagtacggcgtccagtttatcttggatgctctgcgcacccactacaggtgaggccagtggggccagatgggccatggggggctgacacagtggcctccggccttggggactgggcggtgcgcttccctgactcacctgcccaccctctctccccgcctttctttgggacctggctgggtgtgcctactgacctgccagcccgcagcgggagcgccccctggctgctgacgacctacgcaccgtgcagacctccctcctgggcctggcgagggagttcctggtgcggagtctctcagcagatgacgtgcaggtcacgcagaccatgctgagctttttggcggccacaggcgatgacggtcaggtaggctggaggttggggagcgggaggcttgggtgaggggagtgggggcccgacacagtgtgagaccctgcatccccaggcggtgggtgcgctggacctgctgctggccctgctgcacggttccctggtgcaggagtccttggctgtctttctgttggagccagggaacctcgaagtgctactggccctgctagtgcggccagggtcactgcccctgctgcccgatcgagtctgcaaggtacacccagcccaccccctcccctggcatcccattcactggggcccctgcctggggttcagggaggtacagcaggccttgggccagcggatgaagctgccttcaagggcctcttgagccacacacctgcacggtgacttcccctcctacagtaactccttccacatgatgacagtcctccgatgacccccacacagatcctgcgcagactgcagcagaatgagcggctacctgagcggagccgccagcgcctccggctgcgggagtgtggtctccagggtctggttgcctgcttgcctgaggggactgtttccccccagctctgccagggcctctacaagctgttcctgggggcaggtacaacctggttaaggccaagtggagggggtgacatgtcagaaaaacagggcaggcaggccggaagaaggaagatagtggcataggggccagggctgggccctgccctttctagtctggtcagtccctcaggtccccccaacccatccccccagattgcctgaacctctcagatctgctggctgtggtacagctgtccctccaggctgacctcagcgttcgcctagacatctgtcgccaggtgagcatgagaggtaaaagctttgggggagggggagggtggcttctaccctctggccttccaccttgcctgtctcatgaggggtctctggagccctcctctgcaaaggccctggatgagggtctggagcaggcagttggatgcgtcctcacttgctgtgctctcgcctgcagcttttccacctcatctacggacagccagatgtagtgcggcttctggcccgacaggctggctggcaagatgtgctgacccggctatatgtcctggaggctgccacagccggcagcccccctccgtcttccccagagtcacctacctcccccaagccagccccacccaagccacccactgagtcacctgctgagccttcagatgtcttcctgccctcagaggccccctgccctgaccctgatggcttttaccatgctctctccccattctgcacgccctttgacctgggcctggaacggtctagtgtaggatcaggcaacactgctggtggtggcggcagcagtgggactcttactccagccagccagcccggcactccttcgccactggatgggccgcggccctttcctgctgctcctggccgccacagctccagtctctccaatgtgctggaggacggcagcctcccggagcccaccattagcggggatgatacctcgaacaccagcaacccacaggtgaggtgggcccaccctctgccactgcatggtacccaagggaggacacttctggtacacagggctggcagtgtagcctctccaaaggtgtggccctgtctgaccagggttgcagccactggtcaggcctattgctgtcccctcatagctctcatctgcagttgtgttcccagagggctcctggaacagggtgagtcatgatgagccacagtgggtgacaccagccaggcttcagaagggccctcaagagagcctgtagggcagacacctcacagggtccaagggcagcaaactccaaaggccctgccctgggcttctgggtttggggatgggcctctgcttgttctatgtgaactgcctcatctcctcttgggagtctggcaagaccccaggattctgcctggaactcaggtagtagttgagacccctataccattcttccaggcccttagtgccaggctcactgttagccaaatgctctgactcctgggtggctaccccaggaggggtgctgagtggggatgggtgggcgtcagcctgattccctcccttagccgcccacaacccacgcccacaccacccacctgtgcccacagcaaacctctgaggaagagttgtgcaatctgctcaccaacgtgctgttctcggtgacgtggcgtggcgtggaaggcagcgatgaggctgcctggcgggagcgtggccaggttttctcagtgctcacccagctgggggcctcagccacacttgtgcgcccaccagactgcatcaagcgcaggtgagagggaaagtctggagggggaggggcttcaggaagcctcgggggaaggagagaagatagtcaggtagacccttgagttccccactcacccgccagcctcctggagatgatgctggagtcagccctgaccgacatcaaagaggcccccgtgggggtcctggccagcctcacccagcaagcgctttggctgctgcgtctgctgcaggacttcctgtgtgctgaaggccatggtaaccaggaactgtggagtgagaaggtgcgacccctcagagaggcgtgagccacatgaacactcatgttcatgcaagcctgcagggatctggtctgggaggtggatgggtacacgtgcgcaggtgtgggtgcatcagcatgaatgcctgtgagtgtggacttgcctgtgtgcacaaaccctacctggcccccagcgcaaactttactttgctccctttccatggactcctggcctcccctggtgatgtctgttgggaacctgttttctgtggcagctctttgaaggtgtatgcagcctacttgatcgcctgggagcctggccccacctggccaacggcacagctgatctccgtgagatggcgcagattggcctacggcttgtacttggctacatcctgctggaagacccacaggtgagcacagggtgagcatgggggcagggggcgtgtgagatgtcgggagctccaagagtggctgggtgccactcatctctcttgcgcccacagctgcatgcccaggcctacgtgagattgcacatgctgctacagactgcagtgccagcccgccgcgaggaggcctgctatgtgctctccaagctggaggctgcactggggcgggtgctgaacacctcttccttggagtcagccactgatgaggcagggtccccacttgcagctgcagcagctgcagcagctgcagagcgctgctcctggctggtgccactggtgcgcacgctgctagaccgtgcctatgagccgctggggctgcagtggggactgccctccctgccacccaccaatggcagccccaccttctttgaagacttccaggctttttgtgccacacccgaatggcgccacttcatcgacaaacaggtgcctggaggttggggcccaggaagaggagtgggggctggggcccacatcgagcactgttctcctctgcccaatcctccaggtacagccaaccatgtcccagttcgaaatggacacgtatgctaagagccacgaccttatgtcaggtttctggaatgcctgctatgacatgcttatgagcagtgggcagcggcgccagtgggagcgcgcccagagtcgtcgggccttccaggtgtgccacccggggtaagggatgggaaactgctccacacatgcacccaggagatgactgacaatgtggagaaacgggtagggcaggcagcagccaggggactgacctattacccccaccccaggagctggtgctggaacctgcgcagaggcgggcgcgcctggaggggctacgctacacggcagtgctgaagcagcaggcaacgcagcactccatggccctgctgcactggggggcgctgtggcgccagctcgccagcccatgtggggcctgggcgctgaggtgggccgggcttggggcagggtcgctgtggaggggtggggcttgggagggagggagccacctggagccccagactgcctttggggtgaggccagggagggatgggggtgtctacagccttctaccgacccatgacctgggggacattctgcagggacactcccatcccccgctggaaactgtccagcgccgagacatattcacgcatgcgtctgaagctggtgcccaaccatcacttcgaccctcacctggaagccagcgctctccgagacaatctgggtgagggagtgtgctgagatgggtccacccaactcgattgtcccgtctcctgtcctgccttgcttctgctgagtacccttggccccttgcaggtgaggttcccctgacacccaccgaggaggcctcactgcctctggcagtgaccaaagaggccaaagtgagcaccccacccgagttgctgcaggaggaccagctcggcgaggacgagctggctgagctggagaccccgtgagtggggccctggagagattggactggtgtggtgggcaaggggtctgctccagtgtgtgcatgcctctgtgggatcaactccctgagtgtgtcctcttctgctgcccgactacgtccccctgaagggactgtccaaagccagatggtgagtgggagagtctcctaacagggctgagagttgctcttttaacagccaggcacctgaggacagcactgagaaacacaaaccagagcaggaagggggcccagggagtgggcaggggctgggtgaggggagcaggggacaagggttggcatcctggcaaaatattcagaagcccagtgggtggcaggtgggggacaggggctgggaccagtaggttctggaccctaggcagcccctccccatctctgggagtcatgagagtatataccccatgactcaatggcacttggatgccctttgggcttgtgaagaagggggtcccagagcctacagcgtgaggtgggttgctggtctttaggatggaggcagcagaactggatgagcagcgtgagaagctggtgctgtcggccgagtgccagctggtgacggtagtggccgtggtcccagggctgctggaggtcaccacacagaatgtatacttctacgatggcagcactgagcgcgtggaaaccgaggagggtgcgtcctggtggtgtggtttaggaggatggcagggaatggctgagctctgggtggggctggggtgagtgactcccgtacctgctgttcctccccataggcatcggctatgatttccggcgcccactggcccagctgcgtgaggtccacctgcggcgtttcaacctgcgccgttcagcacttgagctcttctttatcgatcaggccaactacttcctcaacttcccatgcaaggtgggcacgaccccagtctcatctcctagccagactcccagaccccagcctggccccatcccaccccatacccaggtacggaaccaggtgtactcgtggctcctgcgcctacggcccccctctcaaggctacctaagcagccgctccccccaggagatgctgcgtgcctcaggccttacccaggtgagagccctgggtgtgagggatgtgaagtcgggaccctgaatcacggggcagtgctggacagcccacctggctcacatcttgtctgcccctgtccccagaaatgggtacagcgtgagatatccaacttcgagtacttgatgcaactcaacaccattgcggggcggacctacaatgacctgtctcagtaccctgtggtgagggtcccactctgcacccctccacccctgcccctctgacctgtcagcccttggttcccccaagtgtaggtacctgccagtgggccaagctctgagcttggtcaagggtagatgtgccaatgaagacctggcctctgttccctgccaacccccagaggtccccagcctcactcccttcccctccctgcctagcctctattcctcaaaaggaatcctgttccaggacactctgtccttctcccctgtgacccctctaagtggtgctcccccaacctgtgggcaggctctgtgcccgccttcttgagggtgtgggcagggcagggtgggctggtaggccatcagggccctcatgcagcccctgctcgggtgggtggccagttcccctgggtcctgcaggactacgtgtccccaaccctggacctcagcaacccagccgtcttccgggacctgtctaagcccatcggtgtggtgaaccccaagcatgcccagctcgtgagggagaagtgagcatgtgggcagggctgggctcagcgggtagggaaaggcgaggggagggcttctgctgacacgtccaactgtggccccaggtatgaaagctttgaggacccagcagggaccattgacaagttccactatggcacccactactccaatgcagcaggcgtgatgcactacctcatccgcgtggagcccttcacctccctgcacgtccagctgcaaagtggccggtgcggcccaggggctggtgggcagactagggggcagataaggggaggaggctggtcctccccacatcctgggcccacccctggctcccttcttccctccagccacagcatctccctccctgtctccattctccccacctcaccttggccccgtgcccctcccccagctttgactgctccgaccggcagttccactcggtggcggcagcctggcaggcacgcctggagagccctgccgatgtgaaggagctcatcccggaattcttctactttcctgacttcctggagaaccagaacggtaggtgtgaggtgctcacactggagcgggcaggtgtagggatggagagcagatggtggagtggccagggggcagtcgggatggacagggagacagctgacccagtcctctgtgccaggttttgacctgggctgtctccagctgaccaacgagaaggtaggcgatgtggtgctacccccgtgggccagctctcctgaggacttcatccagcagcaccgccaggctctggtgaggaaggaaccacaggcaaacggcaggcagccggggttctgaagatcatggggggtcagctgtccctgcactgattgctgcctccctactctcaggagtcggagtatgtgtctgcacacctacacgagtggatcgacctcatctttggctacaagcagcgggggccagccgccgaggaggccctcaatgtcttctattactgcacctatgagggtgggcagtgcgctggactccagtcagggccaggacaagatcaggtcgggtggatgcagagggcacgcagggagccctgactgctctgcctgccttcccaggggctgtagacctggaccatgtgacagatgagcgggaacggaaggctctggagggcattatcagcaactttgggcagactccctgtcagctgctgaaggtaaggccagcttagaggatagtggccagggatgcccatgccatggtgctgaccagccacttacccacaggagccacatccaactcggctctcagctgaggaagcagcccatcgccttgcacgcctggacactaactcacctagcatcttccagcacctggacgaactcaaggcattcttcgcagaggtgaaaggaagacaagacctcaactttatattctgtgaaatgggtttaaccccactgtccttaccaaccacgtggggcagatgggaatcctaatcaaggtcactgatttcaaggcaccttagaaaatgagctaaacatgggaagagtatgggggcaggaggggtgccttcttcatcagggccaggataaagtgtcgactcaacaagctctgaaagccttagggagatcaggagggagatctgtccttggaccccttccatcgccttcctagacaggaacattcctgaatgttgcccccaggcctgactttttttttaggtttccctctcttcctgcctttgggctagggggacaaggaataacagggtgagaggaccaagttgaaactaagtgtgatactctggaagcatcttccatgtctgtcccagcttctcacccactttctgagatgccctcctaaagtctctgcctgtttcttggagggaacctctgcatctgtgacacctactctatgacccctggggactgacagtaaaggaagggatgatgcttcagggagcagatagtgtaatctgatagtactcaggcatagctaggcctgcccttgcccctgcaggttgtcagtgatggtgtacccctggtgctagccctggtcccccaccggcagccccactccttcatcacccagggttccccagacctgttggtaagtgcattgtgcagagccccagctcagctccactcccccttgcctctgccagaaacccacctctgccccctcctgcctgcaggtgactgtgagtgccagtgggctgctgggcacccacagctggttgccctatgaccgcaacataagcaactacttcagcttcagcaaagaccccaccatgggcagccacaagtaggacagagggctgtgggtggggtgggctacaaatgccctgcacccggaattattcccctccctaatcagaatgtaggccagctgcaggggaaaggtctggccaggctccctgagggcctgggtctcttccatgtggcctggcctcacttgctatccccctcactgggtcaggacgcagcgactgctgagtggcccgtgggtgccaggcagtggtgtgagtggacaagcactggcagtggccccggatggaaagctgctattcagcggtggccactgggatggcagcctgcgggtgactgcactaccccgtggcaagctgttgagccagctcagctgccaccttggtatgaacagccttggagctggggagaatgaggcacacaggtatggggccgggttctgaggctggccagggcggatgtgactcctccgttctgcctgtaccctccccttcccatgcagatgtagtaacctgccttgcactggacacctgtggcatctacctcatctcaggctcccgggacaccacgtgcatggtgtggcggctcctgcatcaggtgtgcctcgtgggcagctctgtggggcccccgtagcccagacctgcagcccatccgtccctcagtggccttccagtcctgtcctcctctagtcttggacaaggccttcatttcctgagcctcaggggacagtcctaagccaaccctggtcctccacagggtggtctgtcagtaggcctggcaccaaagcctgtgcaggtcctgtatgggcatggggctgcagtgagctgtgtggccatcagcactgaacttgacatggctgtgtctggatctgaggtgtgtgtatgcatgtgccctggggagggtgagtttcctgggcaatccccctggagcccagactcctgcccaggaccctaagttgccttcctgcaggatggaactgtgatcatacacactgtacgccgcggacagtttgtagcggcactacggcctctgggtgccacattccctggacctattttccacctggcattggggtccgaaggccagattgtggtacagagctcagcgtgggaacgtcctggggcccaggtatggggaaggggtgcccagcaaagatggaggggcagttgggatcctgtccttgctgacactccctgcttcctccaggtcacctactccttgcacctgtattcagtcaatgggaagttgcgggcttcactgcccctggcagagcagcctacagccctgacggtgacagaggactttgtgttgctgggcaccgcccagtgcgccctgcacatcctccaactaaacacgtaagccccccatttatgggttcatggcccctgaaggtggtggtcattggtgtaggataaaggccctaggaacccacacaccatacatgtttgtgggcacatatttcaaggtttgttacctgtcccttcatcttcccatggggaggtcttgccctgggcctccgcttagccacagttgtgggagatttctttgtgtataagaatttcaatttaaccatccttaaaatgaggacagagagggtatatgggataagggatatctgctggtcgcaaagcccccttgcagtcgcaagttggtgtatatcccctctcccttccagactgctcccggccgcgcctcccttgcccatgaaggtggccatccgcagcgtggccgtgaccaaggagcgcagccacgtgctggtgggcctggaggatggcaagctcatcgtggtggtcgcggggcagccctctgaggtgaggatggggcgggggtggggaggcccctcgaacggggcggggcgtggcgcggcgatcccagctgatcctactcaacccttacgcccaccaggtgcgcagcagccagttcgcgcggaagctgtggcggtcctcgcggcgcatctcccaggtgtcctcgggagagacggaatacaaccctactgaggcgcgctgaacctggccagtccggctgctcgggccccgcccccggcaggcctggcccgggaggccccgcccagaagtcggcgggaacaccccggggtgggcagcccaggggggtgagcggggcccaccctgcccagctcagggattggcgggcgatgttaccccctcagggattggcgggcggaagtcccgcccctcgccggctgaggggccgccctgagggccagcactggcgtctgcggccgcagcagcactttttgcacagtctggggcggggttccccggcttccaagtcgctgtttcgtcaaagcacgagggccgcctgtggccttaattcctaacggcggccccggttctcccttctcggcaataaaccaggcctagttttgta

SEQ ID NO: 15684 - DNA, 94027 bp, Homo sapiens
gcagcagccgccagttccatgcactggcggagcagctctaggcggcggcttctactttcagtttcgtgcagagcgcggaggagccgcgagcgctgagggtgagtgccgggagctctgagggtgagtgccgggcgtgccgcggggctgcgggacccgggctggggcgagcggaagggagaggatcggggttcgaattctgcacggagaggggtggaggggatgtcagaggccctggagcgggaggtgcgggtggccgggtggctggccgatggatagctgggtaagcggacagggcgccagtggcccggcagcgcgcacagcatgcgccccggcagtttggaggaagagttgccggcccgcagaggatggcagatgagggtcgcctggatggggggacacagtaagcggctgtgctcccctccctgcgcagctcctgtcacctaccggatccacccactctctctgtcttttactttgcaacttttcattgattttaaaacaattacggaagttacactgttcattgtacgcaatttagactttttggcctaaacaactttttattgtggaaaattccaaacatatacaatagtagaaggaatagaattaggttgagccttctgcacctgcgggttttcatataatgaagccccacctatccacgttcagcttggacagtcacgaccccaaggccacctactcacgaccccaaggccacctaggtagcccaatctccaccgctggttattttgaaacaaatggcagacagcatagcatctcaactgaggtatttcagaatgtactaaaagataaggcatcttttaaaaacaaaaccacagtaccaccagcatactacaaacattttaatagttattccttaatgtcaaatctccagattatttctaaggaacatttaacctcataagtgataggtgaatacgtgggtgttgttttgttacttgctttctgcattcccatgtggttttcggtcactattctcacccagaaagccaggacctgaaactggctggggtgatcattcgaggaggtcggaagaggctcctaccttcagtgccgtttgcgtccattttataagttggagttcttatgtttccttttttaaaaggttgaagtttctgcagacctaaaaagcagtttgaaaactggcagttcccagcctctaaaacccgggggtagcaggaggcagagagtaccccggggccagatcctggagcctcattgtcccttcaaatcaccttccgtttctctaagggagaaataaaccttgaaaagccatgggcttttcagatgtatctagatgtatctgatgcttttcaggtgtatctagactcccatccagcgtgctttctgcaaaacttactgaaccatagcccagaatggccatccatgatgcccacccgccttgtctcctgaagcacattgccaggtggacctgcacatggtgtggacggcagacagactggggctctcaacaactggtatttgctggatgaccatgaactaaccattcaatttctcgaaactttggtttctcgtctgtaaaatgaacatatgcaaatctatcctacaaagtgtgttttgtggattgaatgagatgatacacgcccacccagtgccttgatcaaccttaaaatgctgcacaagtgtgaggggagatggatccttgaagaagacagacaagcagaggggaaagatcttggaagagtttcacaatatgctgaactttattcctggatcagatacagagctgtccgggtgtccacagggccgggtcagcctcctcagaccccaacacacataccctcttcccctctgaggaaaattcagcaaaacttcttttgctgttgttgttctttattccttttttttttttttttttttttgacgaagtctcactctgttgctcaggctggagtgtagtggcacgatcttggctcactgcaacctccatctcctgggttcaagcgattctcctgcctcagcctcccgagtagctgggattataggcgcccgccgctacacccagctaatttttgtatttttagtagagatggggtttcactatgttcgccaggctggtgtcaaactcccaacctcagatgatccacccgcctcggcctcctgtgggattataggcgtgagccatcttgcccggactcctttttttttttttttttttttttaatagacatgaggtctcaaactcctggcctcaagtgatcagtctgcctctgcctcccaaagtgttgagattatgggcgtgagccaccacacccagccataacttcttagcatgacttttcccatttgttatgagttcaattgtgcctccccacaaaagatatgctgaaggcctaaccctcggcgcctcctaacgtgaccttatttggaaatagggctgttgcagatataactggtgaagatgaggtcatactggagtaggatgggccttgaatccaataggaccggtgtccttataagagaggagatggacacatgaagacagagacatacggggatcagacaatcatggacggaggaggaagagagtgcggcgatgcatctaggagccacaggacacctagaatggccagcagccggtgggaaccaggagaggcaaggacggatcctctcctccagccttcagagggagcccggccctgaccacacctcgatctcagactctgacctccagaactgcgagagaagaaatctcagttgttttaatgtacgcagcttgtggcactttgtgacagcagatacagcagtactgtgacaacactaggaaacgaatacaccatcccagcatctctgctctgttttccatacagaattgaactaaggaccaggcaagctaatgcaagtccaaacactgtaaaaactttggaggcaatctaaggatgtgagccagatttgtttgccagatcttttttattttatttatttatttattttattttattttttttttttagtgagagggagtctcactctgttgcctaggctggagtgcagtgatatgatctcggctcacagcaacctccacctcccaggtttaagtgattctcctgcctcagcttcctgagtagctgggattataggcacctgcccccatgcccagctagtttttgtatttttagtacagacaggatttcaccatgttggccaggctggtcttgaactcctgacctcaggtgatccacctgccttggcctcccaaaatgctaggattacaggcatgagccaccaacacccagcccatatattcatatttttaatggacttatacatgaaaatggtatctcacttttaaaaataaatgatatggaattatgcgttaaagggaaattaaatcttattatatcatgttttaaaatttttaatttttcatagctaatacatttatgtagttttaaaaatgtaaaacatttggaaagatataatgaaaaataagtctccttccatctcctgtctcccagccacccaattgccctccccgaagacaaccaatgttatcaggttcttgtgtctccttccaaagacagtctaagtgtgtttttacaaacatggatatatacatatatatatacacgtatatatgtgtatatatatatacacacacacacacacacacatatacacatatatagacacacacacacatgtgtacttttcccttctcacaaatggcagtgtactatatgtagtgttctctaacttgggttttttttttttaaacttagtgcaatttggaaatctttctacatcaaaattttaaaatctgccctttccctctttctttttaacagctgcctagtatttcaccgtatgactgctctgtaattgatctaacagttgtagaacacttaggttatttcctgtcttttgctatttcaacagtgctgtaatgaatatccttggtcaggcatcatttttcatacgtgggagtgaatctttaagaaaaccaggagtggatttgcaaggtcaaggggaatatgcagtttgaacttggataaataaggcaaattatccccccttaaatgttgtactaatttttgctcccaccagctggagggggaggggccaaatttccatatttgcaaatctgggagacgaacaatggtgtgttttttatgcctcttattacgaatgagtttgaacatcttttcaaatatttaagagtcacctgtagctcattttccataaactgtcagttcatatcctttgcccacttttttattggcttttggtctttttcctgttgagttgtaaaagcacttttcatgttaagggaatttgctctttgtctattatatggttatactgtcatttaaaatggtggcatagttgcttatagaatgtctgaaccatatgcgtcattgttagatatttatattgggtctcattttcttgtattatatatgggatgttttccctgttttttgtaaaaaaaaaaaaaaaagcaagatatgacattttaattcttccaatagttctcaccataatggtgaaggaaaggaaatacgtttgggaaaatacttcgataggatttggggtggctggaacctgtgtgcaaaatggccaacagggaccaggaccattttgggtgggaagagagtgctttgcatggtgtatgtgtatggggcggaggggctgtatttgctcctgaaagaaaagggggtggagggaggggagaagaaaggaaggagagaaggtggagggaggttagccacagagggagatgactcccagaaacttcttaggggaaggatggcaaaagggcattttcggtgagtccaggaatgccctctgctccgtgtgaggcaggtaccagcactgcagacaccggctctggctcaccacctgccatcatgagtgcattcagcttctccactgagcttccacacaccaggccctgctctaggcactgggctacagccgggaacacaaccaactccctgccttgtggagctgatgaggcagtagaaacagacaaacaagtaaacaaagatgtgcatgtcatatgaggtcaggtggaagtgactgcagtgaagaaggcaaggcaggcgagggtggagcatgctggatagagaggcagatgtagccttcttgtagggatgttgggacatttgagagagaacttgaagggagcgtggcagggaaccatgggccatggcatctggaggaagagggaaccagtcagaggggatggcaagaaacaaaaaagtggggagaagaagaaagcagagaagaggagaggagggagaagaggagaaaatgctgcttaaagtctgcttttgtgctcccagatgctcattgtgaatgacatttttgcaatttttgcaattttgttttgtaatttaataatgggctgggctgggcgcagtggctcacgcctgtaattccagcactttgggaggctgagatgggcagatcacttgaggtctgcagtttgagaccagcctggccaacatggagaagccccgtctctcctaaaaatacaaaaatagccaggtgtggtggcacgtgactgtaatctcagctactctggaggctgaggcaggagaatcgcttgaacctgagaggtggaggttgtagtgagttgagatcgtgccatgctctccagcctgagttacagagggagactcggtctcaaaaaaagcaacaaactgcttgaattaaagcaggagccctcagctagaggagtgcccacccacctcctccccaggaatcgcagagctcccaggagaggccatagcctcctataggtcatggcattgcaggtgggttggtgtcccagctggctgtttctgtctcaagaaaggaagggctgctcccgctgacatccaggcgtaagcaacgccctggtgaacatcctcgtagctagagctttgctcacattctggatggcttccttaggctcaatcctcaaagtggactcctaaagggatatatgaacttttattttttaaatgtttgaaaccgtgttgtcaaatttctctcctaaaagattgtgccaatgtagagaggctgccgaccgctggaagcttcccaatcccccagcacctatcccttgtgggtgggatggatcctgtaccatcgccagaccctcaagaaccccttgtcctgcacggtcccttctgtccctcctggtgaaatggaaggagcatgcatgccttgggaagctggtgctttgaggcattcagatcttaccgtggcatcatgtttgaagagagaaatagcttgctgttttgtgtgtctctcaatagtcttattcactgagttcttgaaggtgtcctgtgtgtttctggactgcagaatccttttattgaaatggacaggtcagtgttttcccagagaaagacctatccagtaggagttcacaagaggattttaggaggtatgtggagagggcatccgattccattgaatcgtaaagtgacaaatttgttcccttttcagttctttttcattcttccagactagtgaaagagaaagcctcagtcaggtgctaacgcatctgtaaacctctcacactcttgatattttcagcaaggggaggccaggcctccggtcagagccctgggtctgcagcaatacccagctacagttcaacagcatcatagtgttttttgttttccttggctttctttctttctttttttttctagacaaggtctcactctgtcacccaggctggagtgcactggttgcacagctccgtgcatagtttcctgcagcctctatttcccaggctcaatcgatcctcctgcctcagcctcccaagtagatgggactacaggtgcgcaccaccacacctggctaattgttttttgtttttatttttgatagagacgaggtctcattacgttgcccaggctgatctcaaactcctgagctcaagcagttttcctgccttagcctcccaaagtgctgggattacaggtgtgagcctccatgccccacccttgagtttcttttcgatgataccttcagttcgtggcaagtggtacttcaaaaaataaagttaaaagtgacatggtttctagaaaagctttaaggaaatggtgttctggctttcagataagtcaaaaaaaatctcaaacatgagtaaagagttttggaaattatacacttacccctagagggtgagtttgtgggggaaatttcataatgtatacttccagaatatttagaactttccaaatgagtacaggttatgttcgtaaacaggaaaaataataaagacataataaaatgataatttagttttaaaagacgaccatttgttgaaagcagtattatatttcagttaggaaatggcctctggaatcagcatagattttattgttttatttattttgtttttgagacagtgtctcactctgttgcccacactggagtgcagtagtgtgatcacagcccactgcagcctcaacttcctgggctcaggtgatccttctgcctcagcctcccaaatagctgggactataggtgcacaccactatgccaggctaatttttttgcattttttgtaaagacagattttcaccatgttgccctggctggtctcgaacttccaggttcaagcaatctgcctgtctcggcctcccaaagtgttggaattacaggtgtgagccactgtgcccggccagcatagattttaaatccaccttttgttgcttgacttcttggagcctgtttcttcatctatgaaatgcaggaaacgtgcctggaaatattgcttgagattctaatggggaggtgcaggtggaatactgtagcctgatgcccagcctatgccgggaactcagtacataacagccaatgagcattggctgcggactggacatgtcccctccttgtgctgtagtattaatgtctccaaccctcacagtgatcctgtgaagtaaatgtaaaatcaccacccagatgaggaaaacagtggcacagagaggttaagaaaactgtccaaggttgcacagcactaaaatgttgaaatcaggatttaaacccagccctcctgaccccagaggatcttttttcaaaaattatgttcttttattttatttcgagatgggggtctttcacagtcacccaggctggagtgcagtcacaatatcacggcttactgcgcctcaacctcccaggctcaagtgatcctcccacctctgtcccccaacccccagttgcttaggagcacaggcacacgacaccatgcctggctaatttttgtactttttgtagagatggggtttctccatgttgcccaggctggtctcaaactactgggctcaagcgatcctcctgcttcagcctcccaaagtactgggatcacaggtgtgagccactatgcccagcattagaggctcttttaacagctccacaattccctgtgagatgggctgcatacaaagcattactcctgcttgacatatacacaaaccatggcccaaagggagctgggacttgtccggatgtcagcctctaagtcagttttgggtcagtgagacccaaaaccaaggctctagccgtctagcccctccaacctttcttctgccccagttttatgggtttggcaatgtctgccaggatgggagggagcagttcagatgatccagtctggaggcaaaattctgctaaattcaaagggcccagcctcaagtcactgatgtctttttttttttttttttactttaaaaaaatgtattaattctaaaccacacaagtaagacacgaatcagtcttccttgcagaaagttaaactttttatacataaagctgatatctattttactcactgcttccagccccatgcctgtcccctctcctgcagtaacccctatttgatatgtttccagaactttatctaaaccttcacataataaaaataattcttatatagggcttactaacttccaagcactgctttaagagctttacatatttaagccccacaataactctgtgaggtaggtgctgctcttatccccattttacagatgagaacattgaggcccagagaggctatgtaactggcctggcgtcacccagcctgcagttggtggaaaggtcagtcccaaatctaggcagccttgctccgaaattcatgctcttagcctctaagttataaaacatgctattatcgacctgtgggaagaaacagtattgctgtttgttgatgtgtattttgagacaagtgatatcatgttgtgcatatcattatacaatgtgtcttgtttattccatgatacatcttgaagatacagccacgtcaacaaaaaataagtccctttcctgtacataatcccacagcgtggttacaccaaactttattatggctgtctagggtgtttaaagaccgctgctggaatttctttatccaagactctgtgtgtcttagcccattggggctgctgtaacaaagtgccagagactggctggattctaaacaatagaaatttatttctcacagttctggagactaaagtctgagatcagagtgccagcatggtcgggttctggcaagagcccttttccgggttgccgatggcggacttttcattgtatcctcacatggtgcaaagcaggctagagcattctcttgggtctcttttataagggcatcaatcccattcactacggctcctccctcctgacctaattacctcccccagaccccagctcctaataccctcctattaggggttagagtttcaacatgtgaatttcaggggagcacaaatattcagtcgatcacattgtgtattctgggccccaaggctgtccattttgctttctgctgagaagtttagtggtaaggtcaaagggtagaagcgcagtaagatctagaagtcactgctgatttgccctacaagatgggcaaaccacttcccagcctgcagctctgagccctggatccaggccttctctcctttatgtctcgagcttactctgtcccctgccttacttaccaaaccaaagcaagactcctctgggacattcctgccaggccccatggcaaggttggagctgaggaggggacttccaaaccttggttttattttcactttggcttgggtgtgccaagccctggcagagccacagagttggggcacgaggtgccaagaaacagctcccagtctgaggaaggtgctctgccctgggaaggggataaagctgagtgttggttatggggagacatcctcaaggtctccatctaaatatggtcaacttggtggccttcctgtccccagggcctttggggctctcagaggacaagaatcactcagctctgatttgctggagaagcagagccccaggtgggaggtagcgaggagcctgtctctccccactgggagtggagagctgggtgccacagcctcaaacagttgttcccagacatcggcacatggggaaccccccgggagcttccaaaagtgccagtgcctgcgttctacctcctgggatggtgctgtgatgggtctggagtgtggcccattgggattttttaaagaccctcttcccaggtgatgccgtcgtgcagacaagcatgggaaccactggcctggaagccccagggagaggcctctggggcccgggacacgcaagcgggagccttctcctagcagccttgctagccacccaccccttcctgtgggtgctagacccaaactgccagggctgagcaggagaagcaaggccaccagctggccacctgctgtcccagccaggctcaggctggcagtagggcaccccagtcctggaggagggtgcatctggaaagcttgggggctcttggtggaaagttcaagcctttagcataggaaggtggctggggtgaaggaggcagtttaaagactagtgatgtgggctgggacccagattgctgggtttccaatgaccagaagaagatggccttgttggactggggacagggaccacccaggctcaggcctgaggctgggagtgcaggcatgaatttgagtgcaggctcaggaacatccccagggccgccaggcagggagacacctcttcaactcctggctcctcgactctagctggtgacctaggcaggtccctttcccactgtgagcctcaatttcctcatgtgtaaagcatcatgactgtgtgttttaagtcctttagggccctatctttgtgagggacaacagagacgatggttttcacaggcaacagtcacccctgcatcatcactgactcacagaaatggatatgccctataaggacatctcttgcttgccctgccagcatttgtgggcgggggaggaaatggccactaaccattcctgaaggcacctcccaagggacccctgaaaggagggtgacgcctcccagaaagagaccagtggcccagcccagccctgctcttagttttgtttcctctgctttgaatgccagcaaggcctttccctcccagggcctcagtttccccatctttacaatgggcacagcatagaccccatcactggggctctttctgctctgccaccctgtgcatccaggctcaggtgttatccgaagccctgacatcatcagccattcccggggggaaggcagaggcgctgggttctctgtgtccccctggtagggcttggtgtaggattcagggaggattggagggcctctgtggcctcaggtcctcccccagggtccccaggccctgacctgtccacctggacctaaagaaccaacaacagcagcactttctgtttctttgaggtatttctgtccaaatgtctgtagtcatgactggggtgcctggctatcaccccacaaactgcatcctttctgatctgcacagatgagaaaactgaggtcttgtttcccctccatcccaagacctaatgggacctcctccttaatctaatcctcaagaggcagaaacaggatggaaagcaaaggaatggcagccagaagtctgtggctccactcctgtcctctctgcatccctcacttccttccttacaccaggcgtcaggggctggagagacggaagaagcgatagcaacgacaaccacactagtggtaatcatagcttgtgtggattgaaccttttttttatttttcatttttaatttttgtgggtacatagtaggtgtatatatttatgggttacatgagatgttttgatataggcgtccagtgtgtaatcacatcagggtaaatggggtttccatcacctcaagcatttatcctttgtgttgcaaacaattcaattatactttttgttatttttaaatgtacagttaaattattactgactatagttaccctcttgtgctattgaatactaggttttattcattctaactattttttgtacccactaaccatccccacctcccccaccctggcctcctactatacttcccatcctctggtaaccatccttctactctctatctccatgacttaaattgttttgatttttagatcccacaaataagtgagaacaagtgatgtgtgtctttctgtacctggcttatttcacttaacataatggcctccagtgccatccatgtccttgcaaatgatgggatctcattctttttgatggctgaatagtactccattttgtatgtgtgccacattttcttttactcttttattcttttctttctttcgagatggactcttgctctgtcacccaggctggagtgcagtggcacgatcttggctcactgcaacctctgcttcccaggttcaagcaattctcctgcctcagcctcccaagtagctgggattacaggcatgccccaccatgccctgttaatttttgtacttttagtagaggaggggttttgccatgttagccaggttggtctccaatgcctgacctcaggtgatccacctgcctcagcctcccacagtgctggaattacaggcgtgagctgccgtgcccagctgccacattttctctgttcattcatctgtcgatgaacacttagattaattccaaatcttggctattgtaaacagtgctgtcataaacatagtagtgcagatatctctttgagacactgattcctttcttttgggtatatacctagcagtgggattgctggatcatatggtagctctaaatttagtttagtttttttttgttttttttttttttttgagacagagtctcactctgtctcaaggctggagtgcagtgcgtgatctcagttcactgcaacctctgcctcctgggttcaagcgattctcctgcctcagcctcccaagtagctgggactacaggcatggggcgccactacgcccagctaatttttgtatttttagtagagacagggtttcaccatgttggcgaggatggtctcaatctcttgacctcatgatctgcccacctcggcctcccaaagtgctgggattataggtgtgagcctccgtgcccagccctatttttagttttttgaggtacctccgaactgtcctgtagtggctgtactaatttacattcccaccagtgtatgaggtctcccttttctccacatagattgaggtgtttgtttgtttgtttgtttgtttgtttggagatgaagtctcgctctgtcgcccagactggagtgcagtggcgtgatctcagctcactgccgcctccgtctcttgggttcaagctattctcccacctcagcctgggattacaggcgcctgccaccacgcctggctaattttttttattttaagtagagacgaggtttcctcatgttgcccaggctgctctcaaactccggacctcaggtgatctgcctgcctcagccttccaaagtgctgggattacaggcttgagccaccatgcccagcctggattgagtttgtatcatgtgccaggttccatgtcagggattccacatgccccatcccacaaccatcttgccaggtgggcattatgatgaccccccatagcagacactgtcagagctcccccaaccccatctctgcccggatgcccccactcactgtgggtgacacctgcatccttcttccggggtcgcctttgcctggtgggcattgccttgctcagagatgcctgggcagtcatgcctccctcccccgcccactgggggtgcagtgacgtgaagtgtgaccgaccacccagaccccttgcacatgcgcaggatggacctcttctatcatcacgctccagttctcccatgtggcaggctgaagcgaggcttttgaaaccatatctttgctcagctgcctctgctaccctatctttcttccaccaccccctcaataaacaacttccacaggaacccccttgggctctgcttctagggacctgacctagaagatcctcattttacagatgaggacgctgaggtacgaagaggctgcgtaacctaccagggtcacacagctttggtgtggagtagggactcaaatccagggccctggtacggaggcatttgccctcaccaagattcaggcactgagagaagctgacgggcctagagaatggcaagacttgagatagcagaaggaaggagagagggtgagaaatggatccccgtgctgaggtctggtctggaaggagaagtctgcaaggtaggaaaaagaggaaaggggacgtgaggtagggaagcaggatgtgcaaggcggggacttgtgaaagagaatgccggggggtggtgagcagcatctcatgggcaggtcagcaggtgcaggagaggcctaggagggccggggactggatgatgaaagggcatttgtttatttatcctttgtttttgttttttgttgtttaaattgagaccagctctcacaatgttgcccaggctcgtctcgccaactgtctgcccactcctggcctcaaacgatcttcctgcctcagcctccaaaagtgttgggattacaggcataagccaatgtttattcgtcctgagccttccctggacacctgatatgtagctgctttgtggtggtcacagttccatggtgtgactttatcctggaggcagtgggatgctgatagcaagttcagacaggcatgaggccagaccagagctgagttttcaagataactccagccagaggtatgcgtgcatgtgcacatgtgggtacatgtatgtgtgtgcacgtgcatgtgtgtatgagtgtggactagagatggaatggctttctgagcaaagggaacagccaaggcaaaggcctgtgggctgcagggagagaacaaggtttgatctctgcactccctcctctaagctctgtgtcaacagcattttcaggacagcaggaaggattcccaaagagcacagcagcgagggcagttggagggaggcgtctgctgggacactgaaaccagggtggggtaaactcccctcgcacctcctcagactcagagcccccataaatcttccaggtgcaccccagcccttttccctctctctgtctgaactggggtggcatgatcccaggactgcaactccacgtgtctggattccccttactgactgcgtgaccctggccattttccctccacctttctctcagcgcccccatttgattactcggcctcaggggtgcactggggattcttagaggtaacacttcgaacggaaagccagaggtcctggtgccaaaatgcaaatgtgagggcttgaaagttcatcgggttttattttctctgttccgtttgcagtagctcttctttcttgttttctatagaacagtaaaaaactttatgcatttgaatatcgtgaaccttgtaattcatatgcaatataaaaactactagctatgcatggagaaatcaattgaagaacagtggcttagcatgtctttctcattctttgatggctacctcaaatcaaatcaatatgaacttggggtcaggcatggtggctcacacctgtaatcccaacacttggggaggccaaggcaggaggatcacttgagcgcaggaatttgagactagcttgggcaacatagcgggacctcatcttaatattaaaaaaaaaaaaaagagaaagaaaaaaagtgaacttgggaggtttgaatgacaactcgtatagctgaagtaatagatatattcaacttttaaaacttaattttcattagataacacatgcatatggtataacattctaggccaggtgcagtggctcacatctgtaatcccagcactttgggaggccaaggtgggcagattgcttgagcccaggagttgaagtctagcttgggcaagatggcaaaaccccatctctgcaaaaaacacaaaaaattagctaggtgtggtggtgtgcacttgtagtcccagctactcaggaagctgaggtcggggaatcatataagcccaggaggtggagactgcagtgagccacgaccacaccactgcactccagcctgggtgacagagcaataccctgtctcaaaaaaaaaaggaaaaaaaattcctttcactggggacaattacctttatgaatttcttccagaaatattaatgtatttgtatacacatttttttttgagacagggtctcactctgtcacccaggctggagtgcagggatgcaatcttggctcactgcagcctggatacccccaggctcaagcaatcctcccacctcaaccttgcgggtagcttggacaacatgtgtgcaccaccactcctggctaatttttgtattttttgtcaagatggggttttgccatgttacccaggctcgtctcaaactcctgacctcaagtgatctgcccgcctttgcccctcaaagtgctgggattacaggcatgagccaccatatttattttttctttacacaaaggaagcatattctacaccctgttttgccccggctctcttttaaaaaacagtgtatcttggataccattccatatcattccataaagttcatcttcatcctctttttttttttttttttttttttgagacagggtttcactctgtcgcccaggctggggtgcagtggcactatctcagcttacctcaacctcccgggctcaagtgatcctcccacctcagcctcctgagtggctggatgctgcttctttctttttgatggctgcaaagaattccattgtatagatgtgccataatttaatcataatatgtcctctttgatcatttaggtttttccaatcttttgctattacaagcaaggccacgttaaatatccctgggcatattattttgcacattatgaagatatctgtaggctaaatacctgtgtatggaattgctcagtgtgattacatggcatttaccactttggtagataaaggttgtatcctgttacatgtccacggatgaatttcttccagaaatattcatgtatttgtatacacattttttgagacagggtcacaaaaccgttaacacattattattattattattattattattatttcacattatttagggaagtttcatttttttgtgagctatcactgataatttcttatttactcatcatcttgtatttctcttccttgcacattggggaaatgtctattctagtttttaatgtaaatgttcttgtggcttttttagaaaaaatcaaaatgtgcacattaaaaagtttgaatggttcaaaaggtcctaaaaagggtccacagtggaaaaggctctcctttcccagcaggcccagatccctcctcagacacaagcctgtcgtcagtttcctgtgtagcttcccagagttggtcactatgtatgcaaatacacacacatttaaaatatacacactccacgtccacgtggaatgatgcaaagcatctaagtgcccgttaattcacaaccttgccaactcagtaatatccttgcgaatctaatagctagaaaatggtgtatctttttagttctaatgtattatatttattctattttctgtgagcttgaacatcttttcatatatttaaaagtcattggggccaggggtggtggctcatgcctgtaaccccagcactttgggaggccgaggcaggtagatcacctgaggtcagaagttcgagaccagcctggtcaacatggtgaaactcagtctctattaaaaatacaaaaaaaaaaaattaatcaggcatggtggctcgtgcctgtaatcccagctattgggaggctgaggcagaagaattgcttgaactggggaggtggaagttgcagtgagtggagatcgtgccactgtactccagcctgggcaacagagtgagactctgtctcaaaaaaaaatttttaaatgtcattggtgtttcccttttttgtaaaccttttatgttctttgcctagttttctatgaggtcattggctttttcagtgttggtttttagtaactctcgatttattaaaacatttatacatttatagctttgtttatgatgtatacatttataaccttgtctgtgatgcagatatttttccaatttgtcatctggcttttgaccttatctgtggtattctttgacaatacaaaaattttaatttatatctgatcagtttcatccagttgtttttttcttttttcatgatttctgagttttgtgtcatgcttagcaagatgctctctactctgaaattattttctgtaaaatatttttttcagccaggcatagtggctcacacctgcaatcccagaactttgggaggtagaggtggaaggattatttgagtccaggagttcaaggccagcctgggcaacagagcaagaccccgcctctattttttaaaagagaaatttttttaaaatactttttcccatgttttgtttgagcacttacattttcttaacttttttgtcgtgaaacataacacatagaaaaatgtaatgtaagtgtacaacttcatgaattgttataaattgaacatatagctttctggtactttcatggtttaacttcttacatttaaattttggtttcatctagactttattttgatataattgtgaaatagaaatccatttttattctaaaagaacactttttaaatgttcatgaaatgttttaaaatttattatataccaagcaagaaaaaatctcaacatagtcctcaaagcagaaattgcacaggacttattctttgtacagtgtaatgcacaaaaactaataagaaagccttaaaaacaaccctttattaaattactccattccaaattataatttcaatctacttagcacataagtattgatatacatttatcgaaattggccaaaagtgttttattattttttaaaagaaaaagcctagcaatggcttaagcaataaagtttttaattttaaagaataacaaacagcctcactaaatcagaggaaagaaataaaaagataaaagcaaaaattacagaactagaaaagggaccattccagcaaaattgataaatgaaaacaaaaatttgtttttcaaacataagagttaccaacggctggtgaatctaaaaagaagaaaaaacaaagtaaactaaattaaatgtgaagccatgaagagatttaaaattataagaaaataggccgtgcacggtggctcacgcctgtaatcccagcactttgggaggccgaggtgggtggatcatgaggtcaggagcttgagacccgcctggccaacatggtgaaaccccgtctctaccaaaaatacaaaaattagctggctgtggtagcatgagcctgtagtcccagctacttaggaggctgaggcgggagaatcacttgaacccaagaggtggaggttgcagtgagccgagaccttgccattgctctccagcctgggtggcagagtgagattccgtctcaaaaaataaataaataaataaagctgggcgcagtggctcatgcctctaatcacagcactttgggaggccgaggtgggcggatcacaaggttaggagatcgagaccatcctggctgacatggtgaaaccccgtctctactaaaaatacaaaaaatgagctgggcatggtggcgtgtgcctgtggtcccagctactcgggaggctgaggaaagagaatggcgtgaacctgggaggtggaggttgcagtgagctgagatcacgccactgcactccagcctgggcgacagagtgagactccatttcaaaaaaaaaaatacaagaacatattatatacaactgtgagctacaccatgtttgaacatcttgacaaaatgagcaactttctcaaaactaaattgccaaatgttcatttttaaaaagccaaaaataaccaaccaacacaatgaggataaatttaaagtgatcaagtttgatttttttaaaaaactgttcaaacatcttggtagtgctgggcaggaagttggctttcattctgggtgagatgagaaggctctaaggggcataggacctgatgtcatgggacctgatgcaggctctgtcttaatagctgactcctgcgtggagtaggttattgggggatgggtggacagagaccagggaggaggctggtgcaggaatcccagtgagaaatgatggtgtccaggctaggccatagcagtagaggaagcaagattctggaatgcacttggaaaatgaagccatctttgggcttgagctcaaggaagcatgaagctgcccctaactgaagtggggaaggtggtctggggagcagtttaggaggagagatcaggagctcagtttcggacttggaaattttgaaacgcacatgaggcatccaggtggagttgggagaattaaataatgctgaaaggtactcacttggcaagtagcaaatattcgctatattgtctgttcaactttgtcaactgcttttccagtagaaatgtagtgtccttatcacacatgcataaatgttaaactcaaaagtaaaatgaaatattttctcagtagatatgaataactttttaatttttttgttttttgacatgcggtctcactctgttgcccaggctggagtggggtggcgagatcatagctcactgcagcctcaaactcctgggctcaagcaatcctctgccacagcctcccgattagctgggactacaggcacacaccaccacgcccagctaatcttttattttttgtagagactgagttgcacaatgtagcccaagctggtctccaactcctgagctcaagctatcctcccacctcggcctcccaaagtgttgggattacaggcgtgagccactgcacctggctgctttttaattgtaatattcatcctccatccatcatacttagtgcaaatatttttccccacctattgccttcctatttctcttttatttcacgtcatttagggaagtttcatttttttgtgagctatcactgataatttcttatttactcatcatcttgtatttctcttccttacacattggggaaatgtctattctagtttttaatgtaaatgttcttgtggctttttttaaaaaaaaatcaaaatgtgcacattaaaaagtttgaatggttcaaagggtcctaaaaagggtccacagtgggaaaggctctcctgtcccagcaggcccagacccctcctcagacacaagcctgtcatcagtttcctgtgtagcttcccagagttggtctctatgtatgcaaatacacacacatttaaaatatacacatgccacagctttttaaaatttgaatttatgggccatgtgcagtggctcacgcctgtaaccccaacactttgggaggccgaggcaggtggatcacctgaggtcaggagttcgagaccaacctgaccaatatggtgaaaccccgtctctactaaaaatacaaaaattagctgggcatggtggtgggtgcctataatcccagcttctcaggaggttgagacaggagaatcgcttggacccaggaggcagaggttgcagtgagctgagatcgtgccactacactcaagtctaggcgacagagggagactccgtctcaaaaaaaaaaaaaaaaattgaatttagactcaggtgcagaggctcacgcctgtaatcccagcacttacggaggctgatgaggggagaatcacttgagtccagtagttcaagaccagcctgggcaacacagggaaactatgtctctacaaaaaaattaaaattagcctggcatggtggagtgtgcctgttgtctcacctactcaggagggtgaggcaggggaatcacttgaactcaggagtaggaggctgcatgagctatgattgcaccactgcactccagcctgggtgacagagcaagaccctgtgtcaaaaaaaaaaaaaaagaaaagaaaattagactaccatcatagatggtacaaacacttcccagtttgttgctttcgttttgtttgttgccatttttactatacagaaaaaaaaggcaataaagaatacattattataatatgttaatttctactgcattatttttaacaacttcattgaggtgtaatttacataccgtaaaatctatccattttaggtgtaggattcagtgatttctggtaaatttactgagttatgtgaccatcaccacaatctggttttgggacattttcattactgccataatattcctcaaacccatttagaatcattcctatttctgctcccaggcccaggcaaccagtaatctacttgctgtttcaatagatttgccttttctggatgttttacataaatagaatcatacaatacgtgatctttagtgatcttttttcacatggcataaacttggttcctttttatgttgaataatattccattgtatagatatgtcacagtttgtttctccattcatgagcttttgggtatttgggttgatttcactttttgactgttatggataatgctggtacaaacattcatatacaagtttttgtgtagatgtatattttcatttctcttggaatagacctaggcgtggaattgctggattagatggtaattctattgttttacattctaaggcaggggtccccaacccccaggctacagatcagtgtcggttcatggcctgttaggaactgggccgcacagcaggtggtgagcggccatcgggcgagtattactgcctgagctctgcctcctgtcggatcagcggtgccattagattctcataggagcacaaacccagttgtgaaatgcgcatgtgagggatctaggttgcgagtttctgatgagaatctaatgataaatgtaatgagcttgaatcatcccgaatccatcccccaaccccaacccccgtccggggaaaaaatgatctctcatgaaatcagtccctaggccaaaaagtctggggactgctgttctaaggaactgccaaaactgccaaactgtttttcagagtggctggaccattttacattcccaccggcaatatatacggtgtcctgtttctttacatcctcatcaacatgtgtctttttcattacagccattctatgtgggtgtgaaatgctatgtggctgtgtttttcatttccatgcagaaatttttaatttaattgcttagttaaaaataattctttaaatttaaaacactcatattgccatatgtatatttttatactacaaagtgatacaatttttgttaattttcttgccttgattactctttacctgtatagtatttaaatctttacataagatcacaattatagtgaatagtaatttattcaactcaaaatcttcataggatttagaaaatttaagtcctttaccaaagggattgacttctaacttcattaaaggttgcgaacagtatcaaatccttggtaaagccacattcaatctttggcactccaggattttgagctataactgtagtgatcactaatatgtcatttctaagctgacggtcataatgactaaaacctctcatagattttaaaatacttccttcaaagtcagtaaacattccaagttactaagctgttgaacaatttcttattttgaagattttttctgataagttccaaagtgtttctgatgaaggaaataaaagctgtccagagaaatctgagtcattgaggtgagcacagattccattggctgcttgtgctttcatcattacagtacaattaacttcagaagtcgagagatgctgcagaattttaagtacccaaagtttctcaacaagttgattttcaagcaaggtcattaactgggccattgtttttgccaatcctccaacttcagccatttgaatcttgtatgatgaactcacttgctggtaacctggaatatgctcctttggtggttgtgcctgataaaagtcaacaatacgtttacaattttttatcctcaattcagaacttggtattttcattaagtcacccagaagcgcaactgaactagcagtatctccagcataagttatttcatccgatactttctttttcaaaaatggcaagccacactattttatgatatcatatgcagattctacaaaatgcggctggttttcaatttttactgcacacagattcagaatttcaaatgtctgtactaaatcccttaagggaagttcattctgataacactgtaccagtttcttgacagatttaagttgcttttcttctaagccttctttagcagtctcttcaaaaagtttgatgacaccattaaggtccacaggcttcaaaacaccagttccacatggcgagggaggccttgggaaacatcatcatgatggaaggcaaaggggaagtaaagaccttcttcatggtggcaggaaagagacagcatattgctatgtattttaacaccacttatttccccccttttttctttcaatatcatggattaaatagtgtattttaaatgagtgtgaggctcacttggactctattccatccctttggccaatttttttccatttttaatccaagaatcttaaagtttgaatgatggtcaccttgttatatattttattatgtttggaagcttttttgctattgtctgatcctcccaacaaatagccttttgatagaattgcctttattcgtttctttatatctaattctaacttaagattagacttaaaagtaacttcagcggttttattatgaaatatttaaggcatataaatactgcctcttttctctaaatgactgctaatataattttaccaagttctgttaaagtatcctgttgtacataaagtgctgttgttttttatctgcctgttaacttagagtgggttttattttctttcactttctgtggtcgaaggcaagtatgtcttagtcagtttgggctgttataatgaaacactgtagactgggtggcttaaacaacagaaacttgtttctcacgttctgaaagccgggaagtccccaatcagggagccagcaggcctggtgtctggagaggatgcgcttcctggtttgcagacggcaccttctcattgtgtcctcacagggcagagagcaaaaagaaagggcaagcgctctccagcctcttcctttttcctttttttttttgtttgtttgagatggagtcttgctctgttgcccagactggagtgcggtggcatgatcttggctcaatgcaacctctgcctcctggcttcaagtgattctcctgcctcagcctcctgagtagctgggactacaggtgcctgccaccatgcctgactaatttttatgtttttattagagatggggtttcatcatgttggccagactggttttagactcctgacctcaagtgatctacctaccttggcctcccaaagtgctgggattacaggcgtgaaccaccgcacccggcctccagcctcttcttgtgagggcagtaatcccatcataaggggtccaccctcttgacctaatcacttcgcaaaggtcccacttccaaataccatcacactgggtatttaggcttcaccaggtgaattggtgggggaggtgggacacaaacattcagtccacggcaagtttttatctcaatttgctaaagcctctctttatttctcctgttacagtgtgataatgttttttaaaatatcatttagctggctgtggtgacccatgcctgcagtcccagctactcaggaggctaaggcaaaaggatcacatgaacctaggagtttgaatccagcctgggcaacatagaaagaccctgtctcttaaaaaaataaataaataaataaataaataaataaataaataaataaataaaggaaagaggctgggcacagtggctcatgcctataatcccagcactttgggaggccgaggcgggcagatcacctgaagtcgggagttcaagaccagcctgaccaacatggagaaaccccttctctactaaaaatacaaaattagccgggtgtagtggcacatgcctgtaatcccactacttgggaggctgaggcaagagaattgcttgaaccagaaggtggaggttgtggtgagccgagatcatgccattgcactccagcctgggcaacaagaatgaaactccatctcaaaaaaaaaaaaaaaaaaaaaaagaaagaaaagaaaagaagcacttaaagaggctgaggcaggcagatcacttgaagtcaggagttcaagaccagcctggccaacatggtgaaacctagtctctactaaaaatactagaattagccagacgtggtggcacatgcctgtaatcccagctactcgggaggctgaggcatgagacttgcttgaacctaggaggtggaggttgcagtgagctgagaacatgccattgcactccagcctgggcaacagagcaagactccatctcaagaaaaaagaaagagagagaaagagaaatatagacatatgttattagtcccccaggacctcttcaaaagatctctcttttcctttcttatttctaattaccatactacataccacctccattatgtcagaatgtgccctatttacgtggatttgtctaaagtcatggaactctgagttacattccccgtatttcacagagacacaatcagagcacacgctgatcttccgcctctcttcatttcctccatgtactctgtagctacctgttctcttctttgttcgtaggaagatctctgttgcgtggtgtgggagtttgtgccagctcatctttttattgtgctttctgtgagcagctatcaatgcctccaggtcttctctttaagaagaatgtttactctcaattgtttaaaaaactaactaaataggaagaagattgcaaatcctaacctttttggggttttatattgggggcaaaagttggcatctgcagtaaggattatttcattttcatctgaataaatgagcagtaataactttgctgacttgcagggctcattgtgatgccaaaggacattgtaaggtgcatatctgaattggaggaggaagaggggcatcctctgagccaggtgtggcaggaggtgacatcaaggagggttaggctgcgtaaacccagggacacaaggagctgcagtcggggaagaacaaggtctagcggatggagttggggggactgtgtctggagccaatgttctcagatgtgtctccggcaggcaggggcaagggctggtgcctggtttacagcattccttttggagtctggaatagtggggaaaactccctgtcttctctccccttaggagtctgcactatggaaacaacctgtcaatccagctcaaggcacacatagcccagacacccatgagaccctctccgtggggaccctagagcacctatcatgaacgaggagaccaagtaggtgatttttctctccccttcacctcctcttttcccctcctatctacttcgtcacttttctcctactgccaagactggtccctacccaaatctgccttactgggctgcccccaacacaacaaacctgcccttgaccatcattcagcatgagaatgtaatgatcagacacagaaaatcaggaagagttttgagacagcatctaatctacccattttagagatggtatgactgaggcttatataggaaaaaggcttgctcaaggtcacactatgagtgtatcagctaggataggccaggttacactgtagtacatgcaccctccaaagtcccagtgactcatggcaacaaaagtttatttcctgctcttgcttcctgtctcgtgtggattgactgggattgctcctccacatcatcctgtctcccacactcaggctaacagggtagccatgatttgcaatatttctggtccctggagtagaaaaaaagaaaaagtactgtcaattacaccttggttcttaaaacaactacaggcatgacatgagtcttttttagcatgtttcattgaccaaagcaagtttcatggctgtgcccaatttcaaggaggcagagaagtgtaatcccaccaaaggcctagaaagaggagaaagagtatctgtgaacagccctaatgcctaccacagagaattagtaacagagctgggccatggatctttcaaccatcgtcctctgtctccaagattattccccatggaaatctcaatgactgataatgatgccatgtgctttttctcctgaggatggttagccttaaagagatttgtgtcatatcctaaggggatagaacactaatgatggaaacaaaggtattgtgttagactggctggaggagaaatttgaggatgagaaacatcaccagaaatcacaccatccaggcactacttacttccatctggtgccatgctgccctggaccatttcttcatgggtagcatggatgctggacaccatagcctggaaaagaagttatgccctaggctatggccacatccttttgccgagatcacacaaaatccagggacttagccttgtctggtgccatctaggcctccaaggccttggaaatttactggcctgggaggcaagaaacctcagttctcctcctgcctctgtcatggacttgctgtgtgactgtgggcacaccctttgcccttccttggccatggtctttccgtctgcttagtggaggtggtgatccctgcctgaggatcatggtgtgagcatgtttcataaattctaagactctctgcctgagtgaggacctattgctattagcccagttgaggagaaatgaccagtggggctgacagtacatccaagtatgtctctactgcatgcccagggagcagctgggctctaaaccccaggacgcatagtactggcctcagcctctgggaattgggaaggctggcttctgggtggacctcctactcttttcagagttagaggtggactctctggagttgtgaggataaaataaggtatataaagcacttagacagtgcctaatacacagtgagtgctttccaagtgtgtactgctatgaggaaggacatagtaccagaaagtacatccggaaatgtgatagcatagtccactagatgatggaccaccatttagttggccaatccccaactgttggacatttaggttgtttccaatttttaataattataaataatcttgcagtgagcatctttgcaattaaatattgtatatacgttcatgatcgtttgccaaggttagagtcctagaaatggaattactgaatcaaaggaactgcacattatttaggcttttgctgtgtaaatgccccgtgccctctattggtacttctagaaggaggtggtttaagagttccagttcggccatcatgatggctcacacctgtaatcccagcactttgggaggccgaggtgggcagatcaccctgaggtcaggagtttgagcccagcctggccaacatggtgaaaccccatctgtactaaaaattacaaaaattagctgggcattgtggtgtgcacctgtaatcccagctactcgggaggctgaggcagaagaatcgcttgaacccgggaggcggaggctgcagtgagccgagattgcaccattgcactccagcctgggtgacagagcgagactctgtctcaaaaaaaaaagagttccagttcagaagggaagaatttgcttagcaaaagaggtgatggtctgtgttagctaggattagagttcactgtgagtagcagaaagcactaaacaacagtggcttaaccagaatggaagtgtatttccctgccatgtaacagaagtccaaagtcagtgagcacagggcagatgggcagctttaccttccaccttcctcagtatgggttccacctcatgattcaatatggctgcccaagatccagccatcccatcaacaatccagacaacaggaaggagcaaagaagaatagacaacatttctacttacattccactggccaaattacatggctacatataactgcaagggagactgggatataataatctattctagatgaccagagaatatttagtagttctaatactgaggaagaagggaagaacagattttgggagacaactagttgtctctgccatgaggttagctcagactgagagcagcataaatggttcatggaaataagaatgagtaatgcatcctcacgggactgtccacaggggatgaacaagaccattccagagagccagggtgcaggcacaaatggagtagggagggggtgcagaagaaacagactgatctctggagctgatccctgggcagagacatcaagactccatggagaggccacttccctgcctattttatgtcgctcaaatgtagggactggttcttgactgcttgacttccctagaaactcccttatcccccaactcaccttccccagatcaccttccccctagttcatctgtaccccactcacctgccctcaggtcacctgccccacaactcacctgttctccatctaatcttcctcccagctcccctgtcccccaaatcacctgcccccaatttgcttgtcctccagctcaccggttccccagctcatcttccttccagttcccctgtcccccagctcacctgcctgccctcagttcacctgtcccccagttcatcttcctcctagctcccctgtcccctagctcacctgtgccccagctcccctgtcccccagttcccctgtcccccagctcacctccccctcagctctcctgtcccccagctcatctgcccccagtttacctgtcccctagctcacctcccccccagtttacctgtcccccagctcacctccccccagtttgcctgtcccccagctcaactccccccaagttcccctgtccctcagctcatctgcccccagtttacctgtccccctcaactcacctatcttccctgtccctccagggctggctcctcatggaccccgttggcctccagctcggcaacaagaacctgtggagctgtcttgtgaggctgctcaccaaagacccagaatggctgaacgccaagatgaagttcttcctccccaacacggacctggattccaggaacgagaccttggaccctgaacagagagtcatcctgcaactcaacaagctgcatgtccagggttcggacacctggcagtctttcattcattgtgtgtgcatgcagctggaggtgcctctggacctggaggtgctgctgctgagtacttttggctatgatgatggtaagggcaggtgtgagagacgcaaagcagccgggccagtacctgcgtcatggggagccgggaggagcccagggacccacctaagtcagagagagggtgtagcccagccacgatctcaactctatatttctggacacttcccagaacaaatttcctaatgcgcccaaatctgctggggcctggaggacccctccttctacctggcttcactcgaattgctcgaattgctgagtgactgcttccagccacaaaatcccacatagcccataatgcccgagagatttatttcttcttttttggcgggggtgggggggtgttttttgtttgttgttgctcttgttgggttttgtttgtttgttttttatttttgagacaaggtcttgctctgttgcctaggctggagtgcagtggcacaatcatagctcactacagcatccaactccaggactcaggtgatccttcccacttcagcctcccaagtagctgagactacagtagaactataggtgcatgccaccacattaggctaatttttcattcttttgtagagacaggacatcactgtgttgcccaggctggtcttgaactcctggccttaagtgatcctcctcccttggcctcccaaagtgctgggattatagatgtgagccatcacacctggctagaggtgtttttgtttgtttgtttgttttgcaacatggtcagaaacagtgacggggagcgccttctgccctctactgatccgtggggatttcttgggcaccttctgtttgcacagcactgaggggaaacacaggacattgaggggcaacagcgtttttggagagaaaatgggaactcacttaagaaccctacttcaaggcagagtgtgggaattgcggggggcggggcggcgcatgcacatatgtgcagacatatgcagatacacacagtgcatatacatgtgggtatgtgcgtaaacccatgtacacatgcatgcaagtgtgcccacatgcataacacatgcatgcctgtgcacacacatacataaacttgcatgcacttgcatatacacacatttctgcccagcactgccttcaaagctcaccaccacattttctccacaacagataactgagtgttccatttagttctcccttgctgggtatctccctgtgagatgagccctgagccaggcgccaggccagagctggtccccagcatccctcgacagccccataccacattatactctcccctctcttgcagggttcaccagccagctgggagctgaggggaaaagccaacctgaatctcagctccaccatggtgaggactggagttggggggtgggaagggggtggtgagcactgtgaagtccccacttccaagctggaggaggctgtggaggctgtggtggctggtcacagccatttctcataggccatgctcttcgtctgtccctgacccatttgcaagtgtgtcaagcccctaactgtgtctcccagccccacctcctcctgcagtgactttcaaggctttagcttgtcccgttaccaattctaaagggtctaacctggaacccctcaggaagcctgttctcactttcctgcccgcaacccgcagggcctcatctcccagccccaaagtgtcaggcttcatggggaagccctaaccaccccctcccgacttgtacaccttggacttgacactcacccacagctgctgtcttcagcgggggagcctttggctgattttctgaaggagctcggaagggccagtgattaaataatgaccacctactgattcgtgggtcacactttcatctcagcaccttgatttctacagaagcattgactttacttatcgctgtgcatggcagtaatgccaacagaaaacccaccctataacctcagctccccagtgaatcaaaactgtccaagtccctggtccaataggcccgcatcactgagctggcatcattatctcatggctgtaaccagatctgattgatatttggccagtgagtccctttttaatataggatttgttaagatattgaagtgctctcgaactggttccagcctcctagctggacaaggagcccagggccctgctccaggggctgttcctattggtcacttagcttagctgtaggaggaccctgcttgacttcttaaaattctttcctgagtcctctttcctttctccctcccttcctttctgggtccccttccttcttgttttccttcttcctttctcaaactcttccagaaaggcattaaagtgattgttgaaaatccatacaatgagacaagactccagaaactattaagggaagtgaggaaatgtgggtgataagaaatcgggatgataaaaccctaacagaggagggaggttgcaggcctggccaaactcactgggaacttcacttatatgaccaccggcggcttccatagagcttggtccttccctgatggacagatggccatttagtgcttggagctgagtgtttctgggggctgctggctgttggccctgcttcctgcatcctggactgcaagactgccaggcccagaacatccaccttccaatgggggtgcctagaagtccactctgcaaatagaagctggtgttgacccagcctctgcctgctgcctgcctttccagtccctgcatgtgggtgtacttggctgcctgccacctgtctgtggactggagttccccaaaggttctgggtaacccctcagcccagatccccagaccccactcctccaccccttcctttgctttttcaggcctgaagcgcccacatcagagctgtgggtcctcaccccgccggaagcagtgcaagaagcagcagctaggtgggtaccagtgtggggaggaacataaacagagagatggggttgcctgggggccaagacccggaccctggaccttgtcccctgccaataagcctccagaggcccagtgactcttgtctcgcaagtttccaggagaaaaggactggaggtcttgcacaggcagaggagaggcctgggctggcagcgaaggggctccccacccatctggctgcatggggacttctctgaagagggctccgctgaaggagctggaagcaccatacaggtctcagcttcgctgtccaggcttttccagggacaccctatgtcctcagtgttgaaggagacccagggaggagaccagtttgggggtgagcagggatggggaggggtgaggaggcctgggagaaaccttcaagacagaggccctgggggcccatggggagacatggagctgcttagggcaggccaggccagtgagagaagaaaggggacttctctcattcttgaccagttctcagaatggtcctcgttctccacgagttgtcccactaactagagccttctctgcccccactgctgccaaccatggctataaccagaggattcacatccgctcaaaatagttcactaccttggcctttccccatagggttcccccaaaagcagccccagccctttccctgggtcacctgagacctctcaatgacccaggaattaaaaggttaacatctggcactgtaggggcccagctcccacagttccgatcggtaatgcctaggcctacaggttgttagtgctcacccctgggcattgcagaactgaaatattgggaagaggcactggggatccagatattacagaaagaggttgtttcaataagatattgcaaagtagctgggcgcggtggctcacacctgtaatcccagcactttggagggctgaggcaggtggatcagttgagcccaggaattcaatactagcctggccaacgtgacaaaaccttgtctctactaaaaatacaaaaattagctgggtgtggtggtgtgcacctgtagtcccagctactcaggaggctgaggcaggaggatcacttgagaccaggagtttgcggctacagtaagctaggatcgtgccactgcactggagcctgggcaagactgagactctgtctctgggaaaaaagaaaaaaaagagatgttgcaaaggaggtgccctattcccctccccccatcttactgaacccttacaccacgtgtactattgcagaatggatagaaccgtgacccacacttccccattcccacctgcctgtttaaatagctaccggagagcctatgctcccttagaactgattccttctggaagttggggtggcacagatccccctatggtgctcttgacacccccaccctcaccccatcatacatacacatctggggctacaggctcccaacagcccaatactggggcaagaagacatgagcagagggccggggggtcctctcctcatgccatgtccctgccccttgcagagttggccaagaagtacctgcagctcctgcggacctctgcccagcagcgctacaggagccaaatccctgggtcagggcagccccacgccttccaccaggtctatgtccctccaatcctgcgccgggccacagcatccttagacactccggagggggccattatgggggacgtcaaggtggaagatggtgctgacgtgagcatctcggacctcttcaacaccagggttaacaagggcccgagggtgaccgtgcttttggggaaggctggcatgggcaagaccacgctggcccaccggctctgccagaagtgggcagagggccatctgaactgtttccaggccctgttcctttttgaattccgccagctcaacttgatcacgaggttcctgacaccgtccgagctcctttttgatctgtacctgagccctgaatcggaccacgacactgtcttccagtacctggagaagaacgctgaccaagtcctgctgatctttgatgggctagatgaggccctccagcctatgggtcctgatggcccaggcccagtcctcacccttttctcccatctctgcaatgggaccctcctgcctggctgccgggtgatggctacctcccgtccagggaagctgcctgcctgcctgcctgcagaggcagccatggtccacatgttgggctttgatgggccacgggtggaagaatatgtgaatcacttcttcagcgcccagccatcgcgggagggggccctggtggagttacagacaaatggacgtctccgaagcctgtgtgcggtgcccgcactgtgccaagtcgcctgtctctgcctccaccatctgcttcctgaccacgccccaggccagtctgtggccctcctgcccaacatgactcagctctatatgcagatggtgctcgccctcagcccccctgggcacttgcccacctcgtccctactggacctgggggaggtggccctgaggggcctggagacagggaaggttatcttctatgcaaaagatattgctccacccttgatagcttttggggccactcacagcctgctgacttccttctgcgtctgcacaggccctgggcaccagcagacaggctatgctttcacccacctcagcctgcaggagtttcttgctgccctgcacctgatggccagccccaaggtgaacaaagacacacttacccagtatgttaccctccattcccgctgggtacagcggaccaaagctagactgggcctctcagaccacctccccaccttcctggcgggcctggcatcctgcacctgccgccccttccttagccacctggcgcagggcaatgaggactgtgtgggtgccaagcaggctgctgtagtgcaggtgttgaagaagttggccacccgcaagctcacagggccaaaggttgtagagctgtgtcactgtgtggatgagacacaggagcctgagctggccagtctcaccgcacaaagcctcccctatcaactgcccttccacaatttcccactgacctgcaccgacctggccaccctgaccaacatcctagagcacagggaggcccccatccacctggattttgatggctgtcccctggagccccactgccctgaggctctggtaggctgtgggcagatagagaatctcaggtgagtaagagtggaggaggaccggggaggggattgggcttttgggggagcagaggccaaccagtctagcaaacctctgccaagaggactggataagaatcttgaatatcagaacataatggcctgcaatgcaagagaggaagctccataccttgacaggacctctggagtccaaatggatcctcctcttgtctgtggtttctggactctcagtctctctgtcaatcatgggctgaaaccacagatccaggctgtctatagaggctggtggactttgggcaagtatatggagcacacacatgcacactgtctaggccagagtttcttcgttcctaaaacgaatctgtaacaatagccaactcatatggtcattgcaagaatgagatgggatggtgcatgaaaaacattttgtagcacagtgcctagcacagagcaaaggctcagtgtgcatattagctagagaaaaggctaggctgcagtaacagagaaacctcctccccaaatacagtaggttaaataatgtagaattttatttctctctcatggaagagtcagaggtaggtggtccaggtcagtggaatggctcagctccacgcagtcatgcaggtacccaggtccctcccattttgctccattatccccttgggaatcctatctgcacagtcaaagctacgtcatgggtatatctgtgctctggcttgggaacaaggaaagagcatggaggaacatgtcaatgcattaaagttcagtcctgaaactaggatacatcccttccactcacattccattggtgagaacatagtcacctggccacactgagctgcaagggaggctgggaaatgtgatctctggctgggaaaccatgttcctcatgatagctctattgctgtagatgaagtggagaatgggctttggtggacgattagaagtctcggccataatatgtatttgttagtactactgtattaagccccatctctctgaggggatggcgatgacttctcagctctgcccagcactgatcctctgacacttcgcttcttcttatggcagctttaagagcaggaagtgtggggatgcctttgcagaagccctctccaggagcttgccgacaatggggaggctgcagatgctggggtgagccaggccttggagctgagaagggtcttcagctggggatgcctggtactctcctccctctccttaatcctacacaaggcagattcctggccccgcccttttcccctcctcgttcctccccaccatctttgcttactctgtaggttagcaggaagtaaaatcactgcccgaggcatcagccacctggtgaaagctttgcctctctgtccacagctgaaagaagtcaggtgagtgatctccaggagggctcactgactggggagatgagccactgcccaggtcccagagtccccctggggcctgcatgttcctccaagtctgaccagtagtttttcagtgagacccagagagggaaggcatcagtccaagtactcagtagggctgagtccaaacccaaggctcccagagtccccagagcaaggcttccttcatctaatattttagactgtcttggaggagcatgagtgttaaggctccctccctctttctgaaatcccaggagaagggatagcagtgcgtaggcaggaatcaggcactgtgggtacacataactacatgaagcaccacacaccttcacatttgttcacacatgtctacacttgcacagaagtacacaggcatatgcaagaatatgcacccacacatgcccactcataggtgtgcacatgtatgcagcgcacacatgcacctttaactacatgtacacattttgatgccagcacactctaactaactaagcttgtatgcacaaatatactcctgccctgtgtctgggactcagtaccatggggaggagtgggaccagtgaccctcctccctggcagaacgctgctagtttatatggcacctttatgacatttagagaaggcaccacttcatccacacagatgcagcctgtcactaaggttcagcacttgttgagtgaaaataataagttggaccacagtccctattgtcgtctcggctgggcatctgtgaaccgtgattaagccaaggttcagaagtactgaacttgttgacatttttcttccctggctattgaaagtgactttaattttgtctttcatcacccaccattgttcttaatcaccctcactcccctcaactcatctgtctccccagctaggaacccaggcaaggctggcttgtgaacaggtggggaaagtgaggtcagagaggaatgcgcttggctcagggctctgggtgagtcagggccacagccgaggctggaagcgatgtctgcagcgtcccagtctagactttactcattgcctggggggcctatcccaggcacatcccaggcataagccctgggagcagggtgctaggtctcctcattgtgcctcatgaagaggccgtcagtctgtcttctagatcccttgagccgccaggcaaaaacttccccataggaacagaatagacccagaattgaggccagcagagggtctttcctcctagccgtgcctgctggaatccggcgagcaggccatcagctctttctgggcccctgtcttatgtctcccacatgagggtggccatcctgtcacttgctaactggggcttgcaagtgccccaaccccagggcaaagggactgggccttggtctcctcgcagttttcgggacaaccagctcagtgaccaggtggtgctgaacattgtggaggttctccctcacctaccacggctccggaagcttgagtaagtgatctttccactgcctctgcagcccagtccctctctatacctgattcaccccactcccttgcaaggcaaggaaggtctggggcccctggggtaggggattccactcctgacacctttgccacaatcttgcagcctgagcagcaacagcatctgcgtgtcaaccctactctgcttggcaagggtggcagtcacgtgtcctaccgtcaggatgcttcaggccaggtgagcagaaggaaagggatcttggccttatgggccttgagaaaagaggaggggaaagtgggatgggaaatggaggaggcccctcgtctgcaggataaatctgtgcataccctactgttttactcacagctttaccttcagaacctagctcaggcttggcacctggtacttggtatatattgaattaatggatggatgaaaagatggatgtatggatggatggctgaaaagatggatgggtggatgaaaagatggatggatgaatggatggctgaaaagatggatgggtggatgaaaagatggatggatggatggatggatggatggctgaaaagatggatgggtggatgaaaagatggatggatggatggatggatggatgaaaagatggatgggtggatgaaaagatggatggatggatggatggatggaaagattgatgggtggatgaaaagatgaatggatggatggatagatgaatggatggatggatagatggctagctgaaaagatggataggtgtgtgaaaagatggatggatggatggatggatggatggatggatggatggatggatggatgaaggaatgagtcaacaagtctacgaagcacaggcatagccaaaggaataattagctgtgtgttgccctccatggtgctgaaccaatatagccagttttgatcatggggtaggttaggtgtcatttttcttactcataaaaatttctattaaaaaaaattcagccgggctcagtggctcatgcctgtaattccaacactttggaaggccaaggcaagaggattacttgagctcaggagttcgagaccaacctgggcaacatagtctctacaaaaaatgaacaaaattaatggggcatggtggtgcatgcctgtggttccagctatttgggaggctgaggtgggaagattgcttgagccgtggaggttgaggctgcagtgaggtgtgaacacaccactgcactccagcctgagtagcagagtgagatctccatctcaaatttaaaaagaaaggaaaaaaaaaaactcacaacattcttaatttttattatatttcttgtgaaaattgtttttctgactttttaaaacactcttgcaggattcatcaagcaaagacataatcagtatttcacatgcctgatttaaaacacttttgctagttccgttatgtttccctgtcaattgcaaaatcagctttatctggatgtttgaacatttggggcagaaaagggtgtgcctgtggtgggtgatgtgctggtttccagtctctgggtttcatggcttggtatctgatcctgcagggaggcggacctcatcttccttctttccccgcccacagagacaactgcagagctacaaaggtaagaagccaagaggcggtgggcctggggccatccttagaagcaacttgggctcaggcagttgaggggaaaggtgaccaagagactaggaagagctggggtatgggaattcttcctgctactgctgcactgaggaatgaattactgcttaggttggcaaaggattttaacttcctctagcgtgtccagaccacatctggtccctgtggaaggaagcatccccagaagactcagaggaaggcaaacccttggggagaacataaagatactgttagactggcattactagatggtgaaaactctggaaaagcccttacaactgaaaaaagacagggagggcaattatggtacctacatcttagggttgttctgagaattaaatgagttactacacttaaggagtttagagcactgttggcatgcagtgggcagtcaaatgctggctattccagctgtgcatggattccagcttggccagtcttggatgggctgagaaaagggagctgcttttccctaaaagaccatcccaactgtgctctaccacactttgctctcctggctaagactcagagacagatgtatgtatgcccctgagcaatctctttcccttctctggatctcgattccttgcttgtataatgacctggtagtgtaggaccaatgttgctgggtgcggtggctcatgcctgtaatcctagcactttggaacgccaagcacgagaatctcttgattccaggtgttcaagaccagcctgggcaacatagcaagaccccatctctaaaaaaaaaaggcaggcgtggtggtgcacacctgtagtcccagctactcaagatgctgacgttgggaggatcgcttgagcctgggagcttgagccatgatcacaccactgtactccagcctgggtgacagagagggactctgtctcaaaaaatgacccactaggaccagtgtcactttcttttccctctaactgcttaaagctgtgatgctcagtaggatagccactagccccatatggctatttcaatttaaataaattaaaattttaatgctatttcaatttaaataaattaaaattttaatgctattttaatttaaataaattaaaattaagtaaaatgaaattttcagttcattagtcacattagctatatttcaactgctcagtggccataggtggctagtggctcccatagcaagtggtacagatgccaggacatttccatcattgcagaaagttctattaaacaggctggcatggtggctcatgtctgtaaccccagcactttgagaggctgagggggcaggatcgcttgaagctaggagttcaagaccagcctgggcaacaaagtgagacccccatctctacaaaaaaaaaaaaaaaatagctgggcatggtgattcactcctatagtaccagttactcaggaagccaaggtgggaggatcacttgagcccaggagtttgaggctgcagtgaactgggatagagccactgcactccagcttggggactgagtgggaccctgtctctaaaaaaaaaaaaatggttagcaccaatccaaaaagtctgtgaaacctggctcatgatgtcctagcttccctgcatcccctaacgctccctcagcccagtgggagagagtctgtggtttaccatagcctggactcactgcatacagctcatgctcctcgccttctgaaccacagacagcacatccacaaatggagaccatcacatcatcgacaatagcagcttctgtttactaaccttcgattttacacctatgctgggtacttggacatacattgtctcattcaatccttcaggtacctatgtgctagatgttgtcatccgttttagaaaagagaaaagggagccgactgcagtgatttgcccaaggccacatggctatacatggcagagccaaaatttgaataaaggttccatttgacctcaaacctgttgcccctcctgctctgctgaatcacatcttgagcatctgcaagcagtctcctttgttaccgactcactttgggttgtgcttcagggtcttcagcctctagaagccaaggaaagaggcttgatccaccaggccctagatgcctgagcccaggccaatgcttgatttgttcttgccagagctccagacctgcaggaaagtgacggccagaggaaaggggctcagagcagaagcttgacgctcaggtaccttggagggatctattgccttaggagagggatatgatatgggggaaagtccgaggcaagggagagcaggggcagggaggataaagggaaaagcagatgagggacagggaaaggattagccgggtgtggtgcccatcctggatagcccatcctggcttgaataaggagcatctgtcataataacaatagctgcaacttaatggaaccggctatctatatgccgggcattgcactagatgttttacatccattacctcactgtaattcctttagaatctctgtgaagtacacattattattcccctttgagggaggaggaaactgagtctcagacaggttaagtcccttgctcaagatcacccagctactaagaggtgtggctaggattagacccaggtctgtgggccccctgactcccccagcattggaagctggaggggccatggagtaggggctgtttgccctgagcccttctgtcccccactcctacccaaggctgcagaagtgtcagctccaggtccacgatgcggaggccctcatagccctgctccaggaaggccctcacctggaggaagtggagtgagtatcacgggaagccctggcgtaggagccaggaaaggaggttggagagggtgggcagggcctcgcctttgggtgggtggtgtgggggaggggcatgctgcctcatgaagaatttgggggaatcagatcattgtaacagctgctactattcagcacttgtcccgggtcaggtgctgtgctagggactgtacatgcctcctcgcattcactcctcacatctctgtgatgtaagcactgttactgtcctcattttatagaggaggaagttaagctgcagaaagataaacttgctcaaggccacacaggtaggaagagtctaggctagggttcaagcccagacagtctggctcgcagcctcatcctcataaccactgctacctctcttgctgagatctgccaagtagaaaccccaccacacctgggtctgccttccaaaccacagtccctcagggctccccccacccccttcatccttctcccagagtagagtgggataaccttctcttttcgggatggagaaattcccatggcgtccagcccctggctgaagccaataagagtagtgcttggggatggacggaggctctgtcacgaccctaggaggggcgcccctccaggaaacctccaagtgaacatgaaggcagatgatggaacgccaggatgtgttctgggtcgagtggccccacctcagggtaagacggataggggtgagggttgtcgtggtgatcacctcttgatcctggacctcgtcccattgggagaaccaggacagaattagaaggtggttttttaacaagctcacacacttctacctgcctcaccagcactgagcatgcccctccccgagtgccatcacctgcagaagcagccccatcacccgcctggttacgcagccacctcctagcccccttgcccttctcccacatttagtccctccagatggacctactggtagcgctcaaaactatcctcttttcctccacctttctagtccaacccaccctcatctcttacctggatgaccccctcgccttgccttccttgctggcttccctgctttcaccctggccacttccacctggcagagagtagatcacttttcactgatgcctgcccccttcactccttcccactgctcaggataaaacccacattctaaactcccaggtggtccagaaccctgcccccagcctcctaaaccccatctgaccccatccttccactcaatctccaatccagacacactggctctctttcaggtcctcatatgtgttatgccacagggcctttgaatgtactgcttctaccaccaggaacacccttcctccatctctcccccaaccttttacctactgaactcccagttatttcagcaagtagcttaagcaacaaataagccatccccgactcccagactaggtcagatgcccccataatcatgaagtttatcacaaaaagcaattatgtaacttgcagcataaaggaagagttgagggtggggccttgaaggcaggctgcctgggttcaaatccaggttctccctcgagcaagtgccttaactttactctgcacttaaccactctgcacttgagtttactcatcagtaaggtgaggataattacagtgcccacgtcatcggcactatgaggatgaaataggccaatagtcatagaagaacctaggatgttgccaggcatgtggtatggagtctgtcgatttcagttattatcaaggttcattcctgagagtgacactttgactaaagttagcaaaggaggagtaagtgatggggattgagggaggactccagccccacaatacagtgcattgggccccccgtctcagcctctcagggaaccagctggaagatgaaggctgtcggctgatggcagaggctgcatcccagctgcacatcgccaggaagctggagtgagttgtccaccccaccgctgggtaccagggaaggccctgtagagccccaggaggtccccgtgttcgtaatcagcagtaagggtgctgatccactgccacccctgcttcctcccaactccagcaaagtcaagatggtttgaccatgccttgccttcacctccggcatgagccactgtcttagtccaatcatctagcacccttacatgtgtaaaatgcgttcattatacatcagtggcttgcattccaattcatctttgtagctgccctggagcacggtggggtggggtgttgcactggggaggtgtcagggtgggtgggatgttgcactgtggaggtgtcatgctggggtgctagggtagggagtggtgtgttcctgtggggatacactgttggggtgaggggtggtgagatggaaaggtaggctattaggctgctgggtgtgctgtggtgttgcatggggtgagggtgatgtttgggtgggggtgtcttgggggtcttaggatcaagtgtgggtcgggtttggggagtgttgagattgggtagcagtggtttggggcctcagctttggatttcaatcttcgctctgtcacttagtagcattgtgaacctgggaaagtaattgaatgtctctgggcctcggtttcccctctgtaaaatgggatcacatgaaaccatatatgtacaaagccttttgtacagagtctggtatagtcagggctcagaaaatggtggttattttacagatgagaaaactgggggtcagagaggtgaaaacactgagttcttgctgtcaagctggacaactttattttccaaatgggatgggggtgtcatgcattttttggcttactcacacgcaccagaatcctttgagatcccctggcaagggacctaggacatccaggagtgacagccagcaagctgctgagccacagggaggggctagagctggctggggctgggtacctcagccacatgccaacggctgccttctcctgctctccacagcctcagtaacaacgggctttctgtggccggggtgcattgtgtgctgagggccgtgagtgcgtgctggaccctggcagagctgcacatcaggtgggagctccctcagaccacggtacccatccccccccccatcatgctctctctgaagcccttggaattccttctgggcccaggccttgggacgggcagaagatgctgctgctgtcccacccagaccccgttacagccggcacccctcttcctagctgctgtggatataggctgctcatggtttatacctctggagaactacccttggctgataagaaccagagacgcctggcagggtacaacccccactttcccctaacctagagtggccaatgacagaggcagagggcacaactctccagcccaaactctccagtgggacaaagctccctgggagactaggccaaggacttgctccgtttggcttccctcagtcccttactgtttctcctgagagcagaccgtcagttcatgatgtgcgcaactgacaagtgacatgcgaccccctaccccactcacagacccaggctctgccactagggaacccaatcctatttctgtaagtctcgccgttgagtatggggaggtgaggacagatgatgattaatgtcaactcagttcccactcggaggaaagcctcattctcaacccagtagggtggtccctgctttaaacacccctcaagggaggagagggaaaccgattcacccaaaaggtagattaggggaccttggttcactgtatatgatgattcaataaagggtccctagtgcattccaagcgatgccctgttcacttccaggaacttatactaaataaattatcacgattgtgcaaacacatttagctgtagggatgttcacctcagtattggttataataggaaaaaaaaagaaaatagctggaatgtttaaccgagggatattagttagactaagttacttccagagagaactcagtggaaccatagaaaaaaaaatgataatataggtgcagtttcaatatggaggggtgacggggagttattaagtaaacataaagaaatttctttagagacaggatcttgctctgttaccaaggctggagtacagtgacacaatcacagctcactgtaacctccaaatcctgggctcagcaatccatctctcttagtctcccaaagtgctgggattacagtcatgagtcactatgcctggcaattttttttatttttagtagagagagggtcttgctatattgaccaggctgttctcaaactcccgagctcatgtgatcctcctgccctggcctcccaaagagcaaggattataggtatgaaccactgcaccaggccaaacataaaaattttaactcattatcttaaaagattataaaagattataataaagcttttcaagatatgcaatggcagaaagaatggtataatctgggccaggtgctgtggctcatgctgtaaacccagcactttgggaggctgaggcagggggatcacctgaggtcaggagttcaagaccagcctggccaataggatgaaaccccgtctctactaaaaatacaaaaactagctgggcatggtggcgtgcacctgtaattccagctactcaggaggctgaggcaggagaatcgctggaacctgggaggcggaggttgcagtgagccgagatcatgccactgcactccagcctgggagacagagcaagactctgtctcaaattaaaaaaaaaaaaaaaaaaagagagagcatggtatatataatctgttcccatcaataatgatcaagtattaataattatttgtcatccctgcttctagcccttaaaaaactaatgtttaaaaagagaatctatagtttaatcccatgtttgtaaaacaaaaattattgcactagaaaatggaaggtttgaaggactcactccaaaggttaccaggggtaatccacacatactttgagcacagacagaacactgactagcagagagaggggtttcagtctggggctaaaagagagaacacagaatttgttttcttttaagacttgccaggaaatggggcttacttaggcaatagatacatttgtgaaatatctgtggtagaaagatttcagccctccaaaagctcagaggaagtcagaggggagtcagaggaagtggctgcagctggaggcagggggatggaacttgagaggtcctcccgggccaggggtaaaaagtgacaggccgggcacggtggctcacacctatcatcccagcactttgggaagcaaaggtgggaggatcacctgagcccagaagttcgagaccagagtagacaacatagactgtctctacatacttttttttttaattagctgggcctgatggcacaagcctgtaatcccagctactcaggaggctgaagtgggaggattgcttgagcccaggaggtggaggcttcagtgagccatgattgcaccactgcacaccagcttgggcaacagactgagaccttctctcaaaaagaaatagtaacagggagccaataacctctcgcttcctcacccctcttttgtcttcacagcctgcagcacaaaactgtgatcttcatgtttgcccaggagccagaggagcagaaggggccccaggagaggtagggcccgatttcaccccaactccatgctcagtcagggacattcccctctctaccctccacagctgggcagtgccagtcagtcaactgccagggtgacctggacaaattcacggaagagcgggaagtgagcaggcttggcaaaggatgcagccccaaagggggagggtccaaatccagaccacctccgcctctcatggtgcctgaaaggagccccagtgtgtaggatatagacagcaggccagggcaggagttgggtagccagagggggattccgggagactagagccctccagcttaaacccaggggattgcctggcctgtagctctggtcctggtcggaacttctgtatccctttcacacaaggacccattagggtcctggattgccccagcctagcgcatgggtagagactcagctctttgctcccggagcccacccacaatctcttctgtagagtctggactactgaaggctcgattccagctggggctgacatctctgaagcacagatgaggaggaggatgagattaatgataatagcagtcaaggtcaattgagtacttgccatgtatgcaccaagcaccaaactaaggcagttcacatacagtctcccattgagaggctgtgatttgtccagggtcacacaaccaggaagtggagaagccaaattggcaccaaggtctgattgactctaggtggaggatagggctcgatggtggaaggccaggctgaggatggattctggagatggcggacatggcctttgctcagcctggccttggtgatgtccctccagggctgcatttcttgacagcctcatgctccagatgccctctgagctgcctctgagctcccgaaggatgaggtacagtgatggcctccagccctgtgtgtgattccagccccctcccttcccctgctcagagcctgctcccaaacctgtgcccaggccccacatgctccctgaaggacacctgacctgctgtgtccaggggtcatggcctggcttccctacctcctacctcccctgcccagcccaccccagacagggctcacaaggcagccccgtcaaccaccttcccaagcccaggagaccccactccccttagctccctgacccccagcagctgaggggttgtggagactctgaaaagaggtgaaggggagcactgggctccttctgtcatgatcctggtgcctgggcctgggggctcccatcagcactcttccccccttctctcttggtctttgtctgtcctaatctccctctgtccctctgcctgtttctctcatttcttccctctctcatcgtgtatttctgttttatcagtttatttaactgttatttcagtcttatctgtcttcctctgatctgctctctctctctgaggtctctgtgccttggtttccttccatctgtgtctctgcccaccctctgcctatatgtgacatcctgtgggtgtcgtgtgtgttggtccctctttgtccgtctgtctaggtgccagatacatcccagtccctcctctcctgcaagcctcattctctgcctctgtgtctggggggtgggaaagcggctccttcccgcctctgttcagtggggcatgcagcactgtgtttttgtccctgggcaggctgacacattgtggcctccaagaaaagcacctagagcagctctgcaaggctctgggaggaagctgccacctcggtcacctccacctcgagtgagtggtttgtgtgttggaaggtgggtgggtggggccaattacagtgagttagtgttggtgtttgggtttggtttttaagatttagatcaactgttctttccctgctgaagtcagaaaccccttggagaatctggtgaaagttgtgactcttcctcccaagatacagatcccccatgtctgacacgctcggaggctcacccctggtccctcagaggtccacgaacctcagaataagaacctgggggagaccccagctgcccgtgccagatctgctgagatctggcctggcagcccagggctgtgtccagtttcaggaagttgagtaactggaatgcagggaccatgctgccagcaacccactccccacctgctaatgttctcccctcccttctccccacccccagcttctcaggcaatgctctgggggatgaaggtgcagcccggctggctcagctgctcccagggctgggagctctgcagtccttgaagtgagtagcccgctaggcagagcctctgaggctggggcagggggggagcattctctgtcccatccccctctttcctggggttattgtaaagattaaatcggaaaatgcatgaaaattgcccctaatacaatgtaagttctcggtgaaggctagctaatagatgattcttactcagagagtctgtgactcaataatcccacttctgattcaaggtttcacttctggaacctgtctccgcatctctgaacaggcttctgaggccaccctggggagggcaggtgtgggtgcgaagtatgactaacggctggcagttgttattctggccctggggtgccgggaggggctggggctgttagctggggtatggtcagggtagacagggagggtttgtaccagagaggacactcaagcagggtgcccagggctgccaaggatccctgagtacctggcagagagtgtgtaggaggaatccccaaagtttgcctgcaatggaccagagttcttgatccctaaatgcccttggtgcttttggctcacaaagcaccccctcctcccaggcacttctgggccaaagccagaggagcccaggggagaggtcacaggtcctatattccaggctgtctctgtgaacacgctttgctgtgtgattctgggcaagttacatcccctctccgagtccctggttcccagtcggtaaatacataaattgcaggcgtggcctctgttggtggctacgatctctgaaatgagtgctggggcctaaggaccccctgctcacaccctgtttttgtgcaatgctgggaaggaagggagttgccttggttcctgttcagggcctgcacctgggaaggaaggaaggtctaaccattgcaggcaaattacatgaagactggaggttttagtatgtcctcatgtgaccttcttattagtgtggactcgtgacctggtgctgtgagggtccacactcgccctaccagtgtccccgtgggaggggagtgtagcattaaatagtaaatagaaaacaataacaagttgacaggagaccctgaaagaaaggagacactttgttcctgctttctgcacaagagaccctgcattttcattttgtcctgggtaccacccctcccttatcaggtggagaaaaggaggcccagctccagccagaaagcactcctcagatccatcacagaccgagggacccactgggtgcccatctcagctctgtcaccaacatgtctcataaccttgggctagaccttgattctctctaggactctgtttccccatctccaccatgaggacttgcaaggggtgctctctgaccatcttgggttcagtgggttccgtcatctggaaccagggatccctcccccgccctgtgccctgaccacaaagaggatgtgtttgggtcctgagtgacctccattgtgccacccctgtgatctccagcctcagtgagaacggtttgtccctggatgccgtgttgggtttggttcggtgcttctccactctgcagtggctcttccgcttggacatcaggtgagcgtgcctctccgcccccagccctgcccctgtcccccatcccacaggtcatctgctcccacgtgggccccttgtccaccagtttcatgccaacctgtcatcctcagcaccttgggcagtaccagatctgcagagcatgtgatgggcgtccactgaatgaatgaatgatcaaatgaatgaataagtatggcctcacggatgctcaaatttctccaaattcaccattagagagttcattgactctgcctcactcgttctttggatagtccttagagatttttttttttaggattttttttttaattattatactttaagttctagggtacatgtgcacaacatacaggtttgttacatatgtatacatgtgccatgttggtatgctgcagagacttttaagaaaactgggggccaggcgcggtggctcacgcctgtaatcccagcattttgggaggccaaggtgggcggatcacgtgaggtcaggagtttgagaacagcctggccaacagggtgaaaccctgtctctgctaaaaataccaaaaaaaaaaaaaaaagtatctgggcgtggttgtgagcccttgtagtgccagccgctcaggagtcaggagaatcacttgaacccaggaggcgaaggttgcagtgagctgagatcgtgccactgcactccagcctgggcgacagagtgagactccatctcaaaaaaaaaaagaaaagaaaagaaaactgggagcttcctagttgccactggggactcagggacctgtcttaattgtgggagctgatgagaatataaaaggggaggcaccagccagccaagccaccccaggcactcagggcaccgcatccatgattttcaggggaggtctgcttccctttcccttccctaaggacccccaagaatgggaggtgccacagcagatggaccaggctcagttacttaactgctgcgagctcagagcaggtcccagagcctctccaggcctcagtttcctcatctgtaaaatggagataagaataattactggcctggcacagtggctcaagcctgtaatcccagcactttgggaggccaagacaggaggaggaggatcacctgagcctaggagtttgagaccagcctggacaacatggtgagacccccccatctctacagaaactttaaaaattagccaagcgtgatggcatgcacctacttgggaggctgaggtgggaggattgcttagactcaggagatcgaggctacagtgagttgtgatcacaccattgcactccagcctgggcaacagagcaagactctgtctcaaagaaaaaaaaatgtcaggcacaatggctcacatctgtaattccagcactttgggaggctaaggcaggaggatcgtttgagccatggagtttgagaccagcctgctcaacatggcaaaaccccatctctacaaaaaatacaaaaattagacagtcatggtggggcgttcctgtagtcccagctacttgggaggctgaggcagtaggatcagttgagcccggggaaggttgaggctgcagtgagccatgactgcaccactgcacaccagcctgggcgacagagcaagaccctttcttcgaaacaacaacaaagaagaatttcttacctcattgtttattgtgagaatcaaatgagaaatgtcgatggtgtgctttgcatgtgacttgatacatgtaattgttgcttaatctattccttgtttgctaagaaagcaggccaccccaggccctccttgccctgaccagtctgggttcttgccactgccagggaagttggtctttgaccattttcaaactgctgcttcctctctgcttccagctttgaaagccaacacatcctcctgagaggggacaagacaagcaggtgaggagggaacgctcggggtgggggagtcccctcccgctctggtccccgtctgttggaggtccccccacccccagacccatgctgaccactcagctctcagttaaaccacccaagtccggcacactaggtttaatcaccacttcagtaaccaccgccccccccataaattgtcagtaatcaactgccctgttttccccttggaaggaggcaatgcagatgggaggaagggagggatatggttgggagaggtcccagagcagggcaggtgcccgcagattgctgctgtgtgggaggagacaggagaacatttgtgcttctgcgtttcggggaattttgtagacccaccgctccatacatgtcactgccctttcacgctctgaaggcaggggccgtgggtgctctgaaaaaacattttccccgtcttcgcagtaaacaaccaatactagtttagctcttcatgatgttcccggctgccctctagtgggaccaggcctcttggcctcacttgggagcagtggcagcggacagggtgggcccatgtgcagctggctgggtggagagagtcacagctagtgtgtcaagaaaaggcactgccgtacagatgggctgtcaggagtcaggggtggctcaagcctgggtggtcttgcttcccaggataggatctctgtttctggggaacccccgggttcttgaggcccaaagaactgacgtacagggaggcagaagtcatgtgatgccaagcagtggtcagagaggctctgtcttgggtcctcctgcctgctcacctggacaggaacaagctgctggcttttctaactcaggcttcccttccctgagcctcagtttccccatctgaacaatgagggactgagctaggatctagtgactgcattgtctctgagatgccttccagccctgactttccaagtctgggagtccaatgtgggtgatctgaactttcctttctaaacgatccccctcctaggggtatatgggctgggctgggagtccgagggggtgatctgaactttcctttctaaatgatccccctcctagggatatgtgggccactggatctttgccagacttcccagctgcagccaagttcttagggttccgtcagcgctgcatccccaggagcctctggtactgtcccagcccttcttgtttgggggtaaccataatagggatgaggcgtcagagggggcagagctggcagggggctagggctggggattgggatagagggaagagagggagtttaagagaaaaggaaaagaaagaggcgtgggtgtgaggggtgctgggagttggggagctctggcccctgacgggcagctcagctggcccatgccccgcattctccttggagagaagattccacatttctgtgaagcaaacagagcagctcagccactccctgcctggggtctccatctgctctgggggacacccactttccagaaagaaaggggttggcctgtctccccactaatacactccccatctgcaagctctgccatgagaggctgtgagaccctgacttggccccacctctctctaggcctccagggaagtggaggcaagtgaggccctgggaaggacatttcaatttcactgttagccccagggcaatggggagccacgggggtaacagggagaggcctggtcagatgtgcagtgttaaaatgtgagacacttgtggggcagagagggattaaagggaggcaagagtggaagcccagagggtgttaaatggtcaaggtgagtgaggatggtggcctgggctctggagggggcggtggggaggacttggagagtcactgacaagggcagctgggaactcagggtcctgcactgtcactgtcagggcaggaggattgggggctgcaggggagactcgagagggaagcgagtgccccacaggggaaggggcctgtggcctcccacttagagtgagggatgctgggagaaggatagagcccctggggctagccagggaccctgggctttctctgattccctgccctgcccattgcccctttgcagcctcagtgagtgtcctctggagcccccaagcctcacccgcctctgtgccactctgaaggactgcccgggacccctggaactgcagtaagtaacgaggacacagccccagagggcaccatgtggggatctgcccagtgacctgggagggggcttcttggttagaagacaggtgagtctttctcgatttcttcccaccagccctgccccatgagagtcccctggcctttggtagaaacttggctgtctctcggcagcccccagccttaggcagcgcatgtctcccactgggagatgctgtgctggactggggaagccttcacctgcaccatccactcaactcagggcacctgggagccctgtccacctccaaccccacccctggagcctcaccagggcacccacttgaacctgcctgcatggctggagcgtagcacttctgaaagcccttcctcaaggcacccccactctccttggggttaccacctcactcgccccagaacatctgggtctgtaaccagagactggacctggaatcaggactcttggctcaaaagggatttaactccccgggcctcagcttcttcatctgcacagtggatggtcagcctttccttttattgtcattgtggtgattctattatagtaattaccttaaaataaagaaatccaagacaaaacctgcctcacctaaacaacctcttctctcatcaaatccatgttgtcatgtgtccacaggactgtctactccttgcctatttgcatattcagtttctacctgtttgcagtcataaactagtttcatgcactgtgttttcatagcatctgtgttttccattttgcttcagtcttttttcttgctttctagcccccatctcaaatgcccttccagcccttccaaccagataatccggtttgaccccctggagtgtggccttcccatgtccttctccaggttcaaacatataaccacaaaaccattatcagacctacactattttttttttctgagacagagttttgctcttgttgcccaggctggagtgcaatggcgtgatctcggcttgctgccacctctgcctcctgggttcaagcaattctcctgcctcagcctcctgagtagctgggattacaggcgcccgccatcatgcctggctaatttttgtatttttagtagaggcagggtttcaccatgttggccaggctggtctcgaactcctgacctcaagtgatccaccttcctcagcctcccaaagtgttgggattacaggcttgagccactgcacctggcccagacctaccctattaatggcaattccttaaagtcaaccaatggtcagtggtccctgattgtctcttacctgttttcacagagtatatactgatgccttttaatactaaattgccacagtacgggacgagctgcaagttactccaccacacccttctagagtctagatcaagggtgtccaatcttttggcttccctgggccacattggaagaagaaaaagaattgtcttgggccacacataaaatacactaacactagcgatagctgatgtgctaaaaaaaaaaaacaaaactccaaagaaaaatctcatagtgttttaagaaagtttacgaatttttgttaggccgtattcaaagccatcctaggctgcatgcagcaggccatgtggcttggacaacttggtctagattgaaatccaaactgcttctaggtgttgtgttttgttttgtgtagcactgcagtcagtgctacaaaaagcactcttacgtgatttgactgttaagtacctattgtataccatgcactgggccagatcctgggaacacaaggagactgggatgcgggctctgctggccaaggcaaatcatctgcagaggaagcttaatataaaaagcccactggcggcccggcacggtgactcacgcctataatcccagcactttgggaggccgaggtggctggatcatgaggtcaggagttcgagactagcctggccaacatagtgaaaccccatctctactaaaaatacaaaaattagccaggcatggtggtgcacccctgtaatcccagctactctggaggcaggcaggagacttgcttgaacccgggaggcagagattgtggtgagccaagactgcgccactgtcctccagcctgggcaacagagcaagactctgtctcaaataaataaataaataaataaataaataaataaataaagcccactggcagcactgggcggtctgagcacaggtgggagtttcaggtccccctccattacctgtggttggggaaagtgcaatagtgaatatgaaagcactttgtcaactgtagagtactgtgatcacttgcaggattattgctataaatagtcatcaaggtactcaatgctgaagtccagtgattccccggggttccaccggggaagccagggaagatagattgtggggctccatcccccctccctgaattcaagcactgcaggtctactttgcctgtgtacacatgggcataccatgtgggatgtggtaaagagtaaagattccattgctttaaaaaaaaaaaaaaggagggtgtaatcacctcctttgccaaccagagcccatggtgtatttgggggtctggtgggacaccatacgggatgtgtttctggaaagaccaccctcaataaaggccccagtcctgactgtgcctcaggggcccatgcccagtccctggggcagaaagggtagagttgggcctccagcctgggccctggcagaggctccaacatgaggctgctcctcccgccctaccctgccccccagctcactgagccagttgatgtagggcccctgtactccatgcctcccctccaaacagccagaggagaaagcagcagagatgggccaggcccttggaggccccggagaggggagagggcagcctgcagaggatgaaggaacagaaagagaggaagggggaggtggagaaggcagaaggagaacatagtagaggtctgcgggggttgggaagtggctccaggccccccaggaaggggctgtaggtaaaccccagggaactcagtgtcttgagttgtcctggtcctccatctagagcagagacagcaaggcaggtatctggagtttctcctaaatgcactgggttctgacgaattatctgaacaatgatgagctggttggtctggtgttaatgggcaactagagacccaagccagtccctgtctccttcgctgacctgttgtatgctgaatttccactgtcatatccactcctctgggttaaggcagcattgttttcttttcttttttatttttttgagatagagactcgctctgtcacccaggctggagtgcagtggtacgatcttggctcactgcaacctctgcctcccaggttcaagtgattcccatgcctcagcctcctgagtagctattactacaggtgtgcaccaccacgcctggctaatttttttttcgttttttgtagtagaggtggaatttcaccatgttgcccaggctggtcccagactcctgacctcagatgatccacccacctcagcctcccaaagtgctgcgattacaggcatgagccaccatgcccagctgcattcttttcttaacaaacatgttttgcggaacactaaccttcatggcccttaaaaattaattctgctagtccatttagtttggggaaaagtctgctgtagctccttggaaattcataatgcacagcagcctatcgcagcctcagagaagccctgcagcaaacaaaaccatttaatttggcttaaccccgtatttcccaaacttaaaagaccttcctcttcttccagcctcacggataacccatggacccagtgctgggagggaatgtttcaggtgaccctggttaggtcccatctccagaaggctctggctatgaggccgtgctccctgctttcctggaaggtttcccccacctcatccacctgctttgtttcacagattgtcctgtgagttcctgagtgaccagagcctggagactctactggactgcttacctcaactccctcagctgagcctgctgcagtaagacgagagtttttcctatttcccggttccttgtgctcgtgtttctaaggctcctccatggcaaagctgtacctgccctctaacccctcaaccccccgcctttaccccctccaaccccctctacccgctccattctttccttaggttgttttatcattttacctggcacaactggggactccaatctgcttccagctccaccctaatactttgtcaacctcagggggcgtcgtttgcctcctctgcgtctcagtttcctcatctgacaaatgggattaatattccccgcccattcccccagagttgggactcaaataagttattctaaaatcaccttaagaaatggaagatctgtgacaaatgagctgtccaacttctccccacccacggagggtcacccactcgtagaaaggggctgtacagatgtaggtcctgtacttatcacatgctgctttttaaaggtcaccgtcaaactcgcaaaaagggaatttaagcagaattcccccaaagtattaaaactattttctaatttcagctcagactggttagaattttaaaagtatttaggccatgtgtggtggctcatgcctgtaatcccggcactttgggaggccgaggcgggcagatcacctgaggtcaggagtttgagaccagcctggccaatgtggtgaaaccccgtctctactaaaaatacaaaaattagcccggtgtggtggtgggtgcctgtaattccagctacttgggaggctgaggcaggagaattgcttgaacttgggaggcggaggttgcagtgagccgagatcgcgccattgcactccagcttgggcgacaagagtgaaactccatctcagaaaaaaaaaaagaaaaaaagaaaaagaaagaattttagaaggatttactttaaacagtcttctagtggtgggaggcggggtgggaagcagctgcagctaagatgaaaaaatacagcaggaaagtaaatcataatgttaataacatcggtgcaaaggctggggctctctgggatgtctaagatggctcgcatcacctccaggatctcgcttatgcttgggttttatctgggagggagggaggagacgtgacaacattccaggggcaagtacagcccagctcacagcaccccatggcaccctgtaatagtcccaccctgcccggagataatgagtcagaaaggactcctttggacataaaaggtggcaggttaaaattgaacaggttggaaacctcagaccggagaggaacttctctttgcctaaatcacacagcttcacccctgactcctcgtccgcctttggagtggcgtggccagcctgaccccttgccagggtttaaactttgtagtactcaacgtgtagtgcttgtggccctactgtgggccaggcattgtgtgacgacacagcagaaaaagttgaccatgtccttatcttcttggagctcctcttacaatagtgggagctgaaaaataagtaaagtaaaatcaaataagatgaacttagccagtgataagagaattttctcgggatgtggtgaagagtggctggagaggtgatttagatgtggcagaagccatcagggaacatctctgaggagggatgctgagctgggacctaaaggaagagagagagctcgccttgtgaagagcagggaactgcattccaggcagagggaacggcatgtgtgaggccctgaggcatgattaagcttggtgggctccaggaacagcgcggaaccgagacagccagagcacagtgactggcagggacagtcctaggagaggaggaagagagagatgggctcgggttgggttgcatggggcctggcacccatggggagagtttagacttttgttcctgggaacatgaaagggagaggaataatttgggttttctttctttcttttttgtgggggagggtctcgctctgtcacacaggctggagtgcaatggcgcaatctcggctcactgcaacctccgcctcccaggttcaggcaattcttgtgcctcagcctcccaagtagctgggattacaggcgtgcaccatcatgcccagctaatttttgtatttttagtagagacagagtttaaccatgttgaccatgctggtctcaaactcccgacctcaagtgatccgcccgcctcggcttcccaaagtactgagattacaggcaggagccactgcacccgttcctcatttgggttttcaaaagttcagactgagtgctgggtagagaatggattgggagatacgagtggaaatgagagtgggaagagatgtgtgcagcagggtgaagggtgctgggggctgatcactgctggggtgggatagaagttggtagactcagggtggatcttgagagtggaatttacagacaagctgatagggggattactggatgaggcaaatggaggtgctgaggctgcctctgagggcagagtggacccatctcactttctctaaggcagtggtttccaactgggggtgattttcacccttgggagtcatttggaaatatctggagatatttttggtggtcatgactgcgggtgaggggtgctgctactggcatcgaatgaatagagatctgggatgctgctgaacatcctatagggcacaggagagcccacaacaaagaattattggacctcacatctcaatagtgctaaggtttaaaaactgtgtctgaagggcctgaagcttcccactctctgtgagcaaggactcgcctgtgaaatctgtgcttgcaggtaaaaacaatagtaataataacagcaagcacaggtcccatgcccggcagtgcacctgcatgatgtaattaaatcctcatatacctcgagagtcatacatgacgagtcttgatttccagataaggaaactgaagctcagagaggtgaagtcacttctccaaggtcacacagccaataagcagaactgggactcaaatccaaatctgcctgtccctcagccctatttgtgcctcttgatcccctgcctgcttccctattgccttgctgagctgctagccctccccaccctccctttccttaccctccaggctagccaggttccttgtccactcatcttgccggatctaccccctttccttttcaggctgagccagacgggactgtccccgaaaagccccttcctgctggccaacaccttaagcctgtgtccacgggttaaaaaggtggatctcaggtgggcattcccctgggacagccaggactcgtcctgaagggttgtgcctggagtctggtgggtatgagggggtaggatgaagacagtaggacccaactagaggctgggcttccggaggaggggtgctggccccgtgggggcatcctgaggctgtggccacagctgtctgacccaggtcctgtctgatccaggtccctgcaccatgcaactttgcacttcagatccaacgaggaggaggaaggcgtgtgctgtgggtaagcccccttgaaccatgcctaggcagctagttgatgttggggaccagtagatctgcctcctgggtggccagagcagtatgcagactgcctaccacaaaacattcccctggaacaaccctgcagagggacttgtttcacccagcatgaagaaacacaggtccgggtgggatctactgtgggggtgggagcagtggattctggacacttccagagggtccaagcttgagtggagacccacctggagcccagaggctgtgccctgggctagccaggccggagggggtctcagtggccaaacgccccatcccctgcttgtcccctttacctccgtccagcaggttcacaggctgcagcctcagccaggagcacgtagagtcactctgctggttgctgagcaagtgtaaagacctcagccaggtggagtaagttgagggaggaggaggaaggagaggagcatggacgcatgcctgaggggcactgaagggggtatgagggtccgtgtgtgcacatacactcatgtgtgcctgcctacacctctcaggaccagctgtcagggatgcctgggtcacatacccaaagcttccctgaatcaattttctctctcccgcccccactctcgccatggtggagctagttccatggtgtgccctctgacttgggcagccctcagcctcaagtatgtgcaagctctgctggcagatgggggctaaaacgcaggattcattgttggcccagcaggtggttaaaagtaccggatgactctgcctgaggagggacgcagagccagccagggtggggtcttgcagtctcttgtattgttgagatgtggtatctgcgtggcctgtcttggatattcaaatagtcagcccctgcatgggtggaataataatagctaacagctactgagcactttctccactgttctaagtgcttgacatgttctttttatgtttcccatatccctggatactagtattgttctcattttacagatgagggaactgagacacagagggtgtaagaacttgcccaaggtcacacagctagtaaaatgcagagtccctgctcagacgcattgggaatccagcctaggaccagtgggaaatagagagagcagtccgccaaaaatgccacacaattttcatttctgttgtgatgtggcagagaagaaaaatgtgactgataaaatcatggatttcttttttttttaagacctggggtctcactctgttgcccaggctggagtgcagtggtgcaatgataggtcactgcagcctccaactcctgggctcaagcgatcctcccacctcagcctctggagtagctgggactacaggcacacaccaacatgcctggctaatagtttagttttgtaagagatgaagtctcaccatgttccccaggttggtctcaaacttctgagctcaggtgatcctcagcctcccaggttgctgagattacaggcatgagccgctgtgcttggaatgtattttaaacagatatgaataagaaatatgtctttgagttttttgtttttcattatagagggaaatttttcttttctttctttctttttttttagatggagtctttctctgctgcccaggctggaatgcagtggcgcaatttcggctcactgcaacttccgcctcccaggttcaagcaattctcctgcctcagcctcccaaggagctgagattacaggcatgagccaccatgcctggctaattttggtatttttagtagagacggggtttcaccatgttggccaggctggtcttgaactcctgacctcaggcgatccgcctgcctcgccctcccaaagtgctgggattacagccttgagccaccgcacccagccaatttttcttattttaaagactattttattaagtggcttcataagacagaccaatttttaaatgacgtttctcaggaaaagatgaaattaacaaacatcaaaaatgtcacagacctaggaggaaaatcagatgttccgggacacactggttatattatttctgaaactgtagttaaaactagctgggcgtggtggctcacgcctgtaatcccagcactttgggaggccaaagcgggtggatcacctgaggtcaggagtttgagaccagcctgatcaacatggtgaaaacccgtctctactaaaaatacaaaaataattagccaggcatagtggcacatgcctgtaatcccagctacttgggaggctgaggcaggagaatctcttgaacctgggagacagaggtcgcagtgagccaagatcgtgccattgcactccagcctgggcaacagagcaagactccatctcaaaataaataaataaataaaaccacagaatgctgcaatgaagggaagtaagaaacttcaggtgaggtttccaatattgatattgcattcccagattaaaagaagaaatctatgggtttaatgcatcctgcaaacatttttttttcctgaatttcctctcattcaaaaactgtggatcccaaatgatgccggccaagggcgtggtgaaggcaaattggtttttctttaacccttgaaagcctgctggaggcacctgagctatgagtggtcacccgatatggaagaggaccaagaggatgggtttactgtggtgctggggaggggatagtagcagagaacgtaggagttgctggtcattctagtggtgatggaagggatggtgatggtggtactgggcttggtggtgtagaattgtggtgataatgaaagtggtggtggtgatggtggtaatactggtggtggtgacattggtggtggtggtgatggtggtgatactggtgatggtggtgatggtggtggcgctggtgaccctgacatggggtccagtagcagtgacagtggatgcaggctcctggtgactgaggagcatctcaggctgaggaggcacctctgatccccgccactgctccttaccccctacagtctctcagcaaacctgctgggcgacagcggactcagatgccttctggaatgtctgccgcaggtgcccatctccggtttgcttgagtaagtggaaagcagcataaaggacagatagcaaggaggaaggctcccctaggccaaaagcatgatgggggctccttctgagggcatcccccagagcaccagaggacaaggactgtggagggcaaggggcaattcttcccttgccttcactcccctggccttgggtcctttcctctgtccctcacacccaccatgggcagatcctccaccaaacacccaagagaggctgtgattcgtggcagggtgacacacccctacagccaaactgacctggggacagggaagcaacattccatccccaaccagctgatgcgggattgcagctgcctggctcctggtccatcccgtccctgaaattcttctgacccaatctgtggaacataaatgtggagatgtccctgtggcaggcaaggggccttaggaagtcatccacatggttgccccatctctcccgtgacctgctggagtgacagccagctccaggacaccacttgttgctaggcaactgagcttcgtgctcgggagtccttgacccatgcggggctagagctgccagcctggccttgccagtgcccagaccccagaccacaggggcagcgggcagggtgagtgcagcgctcaaggactcagggtctggtgccagttctgcctgtgtggggatggtatccttctgggcctcagtgtgtccatctggagaatagatgcttagacatggaggcttctcttcttggaaatgacagctggaagggagatggagggggctgggcagggctccaaggaggtcctgccctcactcccattctcatctccatttcccttctagtctgagtcacaacagcatttctcaggaaagtgccctgtacctgctggagacactgccctcctgcccacgtgtccgggaggcctcagtgaagtaaggggatgttggtccccgaaaagcccctttctgctggccaacaggtgcccctggctgatgatgggagaagcaaggcacccacactttgtggccttccatctgggtggcttggagcaacctctgcctttctctgaatctcagggtttcctgggcatgggatcataatttctatcccctgatgcccgggtgccatggggaccatggaggccatggggtgggaaggccaggtattgccatgctcacagaatgagtttgggggtctcctctggttctgaggcctccatcctcccttgtccttgtgggtgcagccccgcttccctctctgtgccctgtgggtgccctaggtgcctaggaagctggcatgtctgggcaccgtgcttccccaggcccttctctctgcagcctgggctctgagcagagcttccggattcacttctccagagaggaccaggctgggaagacactcaggtaatccctgcagggtgatgggacaggggacagagaggggagaggaggctgaccctatggcggcctccatggccccctcttccctgggccctctcctcctttagagagcagcttcaagctcactgcctgggtctgttcctccagatctgcccccgatgccctggtaactccagtctcagccagggccttggcattgaacttgtgcctcttagcccaccatcctaagcccaactcagcccaacattctcttccttgccatgtcctgactacaggccttgaggcttctgagtgtcacggttaaagattttgaagccaactgaaaataaatccctgatctgccacttaccagctatgtggccctggacaagtaaaatggggataataacacaacctaccccttagggttattgtgaggattaaatgagttaataagtataaagtgccaggaaaaggtctggctcatgggagtgctgtcagcagttattgtaactgttattattattattattattattattattattatcattatcattacccctggtagccctgactcactgccacggccagttcctttacatgtcttacttcagctgtgaacagggcctccaaactgatccctgcatcttatcaggcctcctcccctccattcactccacagcccccagagggatcttcacaacacacatctgacagtgcccctctgctactctgtgcccctcagtggctccccattaaccccagggtgaagttcaaagtccctagcatcttctccctcacagtctgatccaactgtcaccttccaccatgttccttcccacctcccccacaccacacacacgccctacacaccaacccatataccacagatacaccaagcacacccaaacacaccacacagcacgcagcacacacaacacacgcacaccacacagcacacacaacacacaaacgcaccacataccatacacataccacatacacacacatacaccacacacaccacacaatacacacaccccacaaaaacaaaccccccacatacatacctggcacattacaaatacagcacacacaccacataatacctacaaataccacatacacaacacacacacacacacacagttcagccataaccttcactatttgctcctagatcaagccctgcctgaagattctctgcctctgctcacaccgcactcagctcaacattctcttccttgccttttctgagataaaattctcccaatcctttaacacccagctcaaacatcagcccctcctggaagtatcccagcagccctgcctcatcagagtgaactgccccgaggttcactgggccctttcacttggctgggcccgtctgctggccacccagggctgagatgcctggacagcagagccccacggagaatcccaggcacacctccctccccagggagctcagccagtgctggtccgggagagtaaggcagtggttaagagcttggggtctgcagtcagactgacctggatggaaaccagattctgcccttctttcttatctgctgtgtgtccttgggttagtcagtttccccacctctaattggtgctatgagaattaaaggagaccctgcgggtaaggcaggaagtcccatgcacccagaggctggcacagtgcctgacctagagtcagcctccctaaataacttactcctaatactttcttacagggggtgtgggaggttcctccccaaagagacaggaagctcccagagcaggagctgcatatttggcctctcaggccctgctccaggcctttgccctcagaggtgggatgctcccccaataggccctcagggaggctgagatgaagctgagcagcagtgcccacaggcctcacccaggctctgccctggctttctgccctcaggctaagtgagtgcagcttccggccagagcacgtgtccaggctggccaccggcttgagcaagtccctgcagctgacggagctcacgtgagtgacccacccagcccgtgaggacagcagaggggtgggggcaccctgccagagccacctcagtgactgacctctgtctccaggctgacccagtgctgcctgggccagaagcagctggccatcctcctgagcttggtggggcgacccgcagggctgttcagcctcaggtacctcctcccccgctgcctccgggaggggccatggcatgaatgggagcaggggtgggcactggagtaagaggcccccaggatcatggccccagtcatttcctgtacccacaaccctgccatctggaccctgagcaaaccctgtccatctgtcccagagactccacaaggcacacagagaaactgtccttccccacactggaggcctgtgctttgggatttaagaaaaaaagaaagaaagaaagaaagaaggtttcagaggatactgaactgaggacaaaaataaactgaaacgaagttcttgtctgtctgttcactatgatcattttaaaacactcagaaaaagaagataccgaagtagaaagaataattttttaaaactcctattcccagaacctaggtttgacagttgttcatactttttttatatttgcttctatttttatttttatttcagctgaagcggtttcaagtaagttatagacctcataatccatcactcctaaatatttcaccgtgaagctccaaaaaataaggacatttttttcagtaatcacagttccatcaggacacctaagaaactcagttagcgattccttagtgtcgggtactacctagtctaatctaaaatgtccccattgtcccccagataagacagctggcttttgggatccaggatctgtcacatctggtctgcatttgcacgggatggcgatggtcttctgactcttctaacctgcggcatcactgcccccatcccctcaccacagctttctgtttcatgtcagtgtctgttgacaaaatcagcaactgtgtgtactgcagactgtcctgctcctgactctggtggctttctcatgatgtcatggcacgtgttcctctaaccccgactttcctggaaactggacgttagatcaaaaggctccatgacattcagtttcatgtttgtgcccaaaaaacttacgtcaccgacagagctgtgcacttctcattgcagcctgtgacaaggcacctaagaactgactgttccccaaaataacctgtaaaaattattataaaatacacataacaaaatttgccatcttaatcatttctaagtgtaccattcaggagtgttaagtacatccacttttttgtacggccaatctccggaactcttttcctcttgcaaaactgaatctctatccccattaaacaacaccccatttcccccctaccccagcccctggcaaccaccattctgctttctgtctctatgaattggactgctctaaatagtttatatgagtggagtcatttgtatttgtctgtatttgtctttttgtgactggctcatttcattgggcataatgtcctctggttcattcatgttgcagcgtgtgtcactgtgtcagactttccttcctttttttttttttttttttttttgagacagagtctcactcttgtcacctgggctggagtgcactggctcgatctcagctcactgcaccctccacctcttgggttcaagcgattctcctgcctcagcctccggagtagctgggattacaggcgcccgccaccacacccagctaatttttttttgtatttttgtagagacagggtttcaccatgttggcgaggctggtctcgaactcctgacctcagatgatctgcccgtttcggccttccaaagtgctgggattacaggcatgagccaccacacccagccctttccttttttaaggctgcataatattccattgtgtggatggaccacattttgtgtatccacttatccatcaattgacacttgggttgtccattcaagtgcccaattgacagtccctgctttctttttttaaatattattttatttcaaaaacaatagagatgaggtctcactgttttgcccaggatgatcttgatctcctgagctcaagtgatcctcccacctcagcctcccaaagtgctaggcgtgagccaccatgcccagccagaaagtcccagctttcaattattttggttatatatccagaattgctagagcacccaaaataactttttttttttgagacggagtctcgctctgttgcccaggttggagtgcagtggtgcgatctcggctcactgcaagctccgcctcctgggttcacgccattctcctgcctcagcctccagagtagctgggactacaggtgcccgccaccacgcctgactaatgttttgtatttttagtagagacggggtttcaccatgttagccaggatggtctcgatctcctgacctcgtgatccccccacctcagcctcccaaagtgctgggattacaggtgtgagccactgcacccagccaaaataacattttcaaataaaacttttcttagtctaaaaataatattggttgggggaagtggcacacgcctgtaatcccaacactttgggaggctgaggtgggcagattgtttgagctcaggcgttcaagaccagcctggacaacatggcaaaaccccatatctacaaaaaataaaaataaaaaaataatatttaatcattgttgaaatgtgcagaaaatccagaaatacataaagaaaatagtgctttaaaaattcagcataactttaaagcagtaatatttgacttaattctcttttttcctactttcaaattaatgcacatgcattgtagaaagtttagaaaatatagaaaattaaagaagacataaaataaaaatcactcatgagaattctatcatcttaaacaaccaccatgaacatttaatatattttcctatgttttccacacatctctctccctgtttctttccacactttttttctccaaatactttcctttttttgaaatgcaaaattgggatcatgttttatatacagtttggtttccttacctttgtgatgtaacattatgtgaatcttttcttaaatctaaaaatatcagtggcccagtgcagtggctcacgcctgtaatcccagcactttgggaggccgaggcaggtggatcacttgaggtcaggagttcaagaccagcctgaccaacatggtgaaaccccatctctactaaaaatacaaaaattagccaggcgtggtggcgcatgcctgtaatcccagctacttgggaggctgaggcaggagaatcgcttgaacccaggaggcagaggttgcagtgatctgagatcatgccattgcactccagtctgggcaacaagagcaaaactctgtctcaaaaataaaataagataagataaaaaaataaaatataaaaatatcatttaaaaaataatattttctgtttggattgtcacaacaatagttgttggaataagggtgatgttaatttccttttttagattgatgcctacttgtataattttatagttttaaaatgagcaaaaaaaactcaaaaagcctctaggtcccccccttgacactcctcccccggccccgtcatgtgtgctgattgtctgctgctcaccttgggggggccttatctgtgtccccttctgtgacagggtgcaggagccgtgggcggacagagccagggttctctccctgttagaagtctgcgcccaggcctcaggcagtgtcactgaaatcaggtgagtccagagaagaggcccctttggaattcttcatctttcataagcattgggacttttccttgaccttccctcatcctgtggggtaatagctgtgtcaccagctagttttccatgtccccagggtagcaggagctcctggggcatatgtgaggggctacacatttgttgggactagtgcagtagtcaagccacagtgtcagaggaagacatccccagaatcaaaacaaagggctattggatccaggcagacatggctgggagtccacgctggttgcttggaagtggccccccagatgcagtaacacacattatggctcttcaaccagaaataacacaatgacacacagagtagcttatagcaaaggttttagcatcccactcagctatgttcagatcccaactcagtcacttactggttggagcccattactgtgtctctctgacctcaacctcctgctcttaaaagagtctaattacggccctttgcagggctgggaggattacaagaactggagcctgtaaagatgtctgctgtactgtcaccagccacacagcctgccctgcttcttccttctctcctccaggagtgagcaaggggatgctctggggactttataatctcccatagccctctccccataagcaccccatgaacataacattcaagtgaaggcagtgagcttagagcgcaaatgcagactccagacacatcccctaccccacccttccaccacactgtggtccttgtgcccctccctcagaaaattctggaactgcccttggatccctctaatggctttctgtcatggtctgaaaaggcttatcaacttattaactttaaattgttgaaaagggccaggcgcggtggctcacgcctgtaaccccagcactttgggaggccgaggcaggaggatcactgaagcccagagttcaaggctgcagtgagctatgatcgtgcccaccactgcacttcagcctgggctacagagcaagaccctgtctctttaaaaaaaaaaaaaaagaaagagaaaaattgttgaaaaggcactacttggggtattgtgtgtgactcacggaagcacctactttccagtcctaagctggtccctggcaggggagaaggggacccaggcaaagtgagagttcagagttggagccgggcagcccaggtgccagctaggccctccggggaaggctgcccgacctcacgttggttactgctcactcctcagcatctccgagacccagcagcagctctgtgtccagctggaatttcctcgccaggaagagaatccagaagctgtggcactcaggtgggacccagcaccagggaccccaaggcaggggctggtgttggggagggggcagggctgcttctgaccaatattcaccaccctgcccagagaccttaggggttcgaagtctttacacaggctacagaggtctgaccaacccacttctgaggcgtttcagccccactccaggccccagtctcagctccagtcacccccatgaactttcagttccccgaacaccatcttgcttagaccttagggcatttgcacaggctgtgctctctgcccagaatgttctcttcacgcctacctgcttcacctgcctaactcctcctcatccctcaggtctcagcttaaatgccaccacctcagggaggccccctggaccccaaggcttagtcaaacacttccattatccactcttatagatccctggattcacagcacctctaaatccatatggcacagtttgggaaattaaaatgtcacccttttgagtggatgcagccctgcatgtgtacattctgggaaatagagcatggtaggatctcagcctcacctcacctcctcggctgtgtgtccttgtgcggtgaacaacctgcacaaccataccagctgccccatctggactcctgcttcctagcacttctcataagtgaatagcaaactgtaggacttcatttgatcagcatttatttacccctacaccataagctccttgcaggcagatactgaatcccacatactggactagatgttccaaaactgtcgtctccctgtctgtgtccaggttggctcactgtgaccttggagcccaccacagccttcttgtcgggcagctgatggagacatgtgccaggctgcagcagctcaggtcagcgcctggaaactctgtgtggggccctgagttctctggttgaccctggtacctactccaggccatgtgtgaccctggcattctcacttccttgtgcaggagaaaatcacacttggccagtggaggggagggagagccccagggtggctcaggggagctcttgggtggccccttctcctctcttggcacccccttctggatgtgatgacctctgaggtgtgtccagcctgaaatcctctagaatatccttggaccttttcagcttgtctcaggttaacctctgtgaggacgatgatgccagttccctgctgctgcagagcctcctgctgtccctctctgagctgaagacatttcggtatgtagacaagacattcactcagtcccctttgcagctctgccctgccctgacacctcccgttattcccagccctgggctcagaggactcttactctgtgtcttactctgtggacacaaaccacaggtggccctggagatgatttttaggggtacctagtcgtaaacatgaccttaggaacattgagccacatggcaagaaagttgttccctttttaacactctttcattgtttttcttttaaaataactgcgaactaacacaaagtttcaagaagactgagaactgctgtgtgccatttacccaaattcacccttagagctgggcgtggtggctcatgtctgtaatcctagcactttgggaggccgaggcaggtggattgcctgagctcaggaattcgagaccaccctggacaacacggtgaaaccccgtctctactaaaatacaaaaaaattagctgggcatggtggtgcatgcctgtaatcccagctaattgggaggctgaggcacaagaattgcttgaacccgggaggctgaggttacagtgagccaagattgtgccactgcactctagcctaggtgacagagcgaggctcggtttccgaaaaaaaaaaaaaagaacaaattcaccctttgccaatctttttccacatttgctcatttcttccctccctccttctttcccacctcccttttctttcactctctccctctctccttttctgaaccatttagaagtaagttgtaatcatgtccctttacccgttaacatttcagcgaatttgctagaaataaggacattctcttccataatccagtaaaattataaaatccaggaaatgtgacattgatacactactattatctcaactacagtttatactccaatctcaccagttctcccaataatgttgcttattgcatttttttcccagttgtggatccaatccaggatcacacgtctcatttagtgtcatctctttagtgtctccttcaatctggaacacgtccttggcccttctttgtctttcatagcattgtctctgacatttacaggccagttattttatagaatgtccttccacttgggtttgtccaatgtttcctcatgtttagagttagagtctgccctttgggcaggaatatcacacaggtgatgctgtgttatcgtgccttccatcggggcacatgatgtgtcagagtcctcgggctagtgatgttaactgtgatcacctgtgacagtggtgtctgccaggtctctccacttgcaaatttactaactttccctttgtaatcaacatagattatgtggggagatactttaagattatgtattaagtcttcctcaaactctcattggcaaattttagcagccgttaataaatcttacttaaatcgatgaatcagcatgacagttgcaaaatgtagctttcctaactttacattttatttccatctaactgattacaccaagaagaaactcttgggctgggaacagtggctcaagcttgtaatcccagcactctgggaggccgaggaggaaaaatcgcttgagcccgggagttcgacaccagcctgagcaacatagcgagaccacccccatctctacaaaaaataaataaataaaataaatgtttaaaaaggaagaaactctttaggacagagagatctttgacacttcttcagtatttgctttaaagatgcagagtttgtaataaacaacagtaactagctaaactacagtgatacctaatcctggcttaagttgtgaagttgctacctgaatgactgcggtttaggaaatactgaactagtccatgcttctgcttccaagctctgtggtggcttaatgagttcatggtggaagagatttacgaagggaaggaggtctcctcacattgcccgccacatccctaccccacatccttgccctctgccaccagcattcagagctcccaagacccagggcggctcctgcctgacctgttgccctttgacccccaccaggctgacctccagctgtgtgagcaccgagggcctcgcccacctggcatctggtctgggccactgccaccacttggaggagctggagtgagttgcagagtggagggattggggacaagtggcccagctgagggtgaggggtggagaagagagcagggcgtttgggagggcaggcaatgagacttcaaccaatgacccttcccctgatgaagtgcagcagttctgggtgtggcctggggaaggaagagcaccacagttttggtctgaatttcgccactgactcacagaggggctgtgggcatggctgttccactctgggctttgattgccttatctatgaaaatggggctcatgagccttgctctgctgggctggctgtgggagtcaggctacggagagggctgaagaacaagagggtgtgtgtgtgtgtgtgtgtccctagtcccccagcttcctctctgcagccttcatccagggcatagtttctcagctgggccagctgtgactatcatgcctacccagagcctgagccctggagctagggatacccatggggaacctggacagcgagggtggcccagggcatgcagatgcagagttggcctcccaggggacagagcaggagaggggagctgacaggacagctcagctccagggctgggcaggctgcgctaacccttgcctctgcctggtcttctgcagcttgtctaacaatcaatttgatgaggagggcaccaaggcgctgatgagggcccttgaggggaaatggatgctaaagaggctggagtaagtagtgatggtggttgtgggtgagtgagtggtgggggtggttaatggatggtggaagtgggtgagtggtggggttggttaatggatggtggaagtgggtgagtggtggggttggttaatggggaatggggtgagtgagtggtgggagtggttaatggggaatgggctgagtgagtggtgggagtggttaatggggaatggggtgagtgagtggtgatggtggttaatggggaagggtgtgagagtggtgatggtggttaatggggaagggggtgagtgagtggtgatggtggttaatggggaagtgttgtgagtgagttgtgttggtggttaatggggaaggagatgagtgagtggtgttggtggttaatggggaagggttgtgagtgagtggtggcgttggttaatggggaagggggtgagtgagtggtgatggtggttaatggggaagagttgtgagtgagtggtgttggtggttaatggggaagggggtgagtgagtggtggggttggttaatggggaagtgttgtgagtgagtggtgatggtgattaatggggaagggttgtgagtgagtggcgttggtggttaatggggaagggagggagtgagtgatgatggtggttaatggggaagggttgtgagtgagttgtggggttggttaatggggaagcgttgtgagtgagtggtgatggttggttaatggggaagggttgtgagtgagtggtgatggtggttaatggggaagggggtgagtgagtggtgttggtggttaatggggaagtgttgtgagtgagtggtgatggtggttaatggggaagggttgtgagtgagtggtgttggtggttaatggggaagggggtgagtgagcgatgatggtggttaatggggaagggttgtgagtgagtggtggggttggttaacggggaagggggtgagtgagtggtggtggtggttaatggggaagggggtgagtgagtggtgttggtggttaatggggaagggggtgggtgagtggtgatggtggttaatgggaagggagtgagtggtgatggtggttaatggggaagggttgtgagtgagtggtgatggtggttaatggggaagggggtgagtaaggggtgggggtggttaatagggaagagttgtgagtgagtggtggggttggttaatggggaagggggtgagtgagggatgacagtggttaatggggaaaggagtgagtgaggggtgatggtgcttagtgctgcatggtcagtgagtagcatgcctaggaacctttgcatgttttgtgaacacaaaccgccatgtttctggatggacccaggtgagctgaatgcccttacatgaccttttactttctattctggatctcagtgccagcaagaaccttggtcataggaaacagaatacacaactcaaagcaatccaagacagaaatatattggcttatgtcatggaaaattacgaggccaatgacttcaggcacagctggatccaggggttctatatttgtcaggcttctctctcacacacttcactctggcccttactctttctctgtccaccttggcttccttctcaggcaggccatccctgcacctgcaggcttactttctctcagcttagtggaaagggagtaccattctctctgtggttacaacaaaaggtcctagactgagtctcactggactagcttgagtcacctgccccaccctaaagcaatcactgtggctgtgagcacaaaatattctcctcactggccagacctgggcgcatgcacaccctatcttctggacttagaggggtggtatttcaggatgtgagtaacagaagaggaaagaaactctgggcagaaaaaaatctacagatgtccactacatttgtctacagttgtttccttggtaactggcagcttttactactctcccccataatttgaagtcatcaaattcttagaaatgccagaaacagcctcagtctaaaagacaggtccccgtcctgcacagattcctgtttagacagtatctggacagaaaatttaacagaatatcttctgcttttcatctcttaactttttctgatgaccaaaaaagttccatctttctagaaatatgtaacaaataacatgaaatgccccggggatgacaccccctgagaaaacttctgttgaacggtttgtgaatttttctccagatttttttttctacatatgttttgaattcagcttgaaagtagccttttgactttttgccccttaacattgaaattcttccgcttgtccctctttgcttgtcctggggagaggatcaggtaaaaggagaagagggattacagagacctttgaccacagggccctcctgtcgtctcactggtctgtttctttgcccactgtccatgtacctgcatctcggctcagccttctggaagcttttatttaggggattggaggcccagtgaggtcattcattggctcattcatgcattcgacaaatatgtactgagctgggcacctgggccggggacaggacagattcatccatgcccctgggggcctttttcttcctcctgatttcccaggcaccatgtgctgctccttacctcctgctgccttagttgccctatctgtaaactgggcataatatcttccctgtccgaaggaaggggatggatcgtcagtgcccggaggtctcttcccatctcagatctgtcatttccaagtgtaactccccacaggcagttaccctcaaatccagtcagcttcttccagctgtatacctgtgatggagtgggtaggagcatggaccctagttaggagcctcactgcctgggttcaactctgggtggggtaactgacacttccagtttgcttggagctttccccattttggcacccaaagtcccacatccaggaaaaactcttctgttctgagccaaccaagacagttgaccatcttttgcttctgcctcttattttattatttatttatttgagacccagtctctctccgttgcccaggctggagtgcagtggcacagtcttggctcactgcaacctccgcctcccgggttcaagcaaccctcctgcctcagcctcccaagtagctggcattacaggcacatgccaccaggcccagctaatttttctatttttagtggagatggggtttcactttgttggccaggctggtctcgaactcctgacctcaggtgattcacccgccttggcctcacaaagtcctgggattacaggcatgagccattgcgcccagccagttctgtttcttaatgtgtgaactcgtgccagtccctcagcctctctgttctttggcctcctcatcttaactttgaggataagagcaatctcccctgctacggttgttgtgagtattaaatgagataatatgtgttacagtcttagagtctggtcagagttcacactctacaagtgctagctattgttattctcctctcctgcctaggctgggggcctctagaagtacaatcgcctgggtcacatatggttggggctcaggaatgggagttctatagtttttggttctgttcctgaagcagccactttgtgtatgaccttaagcaagttctctaactctctgaaccttggtgttcctcacctgtaaaatggggacgataataaacccacctttccagatggccccaagccctgagtttggcccacattttatgatcaatgtgtgaccgccattattacggatcattagtcttggtccatgtggttcagaacatagaactgctgcctgcctgacctcagtaattcatgcagagaaacagcatttggacctcccagtacagttcattttgtagaatttttacactgtgtggatataagtggctgtcttggaggtccctaggcttgctaagcacagaggcctcagacccccagactggacagtgccccacccccagatgtcaagttcacctggcctcctcttctccagcctcagtcaccttctgctgaacagctccaccttggccttgcttactcacagactaagccagatgacctgcctgcagagcctcaggtgagtgaccgagcggccccatgggaatgagtgggaagaaacacttcccactcagttgggaccacatccagggaagcactgaggccacctcccaggggatcctttgcggatccctcccaggcccatccctgtgccctcccaggtgggtgcccactgctcttgccttctaatgccatcagcttcctcctggttacaaaagtggcctaaagggcttaggcccacgtcgtagaacaacccttgaggcacacacacagttcaccctgggctcttgttaaaatgctcattctgattccccaggtctggaattctgcctagactgtgcttttttttttttttttttttttttttttttttttttttttttgagttggggcctcactgtgtggcccaggctggagtgcagtggcaatgcacaggtgcaatcgtgttgcactgcagcctcaaactcctgggcgaacgtgatcctcctgcctcaccctcctaagcagctgggactacaggcctaaggcgttgcacccaaacttagcatttctttttttgtttgtttgtttttgagacagagtttcgctcttgttgcccaggctggagtgcaatggcacaatctcagctcactgcaacctccgcctcccgggttcaagcgattctcctgcctcagcctcccgagtagccgggattataggcatgtgccaccacgcccggctaatttttgtatttttggtagagacagtgtttctccatgttggtcaggctggtcttgaacgtccaacctcaggtgatctgcccacctcggcctcccaaagtgctgggattacaggcgtgagccaccacgcctggcttcagactctgcattttctaacaagcttccgggtggtatcaattctgggggccacggtcagcactttgagtagtgtgggtctagactcagatggggtggccttcctacactccctttgtgatttcactccctgctgctaggataaataaacatgacacttactttcaatgtgatttttcaaaacatgaaatcttgtgactaaaaacaaatccaagcagtgacacaaagcattgctttgtttatatccaagtacacctcctaccccctacctcgggcagagcagagtaggtaggaaatgaggttagagagttccaggaggttatatcatattggaccatttcacccaaaattaatttactgaaaggtgatccattaaagtgtatttatttatttctattttatttttattttttgagacacagtctcactctgtcgcccaggctggagtgcagtggcatgatctcacttcactgcaacctctgcctcctgggttcaagcgattctggtgcctcagccgcccaagtagctgggattacaggtatgcaccaccacgcccagataatttttgtatatttttagtacaaatggggtttcaccatgttggccgggctggtctcgaacccctgacctcaaatgatccacctgcctagactccgaaagtgctgggaatacaggtgtgaaccactgctcccagccccattaaaatttaatttgcaaaataaaagaaagtaaaaacaacatgcaaacaaatacttcccaaggggctaagaccatttgcctcagctatttattgttttttcctacccaggcagagcaaggtcagggctcagtaaagacaataccctgggtttaaggaaaaacctaccatttgcatggatgagaacacatatgcccctgagaactgatctgcgtgaatcagagaatcccacgtgaaagtggcattcagccgggccagcccggagatccctgacacagaggctgaggtgaagcttggcaaagaaatgtagagactcctcctgggccaggggctctggatttgtttccacccagcctgcaagtccctaagtctctggccagtcacagctcactgctggctctcaagttttctcacctggacactggggacaataattcccaccttgctcaccactccccacctgccatgacccccagaagttttgctaccagcatatgaattcctgggcgtgtaaggctttgcaaactgtagagttcttagcacagcacctgcaaaggcctttaagctcctgaaagcctcttggtctattccctgcttttccagactgaacaggaacagtatcggtgatgtcggttgctgccacctttctgaggctctcagggctgccaccagcctagaggagctggagtgagttgcccattctgcccccagacccaggacaattttggccgggaaagatgacaagggcaaggggctacctgagcacgccctttgcttcttcatctcatctccttcacccacttctacactgtgtaaacaacctggggcctagaagcttgggggacccaaagacaggatgtaagagtgtcaattgtagcaagagggatttaggtcagacaatggggagaacatcctaaacagaagccaagggttaggagctgtcactcaacatggggtgatggggctctctgtgtgagtcgaggcccttcctgggacttcagcctccccttctttttctgggagtggggtgtggacaagatgagacggcagaaggctgatgaagctgttttctcccccaagcttgagccacaaccagattggagacgctggtgtccagcacttagctaccatcctgcctgggctgccagagctcaggaagatagagtgagtagccagccctacagaggagggccacaggggtcacacgatggtcctaggagatactggcccctagctgaggccagcatggtaaaatctcccctgcgccaacctcagtgtccaggcagtggggctcggtgacctcctggccctcactgcgggaccttaagccaccccagcccctgctcttctctgggcctttctgcctcattgtctgggtaggtgtgtggtgtcggggggttgtctcttaggccccctgaagcaggggtggcagacccagcagatgtgctggggtgtcggggagagggggcatcagaggacctgatggctgcccccctcccacagcctctcagggaatagcatcagctcagccgggggagtgcagttggcagagtctctcgttctttgcaggcgcctggaggagttgatgtgagtgtctgcccaggtggcctctgccctctgtgccccccaggtccacctggcctcctctcccgcagtgggcacagggcagggcgggggtcccgagtgggcaggcccagtactcaatgctcattcctctcctcttccaggcttggctgcaatgccctgggggatcccacagccctggggctggctcaggagctgccccagcacctgagggtcctacagtgagtggccccctgcccataccatgcagggctggtggggaggagggtcctcgggagcagtgggggggtccaggcccccatcagttgagctgccctgccccaagtcaagcttggcatatacccactctcctgcctgttccttccctgcctctgatgtctgcagcaagaaaatcaggaggcccagcctagtcctggctctgccactggcccctgcctgaccttggccaaacccctgccccttctcagcctcagtttcttcacatgcaaaagaagtacaatgatcccagttcattgtgccctgtgagcgggtccctgagggcgaatgagaaatcctggcagagggcttcgcaggagcacggtgccaatcaacgtggcctcagcacttcacaaatgacctcattgcagccccatggcagcccccagagtcccagagtgctgggaccttgttttttttttttttttttttttttagatggagtctctctctgtcacccaggctggagtgcagtggtgcaacctcggctcactgcaacctccacctcccgggttcaagcaattcttgtgcctcagctaccagagtagctgggattacgagcatgcccaccatgcccagctaatttttgtatttttagtagagacggcatttcaccatattgcccaggctggtcttggactcctggcctcaagtgatccacccacctcagcctccaaaagtgctgggattacaggcgtgagccaccatggctggctggtgctgggacttttatgtgctcccttttccaggcaagggaatgaaggccaggagaggtgtggagaattttccttactcatacacgaaggacccaggtgttgaatttgggatctcagaccccaaagccagggtccttgatacctacccaggtcctgtgtggatggggaattagccagagactgtctacgggctggcactgcagcctgagacaaggctgagggtggggctctggaaacgccagtccctcaggctcctctcaccctctcctctttccccagcctaccattcagccatctgggcccaggtggggccctgagcctggcccaggccctggatggatccccccatttggaagagatcaggtaagtaggggctgcccagcccaggcacggggacagtcctgggcgggtctgggggttcctctcacaggtatctcccctaccctgcagcttggcggaaaacaacctggctggaggggtcctgcgtttctgtatggagctcccgctgctcagacagatagagtaagtagcctcccctgcctgcctaggggaccagtggcaggctgagggcagcccttctctgactgagcctaacacctggggaggcctttgaagtgatagaagccccagggatggtgggggcctggctcaagaaaggaagtctttcctaaaacgcctagcttaccccagaccctggtggctctggaggcaggacctgctagatcccctgactcaaacaacccccatcccatcccatgcccttctccatccccagcctggtttcctgtaagattgacaaccagactgccaagctcctcacctccagcttcacgagctgccctgccctggaagtaatcttgtgagtgattggaagagccctgagctggctgggaaaaggaaaagtcgggaggggtcgggggagttggctccagcctgctgtgtggcctggagctgctcccatcctctctggccagtcctcccatttgtaaatggggaagatcatccttactcagacatcctctcaaagacattttaacacttgagctgcaggtaatgttgggtaaaacagtttaccttcttctgcctttttccccatttgtagattggtgggaggggaggtggaccagatggtctttaaaggtttttggtccaaccttccttttgggaggcaactggatagaccaccttgcctgcttgatgaaacctccatttatgaaccacagttggtagaaacagtggctaaagccaggagaaagccacccccagacctgctggctggccgtgcttggctgtctcttagcaatcagaatcccccagaccttggggctttgcagtgctgcctcatgagtaaactagaattctaggactagcctgggaccctaaccatggtatggaggacaaagctgtttcctaaagaacaggacacaagtgattacgagaagattttagtttgcatcctaaaggtcttaacccttctcattacaccaaagcgaaagtctcagatcagtggtaattcatctttaacacctaacactggattctccctttttaaccaaaagggttaaaaacccaacatcttaggaagggcatatgttccaactagaagttaataccattgtttgtactatatttatttttgtaactaccttctatatggagtctgtaacacaagttttccattgatagtagcaataaaagtttcctttcaagatttttttttttttttttttttgagatggagtctccctctgttacccaggctggagtgcagtggtgcaatctcggctcactgcaacctccacctgccgggttcaagagattctcctgcctcagcctcctgagtagctgggattacaagtgcccaccaccacacccagctaatttttgtatttttagtagagacaggatttcaccatgttggttaggctcgtctcaaacacctgaccttggcctcccaaagtgctgggattacaggcgtgagcaaccacgcccagccaagattaattttttaaagtaagaaaaaagagggggccaatttaaagaaaaatatgatgcatcttaaatacaggaggtacatgtatgtggcaaaaatggcaacatcttgtgaacaacgtcatgattcaaacttgacggggaggggagcagggaggaaggtaacctgcaccctgacgtcttcaggggaggacacacaagcaccctatcaggtggcctctcttgaaaacccttgcccccacgactggcaccctgctttccccattcactgccttgtctccacccctcgacctccttgctctcctgccgctgactttgggacccctaccctgcaggctgtcctggaatctcctcggggatgaggcagctgccgagctggcccaggtgctgccgcagatgggccggctgaagagagtggagtatgaggggccgggggaggaatgggacgggctaaagggggacctacatcccgggaacaccaagaggccactgggtcagtcccctgcctcccagaaagcccttccttgagttgcacactctggcctgttccaagcccctgccaggcttagttccccctgggttctagccttcagccttcctgctgcacctgccaccagtcccctgttgtcttttgggttccctgagaaggtagtgtgggagactgtgtcccctgaccttggcctgaggaagggacctaggaaactctcacacccattctcatggccgtgtttctctttcccctcccctcactgtccactgagaagcctggagaagaatcagatcacagctttgggggcctggctcctggctgaaggactggcccaggggtctagcatccaagtcatccggtaacagaggcctgcaggggcagggatggtgggtgggaggctacaccaacccccagatctaatgggactccctggaggaggcggcagggcctgggctggggattatcaaaggagacttggaccactccaccaagaatttggcagcaagcagacttggatcaaaccccagctctgccacttgccaactgtgtaactttgtagccataactcaacctctctgaaccccaattttctcatctgtgaaatggggatactgatagtatctacctcagagagttgtgaagactaaatgagcatataaagcactgaacccaatgcctggcacatagtaagcacttaaaatggcagctataatcagagccatcacatacagttgtataggttgtgcactgcacaagggcattaaacctaaggggcaccattcacattgtcaacctgctagatttctagcagatgagagtaaagtaccttgttctaccaaaatcatatattatgacaatttcagacagatggaagtaaaacatcttgaagaaagagggtcttttccttatttgcacaaatgtgtcatatgagtgtggccttagctggcatcactatctcccagggaggaaggttgagttggaggactcaggaggcaggtgtggggtacaccctctccctaggtcagctatgctggtctaacacctgcctctgccaggtaactctaggcacagctctacctttttgggcctcagcctcccaatctgcagatacgacagatggcaaagatgggaggatgaatgagtgcctatatctgtgccccacagcctctggaataaccccattccctgcgacatggcccagcacctgaagagccaggagcccaggctggactttgccttctttgacaaccagccccaggccccttggggtacttgatggccccctcaagacctttggaatccagccaagtgatgcacccaaatgatccacctttcgcccactgggataattgactcaggaaagaagagcctcggcagggcgctctgcactccacccaggaggaaggatacgtgtgtcctgctgcagtcctcagggagaacttttttgggaaccaggagctgggtctggacaaaggagtaccctgcattacgtgggatatgtgtgatcaattggggacatgcgacacacaatgagggtgtcatgacaatgcatgacacgtacggttatatgtggcagtgtgaccccttgacatgtggcgttacatgaaagtcagtgtggcacgtgttctgtggcatgggtgctggcatcccaagtagcaggatacatgattgttggtctatatatgacacatgacaaatgtccatgtcacaggactcatggctggccagatgacctcaggctggcccaagatctaatttattaatttttaaagcaaatacatatttatagattgtgtgtatggagcagctaagtcaggaaaagtcttccgcccgagctgggaggggagagtgtccatgcactgaccagtccaggggctcaagggccagggctctggaacaagccagggactcagccattaagtcccctcctgcctcaatcctcagcctacccatctataaacttgatgactcctcccttacttacatactagcttccaaggacaggtggaggtagggccagcctggcgggagtggagaagcccagtctgtcctatgtaagggacaaagccaggtctaatggtactgggtagggggcactgccaagacaataagctaggctactgggtccagctactactttggtgggattcaggtgagtctccatgcacttcacatgttacccagtgttcttgttacttccaaggagaaccaagaatggctctgtcacactcgaagccaggcttgatcaataaacacaatggtattccacgtc

SEQ ID NO: 15685 - DNA, 66451 bp, Homo sapiens
gagtctgcactatggaaacaacctgtcaatccagctcaaggcacacatagcccagacacccatgagaccctctccgtggggaccctagagcacctatcatgaacgaggagaccaagtaggtgatttttctctccccttcacctcctcttttcccctcctatctacttcgtcacttttctcctactgccaagactggtccctacccaaatctgccttactgggctgcccccaacacaacaaacctgcccttgaccatcattcagcatgagaatgtaatgatcagacacagaaaatcaggaagagttttgagacagcatctaatctacccattttagagatggtatgactgaggcttatataggaaaaaggcttgctcaaggtcacactatgagtgtatcagctaggataggccaggttacactgtagtacatgcaccctccaaagtcccagtgactcatggcaacaaaagtttatttcctgctcttgcttcctgtctcgtgtggattgactgggattgctcctccacatcatcctgtctcccacactcaggctaacagggtagccatgatttgcaatatttctggtccctggagtagaaaaaaagaaaaagtactgtcaattacaccttggttcttaaaacaactacaggcatgacatgagtcttttttagcatgtttcattgaccaaagcaagtttcatggctgtgcccaatttcaaggaggcagagaagtgtaatcccaccaaaggcctagaaagaggagaaagagtatctgtgaacagccctaatgcctaccacagagaattagtaacagagctgggccatggatctttcaaccatcgtcctctgtctccaagattattccccatggaaatctcaatgactgataatgatgccatgtgctttttctcctgaggatggttagccttaaagagatttgtgtcatatcctaaggggatagaacactaatgatggaaacaaaggtattgtgttagactggctggaggagaaatttgaggatgagaaacatcaccagaaatcacaccatccaggcactacttacttccatctggtgccatgctgccctggaccatttcttcatgggtagcatggatgctggacaccatagcctggaaaagaagttatgccctaggctatggccacatccttttgccgagatcacacaaaatccagggacttagccttgtctggtgccatctaggcctccaaggccttggaaatttactggcctgggaggcaagaaacctcagttctcctcctgcctctgtcatggacttgctgtgtgactgtgggcacaccctttgcccttccttggccatggtctttccgtctgcttagtggaggtggtgatccctgcctgaggatcatggtgtgagcatgtttcataaattctaagactctctgcctgagtgaggacctattgctattagcccagttgaggagaaatgaccagtggggctgacagtacatccaagtatgtctctactgcatgcccagggagcagctgggctctaaaccccaggacgcatagtactggcctcagcctctgggaattgggaaggctggcttctgggtggacctcctactcttttcagagttagaggtggactctctggagttgtgaggataaaataaggtatataaagcacttagacagtgcctaatacacagtgagtgctttccaagtgtgtactgctatgaggaaggacatagtaccagaaagtacatccggaaatgtgatagcatagtccactagatgatggaccaccatttagttggccaatccccaactgttggacatttaggttgtttccaatttttaataattataaataatcttgcagtgagcatctttgcaattaaatattgtatatacgttcatgatcgtttgccaaggttagagtcctagaaatggaattactgaatcaaaggaactgcacattatttaggcttttgctgtgtaaatgccccgtgccctctattggtacttctagaaggaggtggtttaagagttccagttcggccatcatgatggctcacacctgtaatcccagcactttgggaggccgaggtgggcagatcaccctgaggtcaggagtttgagcccagcctggccaacatggtgaaaccccatctgtactaaaaattacaaaaattagctgggcattgtggtgtgcacctgtaatcccagctactcgggaggctgaggcagaagaatcgcttgaacccgggaggcggaggctgcagtgagccgagattgcaccattgcactccagcctgggtgacagagcgagactctgtctcaaaaaaaaaagagttccagttcagaagggaagaatttgcttagcaaaagaggtgatggtctgtgttagctaggattagagttcactgtgagtagcagaaagcactaaacaacagtggcttaaccagaatggaagtgtatttccctgccatgtaacagaagtccaaagtcagtgagcacagggcagatgggcagctttaccttccaccttcctcagtatgggttccacctcatgattcaatatggctgcccaagatccagccatcccatcaacaatccagacaacaggaaggagcaaagaagaatagacaacatttctacttacattccactggccaaattacatggctacatataactgcaagggagactgggatataataatctattctagatgaccagagaatatttagtagttctaatactgaggaagaagggaagaacagattttgggagacaactagttgtctctgccatgaggttagctcagactgagagcagcataaatggttcatggaaataagaatgagtaatgcatcctcacgggactgtccacaggggatgaacaagaccattccagagagccagggtgcaggcacaaatggagtagggagggggtgcagaagaaacagactgatctctggagctgatccctgggcagagacatcaagactccatggagaggccacttccctgcctattttatgtcgctcaaatgtagggactggttcttgactgcttgacttccctagaaactcccttatcccccaactcaccttccccagatcaccttccccctagttcatctgtaccccactcacctgccctcaggtcacctgccccacaactcacctgttctccatctaatcttcctcccagctcccctgtcccccaaatcacctgcccccaatttgcttgtcctccagctcaccggttccccagctcatcttccttccagttcccctgtcccccagctcacctgcctgccctcagttcacctgtcccccagttcatcttcctcctagctcccctgtcccctagctcacctgtgccccagctcccctgtcccccagttcccctgtcccccagctcacctccccctcagctctcctgtcccccagctcatctgcccccagtttacctgtcccctagctcacctcccccccagtttacctgtcccccagctcacctccccccagtttgcctgtcccccagctcaactccccccaagttcccctgtccctcagctcatctgcccccagtttacctgtccccctcaactcacctatcttccctgtccctccagggctggctcctcatggaccccgttggcctccagctcggcaacaagaacctgtggagctgtcttgtgaggctgctcaccaaagacccagaatggctgaacgccaagatgaagttcttcctccccaacacggacctggattccaggaacgagaccttggaccctgaacagagagtcatcctgcaactcaacaagctgcatgtccagggttcggacacctggcagtctttcattcattgtgtgtgcatgcagctggaggtgcctctggacctggaggtgctgctgctgagtacttttggctatgatgatggtaagggcaggtgtgagagacgcaaagcagccgggccagtacctgcgtcatggggagccgggaggagcccagggacccacctaagtcagagagagggtgtagcccagccacgatctcaactctatatttctggacacttcccagaacaaatttcctaatgcgcccaaatctgctggggcctggaggacccctccttctacctggcttcactcgaattgctcgaattgctgagtgactgcttccagccacaaaatcccacatagcccataatgcccgagagatttatttcttcttttttggcgggggtgggggggtgttttttgtttgttgttgctcttgttgggttttgtttgtttgttttttatttttgagacaaggtcttgctctgttgcctaggctggagtgcagtggcacaatcatagctcactacagcatccaactccaggactcaggtgatccttcccacttcagcctcccaagtagctgagactacagtagaactataggtgcatgccaccacattaggctaatttttcattcttttgtagagacaggacatcactgtgttgcccaggctggtcttgaactcctggccttaagtgatcctcctcccttggcctcccaaagtgctgggattatagatgtgagccatcacacctggctagaggtgtttttgtttgtttgtttgttttgcaacatggtcagaaacagtgacggggagcgccttctgccctctactgatccgtggggatttcttgggcaccttctgtttgcacagcactgaggggaaacacaggacattgaggggcaacagcgtttttggagagaaaatgggaactcacttaagaaccctacttcaaggcagagtgtgggaattgcggggggcggggcggcgcatgcacatatgtgcagacatatgcagatacacacagtgcatatacatgtgggtatgtgcgtaaacccatgtacacatgcatgcaagtgtgcccacatgcataacacatgcatgcctgtgcacacacatacataaacttgcatgcacttgcatatacacacatttctgcccagcactgccttcaaagctcaccaccacattttctccacaacagataactgagtgttccatttagttctcccttgctgggtatctccctgtgagatgagccctgagccaggcgccaggccagagctggtccccagcatccctcgacagccccataccacattatactctcccctctcttgcagggttcaccagccagctgggagctgaggggaaaagccaacctgaatctcagctccaccatggtgaggactggagttggggggtgggaagggggtggtgagcactgtgaagtccccacttccaagctggaggaggctgtggaggctgtggtggctggtcacagccatttctcataggccatgctcttcgtctgtccctgacccatttgcaagtgtgtcaagcccctaactgtgtctcccagccccacctcctcctgcagtgactttcaaggctttagcttgtcccgttaccaattctaaagggtctaacctggaacccctcaggaagcctgttctcactttcctgcccgcaacccgcagggcctcatctcccagccccaaagtgtcaggcttcatggggaagccctaaccaccccctcccgacttgtacaccttggacttgacactcacccacagctgctgtcttcagcgggggagcctttggctgattttctgaaggagctcggaagggccagtgattaaataatgaccacctactgattcgtgggtcacactttcatctcagcaccttgatttctacagaagcattgactttacttatcgctgtgcatggcagtaatgccaacagaaaacccaccctataacctcagctccccagtgaatcaaaactgtccaagtccctggtccaataggcccgcatcactgagctggcatcattatctcatggctgtaaccagatctgattgatatttggccagtgagtccctttttaatataggatttgttaagatattgaagtgctctcgaactggttccagcctcctagctggacaaggagcccagggccctgctccaggggctgttcctattggtcacttagcttagctgtaggaggaccctgcttgacttcttaaaattctttcctgagtcctctttcctttctccctcccttcctttctgggtccccttccttcttgttttccttcttcctttctcaaactcttccagaaaggcattaaagtgattgttgaaaatccatacaatgagacaagactccagaaactattaagggaagtgaggaaatgtgggtgataagaaatcgggatgataaaaccctaacagaggagggaggttgcaggcctggccaaactcactgggaacttcacttatatgaccaccggcggcttccatagagcttggtccttccctgatggacagatggccatttagtgcttggagctgagtgtttctgggggctgctggctgttggccctgcttcctgcatcctggactgcaagactgccaggcccagaacatccaccttccaatgggggtgcctagaagtccactctgcaaatagaagctggtgttgacccagcctctgcctgctgcctgcctttccagtccctgcatgtgggtgtacttggctgcctgccacctgtctgtggactggagttccccaaaggttctgggtaacccctcagcccagatccccagaccccactcctccaccccttcctttgctttttcaggcctgaagcgcccacatcagagctgtgggtcctcaccccgccggaagcagtgcaagaagcagcagctaggtgggtaccagtgtggggaggaacataaacagagagatggggttgcctgggggccaagacccggaccctggaccttgtcccctgccaataagcctccagaggcccagtgactcttgtctcgcaagtttccaggagaaaaggactggaggtcttgcacaggcagaggagaggcctgggctggcagcgaaggggctccccacccatctggctgcatggggacttctctgaagagggctccgctgaaggagctggaagcaccatacaggtctcagcttcgctgtccaggcttttccagggacaccctatgtcctcagtgttgaaggagacccagggaggagaccagtttgggggtgagcagggatggggaggggtgaggaggcctgggagaaaccttcaagacagaggccctgggggcccatggggagacatggagctgcttagggcaggccaggccagtgagagaagaaaggggacttctctcattcttgaccagttctcagaatggtcctcgttctccacgagttgtcccactaactagagccttctctgcccccactgctgccaaccatggctataaccagaggattcacatccgctcaaaatagttcactaccttggcctttccccatagggttcccccaaaagcagccccagccctttccctgggtcacctgagacctctcaatgacccaggaattaaaaggttaacatctggcactgtaggggcccagctcccacagttccgatcggtaatgcctaggcctacaggttgttagtgctcacccctgggcattgcagaactgaaatattgggaagaggcactggggatccagatattacagaaagaggttgtttcaataagatattgcaaagtagctgggcgcggtggctcacacctgtaatcccagcactttggagggctgaggcaggtggatcagttgagcccaggaattcaatactagcctggccaacgtgacaaaaccttgtctctactaaaaatacaaaaattagctgggtgtggtggtgtgcacctgtagtcccagctactcaggaggctgaggcaggaggatcacttgagaccaggagtttgcggctacagtaagctaggatcgtgccactgcactggagcctgggcaagactgagactctgtctctgggaaaaaagaaaaaaaagagatgttgcaaaggaggtgccctattcccctccccccatcttactgaacccttacaccacgtgtactattgcagaatggatagaaccgtgacccacacttccccattcccacctgcctgtttaaatagctaccggagagcctatgctcccttagaactgattccttctggaagttggggtggcacagatccccctatggtgctcttgacacccccaccctcaccccatcatacatacacatctggggctacaggctcccaacagcccaatactggggcaagaagacatgagcagagggccggggggtcctctcctcatgccatgtccctgccccttgcagagttggccaagaagtacctgcagctcctgcggacctctgcccagcagcgctacaggagccaaatccctgggtcagggcagccccacgccttccaccaggtctatgtccctccaatcctgcgccgggccacagcatccttagacactccggagggggccattatgggggacgtcaaggtggaagatggtgctgacgtgagcatctcggacctcttcaacaccagggttaacaagggcccgagggtgaccgtgcttttggggaaggctggcatgggcaagaccacgctggcccaccggctctgccagaagtgggcagagggccatctgaactgtttccaggccctgttcctttttgaattccgccagctcaacttgatcacgaggttcctgacaccgtccgagctcctttttgatctgtacctgagccctgaatcggaccacgacactgtcttccagtacctggagaagaacgctgaccaagtcctgctgatctttgatgggctagatgaggccctccagcctatgggtcctgatggcccaggcccagtcctcacccttttctcccatctctgcaatgggaccctcctgcctggctgccgggtgatggctacctcccgtccagggaagctgcctgcctgcctgcctgcagaggcagccatggtccacatgttgggctttgatgggccacgggtggaagaatatgtgaatcacttcttcagcgcccagccatcgcgggagggggccctggtggagttacagacaaatggacgtctccgaagcctgtgtgcggtgcccgcactgtgccaagtcgcctgtctctgcctccaccatctgcttcctgaccacgccccaggccagtctgtggccctcctgcccaacatgactcagctctatatgcagatggtgctcgccctcagcccccctgggcacttgcccacctcgtccctactggacctgggggaggtggccctgaggggcctggagacagggaaggttatcttctatgcaaaagatattgctccacccttgatagcttttggggccactcacagcctgctgacttccttctgcgtctgcacaggccctgggcaccagcagacaggctatgctttcacccacctcagcctgcaggagtttcttgctgccctgcacctgatggccagccccaaggtgaacaaagacacacttacccagtatgttaccctccattcccgctgggtacagcggaccaaagctagactgggcctctcagaccacctccccaccttcctggcgggcctggcatcctgcacctgccgccccttccttagccacctggcgcagggcaatgaggactgtgtgggtgccaagcaggctgctgtagtgcaggtgttgaagaagttggccacccgcaagctcacagggccaaaggttgtagagctgtgtcactgtgtggatgagacacaggagcctgagctggccagtctcaccgcacaaagcctcccctatcaactgcccttccacaatttcccactgacctgcaccgacctggccaccctgaccaacatcctagagcacagggaggcccccatccacctggattttgatggctgtcccctggagccccactgccctgaggctctggtaggctgtgggcagatagagaatctcaggtgagtaagagtggaggaggaccggggaggggattgggcttttgggggagcagaggccaaccagtctagcaaacctctgccaagaggactggataagaatcttgaatatcagaacataatggcctgcaatgcaagagaggaagctccataccttgacaggacctctggagtccaaatggatcctcctcttgtctgtggtttctggactctcagtctctctgtcaatcatgggctgaaaccacagatccaggctgtctatagaggctggtggactttgggcaagtatatggagcacacacatgcacactgtctaggccagagtttcttcgttcctaaaacgaatctgtaacaatagccaactcatatggtcattgcaagaatgagatgggatggtgcatgaaaaacattttgtagcacagtgcctagcacagagcaaaggctcagtgtgcatattagctagagaaaaggctaggctgcagtaacagagaaacctcctccccaaatacagtaggttaaataatgtagaattttatttctctctcatggaagagtcagaggtaggtggtccaggtcagtggaatggctcagctccacgcagtcatgcaggtacccaggtccctcccattttgctccattatccccttgggaatcctatctgcacagtcaaagctacgtcatgggtatatctgtgctctggcttgggaacaaggaaagagcatggaggaacatgtcaatgcattaaagttcagtcctgaaactaggatacatcccttccactcacattccattggtgagaacatagtcacctggccacactgagctgcaagggaggctgggaaatgtgatctctggctgggaaaccatgttcctcatgatagctctattgctgtagatgaagtggagaatgggctttggtggacgattagaagtctcggccataatatgtatttgttagtactactgtattaagccccatctctctgaggggatggcgatgacttctcagctctgcccagcactgatcctctgacacttcgcttcttcttatggcagctttaagagcaggaagtgtggggatgcctttgcagaagccctctccaggagcttgccgacaatggggaggctgcagatgctggggtgagccaggccttggagctgagaagggtcttcagctggggatgcctggtactctcctccctctccttaatcctacacaaggcagattcctggccccgcccttttcccctcctcgttcctccccaccatctttgcttactctgtaggttagcaggaagtaaaatcactgcccgaggcatcagccacctggtgaaagctttgcctctctgtccacagctgaaagaagtcaggtgagtgatctccaggagggctcactgactggggagatgagccactgcccaggtcccagagtccccctggggcctgcatgttcctccaagtctgaccagtagtttttcagtgagacccagagagggaaggcatcagtccaagtactcagtagggctgagtccaaacccaaggctcccagagtccccagagcaaggcttccttcatctaatattttagactgtcttggaggagcatgagtgttaaggctccctccctctttctgaaatcccaggagaagggatagcagtgcgtaggcaggaatcaggcactgtgggtacacataactacatgaagcaccacacaccttcacatttgttcacacatgtctacacttgcacagaagtacacaggcatatgcaagaatatgcacccacacatgcccactcataggtgtgcacatgtatgcagcgcacacatgcacctttaactacatgtacacattttgatgccagcacactctaactaactaagcttgtatgcacaaatatactcctgccctgtgtctgggactcagtaccatggggaggagtgggaccagtgaccctcctccctggcagaacgctgctagtttatatggcacctttatgacatttagagaaggcaccacttcatccacacagatgcagcctgtcactaaggttcagcacttgttgagtgaaaataataagttggaccacagtccctattgtcgtctcggctgggcatctgtgaaccgtgattaagccaaggttcagaagtactgaacttgttgacatttttcttccctggctattgaaagtgactttaattttgtctttcatcacccaccattgttcttaatcaccctcactcccctcaactcatctgtctccccagctaggaacccaggcaaggctggcttgtgaacaggtggggaaagtgaggtcagagaggaatgcgcttggctcagggctctgggtgagtcagggccacagccgaggctggaagcgatgtctgcagcgtcccagtctagactttactcattgcctggggggcctatcccaggcacatcccaggcataagccctgggagcagggtgctaggtctcctcattgtgcctcatgaagaggccgtcagtctgtcttctagatcccttgagccgccaggcaaaaacttccccataggaacagaatagacccagaattgaggccagcagagggtctttcctcctagccgtgcctgctggaatccggcgagcaggccatcagctctttctgggcccctgtcttatgtctcccacatgagggtggccatcctgtcacttgctaactggggcttgcaagtgccccaaccccagggcaaagggactgggccttggtctcctcgcagttttcgggacaaccagctcagtgaccaggtggtgctgaacattgtggaggttctccctcacctaccacggctccggaagcttgagtaagtgatctttccactgcctctgcagcccagtccctctctatacctgattcaccccactcccttgcaaggcaaggaaggtctggggcccctggggtaggggattccactcctgacacctttgccacaatcttgcagcctgagcagcaacagcatctgcgtgtcaaccctactctgcttggcaagggtggcagtcacgtgtcctaccgtcaggatgcttcaggccaggtgagcagaaggaaagggatcttggccttatgggccttgagaaaagaggaggggaaagtgggatgggaaatggaggaggcccctcgtctgcaggataaatctgtgcataccctactgttttactcacagctttaccttcagaacctagctcaggcttggcacctggtacttggtatatattgaattaatggatggatgaaaagatggatgtatggatggatggctgaaaagatggatgggtggatgaaaagatggatggatgaatggatggctgaaaagatggatgggtggatgaaaagatggatggatggatggatggatggatggctgaaaagatggatgggtggatgaaaagatggatggatggatggatggatggatgaaaagatggatgggtggatgaaaagatggatggatggatggatggatggaaagattgatgggtggatgaaaagatgaatggatggatggatagatgaatggatggatggatagatggctagctgaaaagatggataggtgtgtgaaaagatggatggatggatggatggatggatggatggatggatggatggatggatgaaggaatgagtcaacaagtctacgaagcacaggcatagccaaaggaataattagctgtgtgttgccctccatggtgctgaaccaatatagccagttttgatcatggggtaggttaggtgtcatttttcttactcataaaaatttctattaaaaaaaattcagccgggctcagtggctcatgcctgtaattccaacactttggaaggccaaggcaagaggattacttgagctcaggagttcgagaccaacctgggcaacatagtctctacaaaaaatgaacaaaattaatggggcatggtggtgcatgcctgtggttccagctatttgggaggctgaggtgggaagattgcttgagccgtggaggttgaggctgcagtgaggtgtgaacacaccactgcactccagcctgagtagcagagtgagatctccatctcaaatttaaaaagaaaggaaaaaaaaaaactcacaacattcttaatttttattatatttcttgtgaaaattgtttttctgactttttaaaacactcttgcaggattcatcaagcaaagacataatcagtatttcacatgcctgatttaaaacacttttgctagttccgttatgtttccctgtcaattgcaaaatcagctttatctggatgtttgaacatttggggcagaaaagggtgtgcctgtggtgggtgatgtgctggtttccagtctctgggtttcatggcttggtatctgatcctgcagggaggcggacctcatcttccttctttccccgcccacagagacaactgcagagctacaaaggtaagaagccaagaggcggtgggcctggggccatccttagaagcaacttgggctcaggcagttgaggggaaaggtgaccaagagactaggaagagctggggtatgggaattcttcctgctactgctgcactgaggaatgaattactgcttaggttggcaaaggattttaacttcctctagcgtgtccagaccacatctggtccctgtggaaggaagcatccccagaagactcagaggaaggcaaacccttggggagaacataaagatactgttagactggcattactagatggtgaaaactctggaaaagcccttacaactgaaaaaagacagggagggcaattatggtacctacatcttagggttgttctgagaattaaatgagttactacacttaaggagtttagagcactgttggcatgcagtgggcagtcaaatgctggctattccagctgtgcatggattccagcttggccagtcttggatgggctgagaaaagggagctgcttttccctaaaagaccatcccaactgtgctctaccacactttgctctcctggctaagactcagagacagatgtatgtatgcccctgagcaatctctttcccttctctggatctcgattccttgcttgtataatgacctggtagtgtaggaccaatgttgctgggtgcggtggctcatgcctgtaatcctagcactttggaacgccaagcacgagaatctcttgattccaggtgttcaagaccagcctgggcaacatagcaagaccccatctctaaaaaaaaaaggcaggcgtggtggtgcacacctgtagtcccagctactcaagatgctgacgttgggaggatcgcttgagcctgggagcttgagccatgatcacaccactgtactccagcctgggtgacagagagggactctgtctcaaaaaatgacccactaggaccagtgtcactttcttttccctctaactgcttaaagctgtgatgctcagtaggatagccactagccccatatggctatttcaatttaaataaattaaaattttaatgctatttcaatttaaataaattaaaattttaatgctattttaatttaaataaattaaaattaagtaaaatgaaattttcagttcattagtcacattagctatatttcaactgctcagtggccataggtggctagtggctcccatagcaagtggtacagatgccaggacatttccatcattgcagaaagttctattaaacaggctggcatggtggctcatgtctgtaaccccagcactttgagaggctgagggggcaggatcgcttgaagctaggagttcaagaccagcctgggcaacaaagtgagacccccatctctacaaaaaaaaaaaaaaaatagctgggcatggtgattcactcctatagtaccagttactcaggaagccaaggtgggaggatcacttgagcccaggagtttgaggctgcagtgaactgggatagagccactgcactccagcttggggactgagtgggaccctgtctctaaaaaaaaaaaaatggttagcaccaatccaaaaagtctgtgaaacctggctcatgatgtcctagcttccctgcatcccctaacgctccctcagcccagtgggagagagtctgtggtttaccatagcctggactcactgcatacagctcatgctcctcgccttctgaaccacagacagcacatccacaaatggagaccatcacatcatcgacaatagcagcttctgtttactaaccttcgattttacacctatgctgggtacttggacatacattgtctcattcaatccttcaggtacctatgtgctagatgttgtcatccgttttagaaaagagaaaagggagccgactgcagtgatttgcccaaggccacatggctatacatggcagagccaaaatttgaataaaggttccatttgacctcaaacctgttgcccctcctgctctgctgaatcacatcttgagcatctgcaagcagtctcctttgttaccgactcactttgggttgtgcttcagggtcttcagcctctagaagccaaggaaagaggcttgatccaccaggccctagatgcctgagcccaggccaatgcttgatttgttcttgccagagctccagacctgcaggaaagtgacggccagaggaaaggggctcagagcagaagcttgacgctcaggtaccttggagggatctattgccttaggagagggatatgatatgggggaaagtccgaggcaagggagagcaggggcagggaggataaagggaaaagcagatgagggacagggaaaggattagccgggtgtggtgcccatcctggatagcccatcctggcttgaataaggagcatctgtcataataacaatagctgcaacttaatggaaccggctatctatatgccgggcattgcactagatgttttacatccattacctcactgtaattcctttagaatctctgtgaagtacacattattattcccctttgagggaggaggaaactgagtctcagacaggttaagtcccttgctcaagatcacccagctactaagaggtgtggctaggattagacccaggtctgtgggccccctgactcccccagcattggaagctggaggggccatggagtaggggctgtttgccctgagcccttctgtcccccactcctacccaaggctgcagaagtgtcagctccaggtccacgatgcggaggccctcatagccctgctccaggaaggccctcacctggaggaagtggagtgagtatcacgggaagccctggcgtaggagccaggaaaggaggttggagagggtgggcagggcctcgcctttgggtgggtggtgtgggggaggggcatgctgcctcatgaagaatttgggggaatcagatcattgtaacagctgctactattcagcacttgtcccgggtcaggtgctgtgctagggactgtacatgcctcctcgcattcactcctcacatctctgtgatgtaagcactgttactgtcctcattttatagaggaggaagttaagctgcagaaagataaacttgctcaaggccacacaggtaggaagagtctaggctagggttcaagcccagacagtctggctcgcagcctcatcctcataaccactgctacctctcttgctgagatctgccaagtagaaaccccaccacacctgggtctgccttccaaaccacagtccctcagggctccccccacccccttcatccttctcccagagtagagtgggataaccttctcttttcgggatggagaaattcccatggcgtccagcccctggctgaagccaataagagtagtgcttggggatggacggaggctctgtcacgaccctaggaggggcgcccctccaggaaacctccaagtgaacatgaaggcagatgatggaacgccaggatgtgttctgggtcgagtggccccacctcagggtaagacggataggggtgagggttgtcgtggtgatcacctcttgatcctggacctcgtcccattgggagaaccaggacagaattagaaggtggttttttaacaagctcacacacttctacctgcctcaccagcactgagcatgcccctccccgagtgccatcacctgcagaagcagccccatcacccgcctggttacgcagccacctcctagcccccttgcccttctcccacatttagtccctccagatggacctactggtagcgctcaaaactatcctcttttcctccacctttctagtccaacccaccctcatctcttacctggatgaccccctcgccttgccttccttgctggcttccctgctttcaccctggccacttccacctggcagagagtagatcacttttcactgatgcctgcccccttcactccttcccactgctcaggataaaacccacattctaaactcccaggtggtccagaaccctgcccccagcctcctaaaccccatctgaccccatccttccactcaatctccaatccagacacactggctctctttcaggtcctcatatgtgttatgccacagggcctttgaatgtactgcttctaccaccaggaacacccttcctccatctctcccccaaccttttacctactgaactcccagttatttcagcaagtagcttaagcaacaaataagccatccccgactcccagactaggtcagatgcccccataatcatgaagtttatcacaaaaagcaattatgtaacttgcagcataaaggaagagttgagggtggggccttgaaggcaggctgcctgggttcaaatccaggttctccctcgagcaagtgccttaactttactctgcacttaaccactctgcacttgagtttactcatcagtaaggtgaggataattacagtgcccacgtcatcggcactatgaggatgaaataggccaatagtcatagaagaacctaggatgttgccaggcatgtggtatggagtctgtcgatttcagttattatcaaggttcattcctgagagtgacactttgactaaagttagcaaaggaggagtaagtgatggggattgagggaggactccagccccacaatacagtgcattgggccccccgtctcagcctctcagggaaccagctggaagatgaaggctgtcggctgatggcagaggctgcatcccagctgcacatcgccaggaagctggagtgagttgtccaccccaccgctgggtaccagggaaggccctgtagagccccaggaggtccccgtgttcgtaatcagcagtaagggtgctgatccactgccacccctgcttcctcccaactccagcaaagtcaagatggtttgaccatgccttgccttcacctccggcatgagccactgtcttagtccaatcatctagcacccttacatgtgtaaaatgcgttcattatacatcagtggcttgcattccaattcatctttgtagctgccctggagcacggtggggtggggtgttgcactggggaggtgtcagggtgggtgggatgttgcactgtggaggtgtcatgctggggtgctagggtagggagtggtgtgttcctgtggggatacactgttggggtgaggggtggtgagatggaaaggtaggctattaggctgctgggtgtgctgtggtgttgcatggggtgagggtgatgtttgggtgggggtgtcttgggggtcttaggatcaagtgtgggtcgggtttggggagtgttgagattgggtagcagtggtttggggcctcagctttggatttcaatcttcgctctgtcacttagtagcattgtgaacctgggaaagtaattgaatgtctctgggcctcggtttcccctctgtaaaatgggatcacatgaaaccatatatgtacaaagccttttgtacagagtctggtatagtcagggctcagaaaatggtggttattttacagatgagaaaactgggggtcagagaggtgaaaacactgagttcttgctgtcaagctggacaactttattttccaaatgggatgggggtgtcatgcattttttggcttactcacacgcaccagaatcctttgagatcccctggcaagggacctaggacatccaggagtgacagccagcaagctgctgagccacagggaggggctagagctggctggggctgggtacctcagccacatgccaacggctgccttctcctgctctccacagcctcagtaacaacgggctttctgtggccggggtgcattgtgtgctgagggccgtgagtgcgtgctggaccctggcagagctgcacatcaggtgggagctccctcagaccacggtacccatccccccccccatcatgctctctctgaagcccttggaattccttctgggcccaggccttgggacgggcagaagatgctgctgctgtcccacccagaccccgttacagccggcacccctcttcctagctgctgtggatataggctgctcatggtttatacctctggagaactacccttggctgataagaaccagagacgcctggcagggtacaacccccactttcccctaacctagagtggccaatgacagaggcagagggcacaactctccagcccaaactctccagtgggacaaagctccctgggagactaggccaaggacttgctccgtttggcttccctcagtcccttactgtttctcctgagagcagaccgtcagttcatgatgtgcgcaactgacaagtgacatgcgaccccctaccccactcacagacccaggctctgccactagggaacccaatcctatttctgtaagtctcgccgttgagtatggggaggtgaggacagatgatgattaatgtcaactcagttcccactcggaggaaagcctcattctcaacccagtagggtggtccctgctttaaacacccctcaagggaggagagggaaaccgattcacccaaaaggtagattaggggaccttggttcactgtatatgatgattcaataaagggtccctagtgcattccaagcgatgccctgttcacttccaggaacttatactaaataaattatcacgattgtgcaaacacatttagctgtagggatgttcacctcagtattggttataataggaaaaaaaaagaaaatagctggaatgtttaaccgagggatattagttagactaagttacttccagagagaactcagtggaaccatagaaaaaaaaatgataatataggtgcagtttcaatatggaggggtgacggggagttattaagtaaacataaagaaatttctttagagacaggatcttgctctgttaccaaggctggagtacagtgacacaatcacagctcactgtaacctccaaatcctgggctcagcaatccatctctcttagtctcccaaagtgctgggattacagtcatgagtcactatgcctggcaattttttttatttttagtagagagagggtcttgctatattgaccaggctgttctcaaactcccgagctcatgtgatcctcctgccctggcctcccaaagagcaaggattataggtatgaaccactgcaccaggccaaacataaaaattttaactcattatcttaaaagattataaaagattataataaagcttttcaagatatgcaatggcagaaagaatggtataatctgggccaggtgctgtggctcatgctgtaaacccagcactttgggaggctgaggcagggggatcacctgaggtcaggagttcaagaccagcctggccaataggatgaaaccccgtctctactaaaaatacaaaaactagctgggcatggtggcgtgcacctgtaattccagctactcaggaggctgaggcaggagaatcgctggaacctgggaggcggaggttgcagtgagccgagatcatgccactgcactccagcctgggagacagagcaagactctgtctcaaattaaaaaaaaaaaaaaaaaaagagagagcatggtatatataatctgttcccatcaataatgatcaagtattaataattatttgtcatccctgcttctagcccttaaaaaactaatgtttaaaaagagaatctatagtttaatcccatgtttgtaaaacaaaaattattgcactagaaaatggaaggtttgaaggactcactccaaaggttaccaggggtaatccacacatactttgagcacagacagaacactgactagcagagagaggggtttcagtctggggctaaaagagagaacacagaatttgttttcttttaagacttgccaggaaatggggcttacttaggcaatagatacatttgtgaaatatctgtggtagaaagatttcagccctccaaaagctcagaggaagtcagaggggagtcagaggaagtggctgcagctggaggcagggggatggaacttgagaggtcctcccgggccaggggtaaaaagtgacaggccgggcacggtggctcacacctatcatcccagcactttgggaagcaaaggtgggaggatcacctgagcccagaagttcgagaccagagtagacaacatagactgtctctacatacttttttttttaattagctgggcctgatggcacaagcctgtaatcccagctactcaggaggctgaagtgggaggattgcttgagcccaggaggtggaggcttcagtgagccatgattgcaccactgcacaccagcttgggcaacagactgagaccttctctcaaaaagaaatagtaacagggagccaataacctctcgcttcctcacccctcttttgtcttcacagcctgcagcacaaaactgtgatcttcatgtttgcccaggagccagaggagcagaaggggccccaggagaggtagggcccgatttcaccccaactccatgctcagtcagggacattcccctctctaccctccacagctgggcagtgccagtcagtcaactgccagggtgacctggacaaattcacggaagagcgggaagtgagcaggcttggcaaaggatgcagccccaaagggggagggtccaaatccagaccacctccgcctctcatggtgcctgaaaggagccccagtgtgtaggatatagacagcaggccagggcaggagttgggtagccagagggggattccgggagactagagccctccagcttaaacccaggggattgcctggcctgtagctctggtcctggtcggaacttctgtatccctttcacacaaggacccattagggtcctggattgccccagcctagcgcatgggtagagactcagctctttgctcccggagcccacccacaatctcttctgtagagtctggactactgaaggctcgattccagctggggctgacatctctgaagcacagatgaggaggaggatgagattaatgataatagcagtcaaggtcaattgagtacttgccatgtatgcaccaagcaccaaactaaggcagttcacatacagtctcccattgagaggctgtgatttgtccagggtcacacaaccaggaagtggagaagccaaattggcaccaaggtctgattgactctaggtggaggatagggctcgatggtggaaggccaggctgaggatggattctggagatggcggacatggcctttgctcagcctggccttggtgatgtccctccagggctgcatttcttgacagcctcatgctccagatgccctctgagctgcctctgagctcccgaaggatgaggtacagtgatggcctccagccctgtgtgtgattccagccccctcccttcccctgctcagagcctgctcccaaacctgtgcccaggccccacatgctccctgaaggacacctgacctgctgtgtccaggggtcatggcctggcttccctacctcctacctcccctgcccagcccaccccagacagggctcacaaggcagccccgtcaaccaccttcccaagcccaggagaccccactccccttagctccctgacccccagcagctgaggggttgtggagactctgaaaagaggtgaaggggagcactgggctccttctgtcatgatcctggtgcctgggcctgggggctcccatcagcactcttccccccttctctcttggtctttgtctgtcctaatctccctctgtccctctgcctgtttctctcatttcttccctctctcatcgtgtatttctgttttatcagtttatttaactgttatttcagtcttatctgtcttcctctgatctgctctctctctctgaggtctctgtgccttggtttccttccatctgtgtctctgcccaccctctgcctatatgtgacatcctgtgggtgtcgtgtgtgttggtccctctttgtccgtctgtctaggtgccagatacatcccagtccctcctctcctgcaagcctcattctctgcctctgtgtctggggggtgggaaagcggctccttcccgcctctgttcagtggggcatgcagcactgtgtttttgtccctgggcaggctgacacattgtggcctccaagaaaagcacctagagcagctctgcaaggctctgggaggaagctgccacctcggtcacctccacctcgagtgagtggtttgtgtgttggaaggtgggtgggtggggccaattacagtgagttagtgttggtgtttgggtttggtttttaagatttagatcaactgttctttccctgctgaagtcagaaaccccttggagaatctggtgaaagttgtgactcttcctcccaagatacagatcccccatgtctgacacgctcggaggctcacccctggtccctcagaggtccacgaacctcagaataagaacctgggggagaccccagctgcccgtgccagatctgctgagatctggcctggcagcccagggctgtgtccagtttcaggaagttgagtaactggaatgcagggaccatgctgccagcaacccactccccacctgctaatgttctcccctcccttctccccacccccagcttctcaggcaatgctctgggggatgaaggtgcagcccggctggctcagctgctcccagggctgggagctctgcagtccttgaagtgagtagcccgctaggcagagcctctgaggctggggcagggggggagcattctctgtcccatccccctctttcctggggttattgtaaagattaaatcggaaaatgcatgaaaattgcccctaatacaatgtaagttctcggtgaaggctagctaatagatgattcttactcagagagtctgtgactcaataatcccacttctgattcaaggtttcacttctggaacctgtctccgcatctctgaacaggcttctgaggccaccctggggagggcaggtgtgggtgcgaagtatgactaacggctggcagttgttattctggccctggggtgccgggaggggctggggctgttagctggggtatggtcagggtagacagggagggtttgtaccagagaggacactcaagcagggtgcccagggctgccaaggatccctgagtacctggcagagagtgtgtaggaggaatccccaaagtttgcctgcaatggaccagagttcttgatccctaaatgcccttggtgcttttggctcacaaagcaccccctcctcccaggcacttctgggccaaagccagaggagcccaggggagaggtcacaggtcctatattccaggctgtctctgtgaacacgctttgctgtgtgattctgggcaagttacatcccctctccgagtccctggttcccagtcggtaaatacataaattgcaggcgtggcctctgttggtggctacgatctctgaaatgagtgctggggcctaaggaccccctgctcacaccctgtttttgtgcaatgctgggaaggaagggagttgccttggttcctgttcagggcctgcacctgggaaggaaggaaggtctaaccattgcaggcaaattacatgaagactggaggttttagtatgtcctcatgtgaccttcttattagtgtggactcgtgacctggtgctgtgagggtccacactcgccctaccagtgtccccgtgggaggggagtgtagcattaaatagtaaatagaaaacaataacaagttgacaggagaccctgaaagaaaggagacactttgttcctgctttctgcacaagagaccctgcattttcattttgtcctgggtaccacccctcccttatcaggtggagaaaaggaggcccagctccagccagaaagcactcctcagatccatcacagaccgagggacccactgggtgcccatctcagctctgtcaccaacatgtctcataaccttgggctagaccttgattctctctaggactctgtttccccatctccaccatgaggacttgcaaggggtgctctctgaccatcttgggttcagtgggttccgtcatctggaaccagggatccctcccccgccctgtgccctgaccacaaagaggatgtgtttgggtcctgagtgacctccattgtgccacccctgtgatctccagcctcagtgagaacggtttgtccctggatgccgtgttgggtttggttcggtgcttctccactctgcagtggctcttccgcttggacatcaggtgagcgtgcctctccgcccccagccctgcccctgtcccccatcccacaggtcatctgctcccacgtgggccccttgtccaccagtttcatgccaacctgtcatcctcagcaccttgggcagtaccagatctgcagagcatgtgatgggcgtccactgaatgaatgaatgatcaaatgaatgaataagtatggcctcacggatgctcaaatttctccaaattcaccattagagagttcattgactctgcctcactcgttctttggatagtccttagagatttttttttttaggattttttttttaattattatactttaagttctagggtacatgtgcacaacatacaggtttgttacatatgtatacatgtgccatgttggtatgctgcagagacttttaagaaaactgggggccaggcgcggtggctcacgcctgtaatcccagcattttgggaggccaaggtgggcggatcacgtgaggtcaggagtttgagaacagcctggccaacagggtgaaaccctgtctctgctaaaaataccaaaaaaaaaaaaaaaagtatctgggcgtggttgtgagcccttgtagtgccagccgctcaggagtcaggagaatcacttgaacccaggaggcgaaggttgcagtgagctgagatcgtgccactgcactccagcctgggcgacagagtgagactccatctcaaaaaaaaaaagaaaagaaaagaaaactgggagcttcctagttgccactggggactcagggacctgtcttaattgtgggagctgatgagaatataaaaggggaggcaccagccagccaagccaccccaggcactcagggcaccgcatccatgattttcaggggaggtctgcttccctttcccttccctaaggacccccaagaatgggaggtgccacagcagatggaccaggctcagttacttaactgctgcgagctcagagcaggtcccagagcctctccaggcctcagtttcctcatctgtaaaatggagataagaataattactggcctggcacagtggctcaagcctgtaatcccagcactttgggaggccaagacaggaggaggaggatcacctgagcctaggagtttgagaccagcctggacaacatggtgagacccccccatctctacagaaactttaaaaattagccaagcgtgatggcatgcacctacttgggaggctgaggtgggaggattgcttagactcaggagatcgaggctacagtgagttgtgatcacaccattgcactccagcctgggcaacagagcaagactctgtctcaaagaaaaaaaaatgtcaggcacaatggctcacatctgtaattccagcactttgggaggctaaggcaggaggatcgtttgagccatggagtttgagaccagcctgctcaacatggcaaaaccccatctctacaaaaaatacaaaaattagacagtcatggtggggcgttcctgtagtcccagctacttgggaggctgaggcagtaggatcagttgagcccggggaaggttgaggctgcagtgagccatgactgcaccactgcacaccagcctgggcgacagagcaagaccctttcttcgaaacaacaacaaagaagaatttcttacctcattgtttattgtgagaatcaaatgagaaatgtcgatggtgtgctttgcatgtgacttgatacatgtaattgttgcttaatctattccttgtttgctaagaaagcaggccaccccaggccctccttgccctgaccagtctgggttcttgccactgccagggaagttggtctttgaccattttcaaactgctgcttcctctctgcttccagctttgaaagccaacacatcctcctgagaggggacaagacaagcaggtgaggagggaacgctcggggtgggggagtcccctcccgctctggtccccgtctgttggaggtccccccacccccagacccatgctgaccactcagctctcagttaaaccacccaagtccggcacactaggtttaatcaccacttcagtaaccaccgccccccccataaattgtcagtaatcaactgccctgttttccccttggaaggaggcaatgcagatgggaggaagggagggatatggttgggagaggtcccagagcagggcaggtgcccgcagattgctgctgtgtgggaggagacaggagaacatttgtgcttctgcgtttcggggaattttgtagacccaccgctccatacatgtcactgccctttcacgctctgaaggcaggggccgtgggtgctctgaaaaaacattttccccgtcttcgcagtaaacaaccaatactagtttagctcttcatgatgttcccggctgccctctagtgggaccaggcctcttggcctcacttgggagcagtggcagcggacagggtgggcccatgtgcagctggctgggtggagagagtcacagctagtgtgtcaagaaaaggcactgccgtacagatgggctgtcaggagtcaggggtggctcaagcctgggtggtcttgcttcccaggataggatctctgtttctggggaacccccgggttcttgaggcccaaagaactgacgtacagggaggcagaagtcatgtgatgccaagcagtggtcagagaggctctgtcttgggtcctcctgcctgctcacctggacaggaacaagctgctggcttttctaactcaggcttcccttccctgagcctcagtttccccatctgaacaatgagggactgagctaggatctagtgactgcattgtctctgagatgccttccagccctgactttccaagtctgggagtccaatgtgggtgatctgaactttcctttctaaacgatccccctcctaggggtatatgggctgggctgggagtccgagggggtgatctgaactttcctttctaaatgatccccctcctagggatatgtgggccactggatctttgccagacttcccagctgcagccaagttcttagggttccgtcagcgctgcatccccaggagcctctggtactgtcccagcccttcttgtttgggggtaaccataatagggatgaggcgtcagagggggcagagctggcagggggctagggctggggattgggatagagggaagagagggagtttaagagaaaaggaaaagaaagaggcgtgggtgtgaggggtgctgggagttggggagctctggcccctgacgggcagctcagctggcccatgccccgcattctccttggagagaagattccacatttctgtgaagcaaacagagcagctcagccactccctgcctggggtctccatctgctctgggggacacccactttccagaaagaaaggggttggcctgtctccccactaatacactccccatctgcaagctctgccatgagaggctgtgagaccctgacttggccccacctctctctaggcctccagggaagtggaggcaagtgaggccctgggaaggacatttcaatttcactgttagccccagggcaatggggagccacgggggtaacagggagaggcctggtcagatgtgcagtgttaaaatgtgagacacttgtggggcagagagggattaaagggaggcaagagtggaagcccagagggtgttaaatggtcaaggtgagtgaggatggtggcctgggctctggagggggcggtggggaggacttggagagtcactgacaagggcagctgggaactcagggtcctgcactgtcactgtcagggcaggaggattgggggctgcaggggagactcgagagggaagcgagtgccccacaggggaaggggcctgtggcctcccacttagagtgagggatgctgggagaaggatagagcccctggggctagccagggaccctgggctttctctgattccctgccctgcccattgcccctttgcagcctcagtgagtgtcctctggagcccccaagcctcacccgcctctgtgccactctgaaggactgcccgggacccctggaactgcagtaagtaacgaggacacagccccagagggcaccatgtggggatctgcccagtgacctgggagggggcttcttggttagaagacaggtgagtctttctcgatttcttcccaccagccctgccccatgagagtcccctggcctttggtagaaacttggctgtctctcggcagcccccagccttaggcagcgcatgtctcccactgggagatgctgtgctggactggggaagccttcacctgcaccatccactcaactcagggcacctgggagccctgtccacctccaaccccacccctggagcctcaccagggcacccacttgaacctgcctgcatggctggagcgtagcacttctgaaagcccttcctcaaggcacccccactctccttggggttaccacctcactcgccccagaacatctgggtctgtaaccagagactggacctggaatcaggactcttggctcaaaagggatttaactccccgggcctcagcttcttcatctgcacagtggatggtcagcctttccttttattgtcattgtggtgattctattatagtaattaccttaaaataaagaaatccaagacaaaacctgcctcacctaaacaacctcttctctcatcaaatccatgttgtcatgtgtccacaggactgtctactccttgcctatttgcatattcagtttctacctgtttgcagtcataaactagtttcatgcactgtgttttcatagcatctgtgttttccattttgcttcagtcttttttcttgctttctagcccccatctcaaatgcccttccagcccttccaaccagataatccggtttgaccccctggagtgtggccttcccatgtccttctccaggttcaaacatataaccacaaaaccattatcagacctacactattttttttttctgagacagagttttgctcttgttgcccaggctggagtgcaatggcgtgatctcggcttgctgccacctctgcctcctgggttcaagcaattctcctgcctcagcctcctgagtagctgggattacaggcgcccgccatcatgcctggctaatttttgtatttttagtagaggcagggtttcaccatgttggccaggctggtctcgaactcctgacctcaagtgatccaccttcctcagcctcccaaagtgttgggattacaggcttgagccactgcacctggcccagacctaccctattaatggcaattccttaaagtcaaccaatggtcagtggtccctgattgtctcttacctgttttcacagagtatatactgatgccttttaatactaaattgccacagtacgggacgagctgcaagttactccaccacacccttctagagtctagatcaagggtgtccaatcttttggcttccctgggccacattggaagaagaaaaagaattgtcttgggccacacataaaatacactaacactagcgatagctgatgtgctaaaaaaaaaaaacaaaactccaaagaaaaatctcatagtgttttaagaaagtttacgaatttttgttaggccgtattcaaagccatcctaggctgcatgcagcaggccatgtggcttggacaacttggtctagattgaaatccaaactgcttctaggtgttgtgttttgttttgtgtagcactgcagtcagtgctacaaaaagcactcttacgtgatttgactgttaagtacctattgtataccatgcactgggccagatcctgggaacacaaggagactgggatgcgggctctgctggccaaggcaaatcatctgcagaggaagcttaatataaaaagcccactggcggcccggcacggtgactcacgcctataatcccagcactttgggaggccgaggtggctggatcatgaggtcaggagttcgagactagcctggccaacatagtgaaaccccatctctactaaaaatacaaaaattagccaggcatggtggtgcacccctgtaatcccagctactctggaggcaggcaggagacttgcttgaacccgggaggcagagattgtggtgagccaagactgcgccactgtcctccagcctgggcaacagagcaagactctgtctcaaataaataaataaataaataaataaataaataaataaagcccactggcagcactgggcggtctgagcacaggtgggagtttcaggtccccctccattacctgtggttggggaaagtgcaatagtgaatatgaaagcactttgtcaactgtagagtactgtgatcacttgcaggattattgctataaatagtcatcaaggtactcaatgctgaagtccagtgattccccggggttccaccggggaagccagggaagatagattgtggggctccatcccccctccctgaattcaagcactgcaggtctactttgcctgtgtacacatgggcataccatgtgggatgtggtaaagagtaaagattccattgctttaaaaaaaaaaaaaaggagggtgtaatcacctcctttgccaaccagagcccatggtgtatttgggggtctggtgggacaccatacgggatgtgtttctggaaagaccaccctcaataaaggccccagtcctgactgtgcctcaggggcccatgcccagtccctggggcagaaagggtagagttgggcctccagcctgggccctggcagaggctccaacatgaggctgctcctcccgccctaccctgccccccagctcactgagccagttgatgtagggcccctgtactccatgcctcccctccaaacagccagaggagaaagcagcagagatgggccaggcccttggaggccccggagaggggagagggcagcctgcagaggatgaaggaacagaaagagaggaagggggaggtggagaaggcagaaggagaacatagtagaggtctgcgggggttgggaagtggctccaggccccccaggaaggggctgtaggtaaaccccagggaactcagtgtcttgagttgtcctggtcctccatctagagcagagacagcaaggcaggtatctggagtttctcctaaatgcactgggttctgacgaattatctgaacaatgatgagctggttggtctggtgttaatgggcaactagagacccaagccagtccctgtctccttcgctgacctgttgtatgctgaatttccactgtcatatccactcctctgggttaaggcagcattgttttcttttcttttttatttttttgagatagagactcgctctgtcacccaggctggagtgcagtggtacgatcttggctcactgcaacctctgcctcccaggttcaagtgattcccatgcctcagcctcctgagtagctattactacaggtgtgcaccaccacgcctggctaatttttttttcgttttttgtagtagaggtggaatttcaccatgttgcccaggctggtcccagactcctgacctcagatgatccacccacctcagcctcccaaagtgctgcgattacaggcatgagccaccatgcccagctgcattcttttcttaacaaacatgttttgcggaacactaaccttcatggcccttaaaaattaattctgctagtccatttagtttggggaaaagtctgctgtagctccttggaaattcataatgcacagcagcctatcgcagcctcagagaagccctgcagcaaacaaaaccatttaatttggcttaaccccgtatttcccaaacttaaaagaccttcctcttcttccagcctcacggataacccatggacccagtgctgggagggaatgtttcaggtgaccctggttaggtcccatctccagaaggctctggctatgaggccgtgctccctgctttcctggaaggtttcccccacctcatccacctgctttgtttcacagattgtcctgtgagttcctgagtgaccagagcctggagactctactggactgcttacctcaactccctcagctgagcctgctgcagtaagacgagagtttttcctatttcccggttccttgtgctcgtgtttctaaggctcctccatggcaaagctgtacctgccctctaacccctcaaccccccgcctttaccccctccaaccccctctacccgctccattctttccttaggttgttttatcattttacctggcacaactggggactccaatctgcttccagctccaccctaatactttgtcaacctcagggggcgtcgtttgcctcctctgcgtctcagtttcctcatctgacaaatgggattaatattccccgcccattcccccagagttgggactcaaataagttattctaaaatcaccttaagaaatggaagatctgtgacaaatgagctgtccaacttctccccacccacggagggtcacccactcgtagaaaggggctgtacagatgtaggtcctgtacttatcacatgctgctttttaaaggtcaccgtcaaactcgcaaaaagggaatttaagcagaattcccccaaagtattaaaactattttctaatttcagctcagactggttagaattttaaaagtatttaggccatgtgtggtggctcatgcctgtaatcccggcactttgggaggccgaggcgggcagatcacctgaggtcaggagtttgagaccagcctggccaatgtggtgaaaccccgtctctactaaaaatacaaaaattagcccggtgtggtggtgggtgcctgtaattccagctacttgggaggctgaggcaggagaattgcttgaacttgggaggcggaggttgcagtgagccgagatcgcgccattgcactccagcttgggcgacaagagtgaaactccatctcagaaaaaaaaaaagaaaaaaagaaaaagaaagaattttagaaggatttactttaaacagtcttctagtggtgggaggcggggtgggaagcagctgcagctaagatgaaaaaatacagcaggaaagtaaatcataatgttaataacatcggtgcaaaggctggggctctctgggatgtctaagatggctcgcatcacctccaggatctcgcttatgcttgggttttatctgggagggagggaggagacgtgacaacattccaggggcaagtacagcccagctcacagcaccccatggcaccctgtaatagtcccaccctgcccggagataatgagtcagaaaggactcctttggacataaaaggtggcaggttaaaattgaacaggttggaaacctcagaccggagaggaacttctctttgcctaaatcacacagcttcacccctgactcctcgtccgcctttggagtggcgtggccagcctgaccccttgccagggtttaaactttgtagtactcaacgtgtagtgcttgtggccctactgtgggccaggcattgtgtgacgacacagcagaaaaagttgaccatgtccttatcttcttggagctcctcttacaatagtgggagctgaaaaataagtaaagtaaaatcaaataagatgaacttagccagtgataagagaattttctcgggatgtggtgaagagtggctggagaggtgatttagatgtggcagaagccatcagggaacatctctgaggagggatgctgagctgggacctaaaggaagagagagagctcgccttgtgaagagcagggaactgcattccaggcagagggaacggcatgtgtgaggccctgaggcatgattaagcttggtgggctccaggaacagcgcggaaccgagacagccagagcacagtgactggcagggacagtcctaggagaggaggaagagagagatgggctcgggttgggttgcatggggcctggcacccatggggagagtttagacttttgttcctgggaacatgaaagggagaggaataatttgggttttctttctttcttttttgtgggggagggtctcgctctgtcacacaggctggagtgcaatggcgcaatctcggctcactgcaacctccgcctcccaggttcaggcaattcttgtgcctcagcctcccaagtagctgggattacaggcgtgcaccatcatgcccagctaatttttgtatttttagtagagacagagtttaaccatgttgaccatgctggtctcaaactcccgacctcaagtgatccgcccgcctcggcttcccaaagtactgagattacaggcaggagccactgcacccgttcctcatttgggttttcaaaagttcagactgagtgctgggtagagaatggattgggagatacgagtggaaatgagagtgggaagagatgtgtgcagcagggtgaagggtgctgggggctgatcactgctggggtgggatagaagttggtagactcagggtggatcttgagagtggaatttacagacaagctgatagggggattactggatgaggcaaatggaggtgctgaggctgcctctgagggcagagtggacccatctcactttctctaaggcagtggtttccaactgggggtgattttcacccttgggagtcatttggaaatatctggagatatttttggtggtcatgactgcgggtgaggggtgctgctactggcatcgaatgaatagagatctgggatgctgctgaacatcctatagggcacaggagagcccacaacaaagaattattggacctcacatctcaatagtgctaaggtttaaaaactgtgtctgaagggcctgaagcttcccactctctgtgagcaaggactcgcctgtgaaatctgtgcttgcaggtaaaaacaatagtaataataacagcaagcacaggtcccatgcccggcagtgcacctgcatgatgtaattaaatcctcatatacctcgagagtcatacatgacgagtcttgatttccagataaggaaactgaagctcagagaggtgaagtcacttctccaaggtcacacagccaataagcagaactgggactcaaatccaaatctgcctgtccctcagccctatttgtgcctcttgatcccctgcctgcttccctattgccttgctgagctgctagccctccccaccctccctttccttaccctccaggctagccaggttccttgtccactcatcttgccggatctaccccctttccttttcaggctgagccagacgggactgtccccgaaaagccccttcctgctggccaacaccttaagcctgtgtccacgggttaaaaaggtggatctcaggtgggcattcccctgggacagccaggactcgtcctgaagggttgtgcctggagtctggtgggtatgagggggtaggatgaagacagtaggacccaactagaggctgggcttccggaggaggggtgctggccccgtgggggcatcctgaggctgtggccacagctgtctgacccaggtcctgtctgatccaggtccctgcaccatgcaactttgcacttcagatccaacgaggaggaggaaggcgtgtgctgtgggtaagcccccttgaaccatgcctaggcagctagttgatgttggggaccagtagatctgcctcctgggtggccagagcagtatgcagactgcctaccacaaaacattcccctggaacaaccctgcagagggacttgtttcacccagcatgaagaaacacaggtccgggtgggatctactgtgggggtgggagcagtggattctggacacttccagagggtccaagcttgagtggagacccacctggagcccagaggctgtgccctgggctagccaggccggagggggtctcagtggccaaacgccccatcccctgcttgtcccctttacctccgtccagcaggttcacaggctgcagcctcagccaggagcacgtagagtcactctgctggttgctgagcaagtgtaaagacctcagccaggtggagtaagttgagggaggaggaggaaggagaggagcatggacgcatgcctgaggggcactgaagggggtatgagggtccgtgtgtgcacatacactcatgtgtgcctgcctacacctctcaggaccagctgtcagggatgcctgggtcacatacccaaagcttccctgaatcaattttctctctcccgcccccactctcgccatggtggagctagttccatggtgtgccctctgacttgggcagccctcagcctcaagtatgtgcaagctctgctggcagatgggggctaaaacgcaggattcattgttggcccagcaggtggttaaaagtaccggatgactctgcctgaggagggacgcagagccagccagggtggggtcttgcagtctcttgtattgttgagatgtggtatctgcgtggcctgtcttggatattcaaatagtcagcccctgcatgggtggaataataatagctaacagctactgagcactttctccactgttctaagtgcttgacatgttctttttatgtttcccatatccctggatactagtattgttctcattttacagatgagggaactgagacacagagggtgtaagaacttgcccaaggtcacacagctagtaaaatgcagagtccctgctcagacgcattgggaatccagcctaggaccagtgggaaatagagagagcagtccgccaaaaatgccacacaattttcatttctgttgtgatgtggcagagaagaaaaatgtgactgataaaatcatggatttcttttttttttaagacctggggtctcactctgttgcccaggctggagtgcagtggtgcaatgataggtcactgcagcctccaactcctgggctcaagcgatcctcccacctcagcctctggagtagctgggactacaggcacacaccaacatgcctggctaatagtttagttttgtaagagatgaagtctcaccatgttccccaggttggtctcaaacttctgagctcaggtgatcctcagcctcccaggttgctgagattacaggcatgagccgctgtgcttggaatgtattttaaacagatatgaataagaaatatgtctttgagttttttgtttttcattatagagggaaatttttcttttctttctttctttttttttagatggagtctttctctgctgcccaggctggaatgcagtggcgcaatttcggctcactgcaacttccgcctcccaggttcaagcaattctcctgcctcagcctcccaaggagctgagattacaggcatgagccaccatgcctggctaattttggtatttttagtagagacggggtttcaccatgttggccaggctggtcttgaactcctgacctcaggcgatccgcctgcctcgccctcccaaagtgctgggattacagccttgagccaccgcacccagccaatttttcttattttaaagactattttattaagtggcttcataagacagaccaatttttaaatgacgtttctcaggaaaagatgaaattaacaaacatcaaaaatgtcacagacctaggaggaaaatcagatgttccgggacacactggttatattatttctgaaactgtagttaaaactagctgggcgtggtggctcacgcctgtaatcccagcactttgggaggccaaagcgggtggatcacctgaggtcaggagtttgagaccagcctgatcaacatggtgaaaacccgtctctactaaaaatacaaaaataattagccaggcatagtggcacatgcctgtaatcccagctacttgggaggctgaggcaggagaatctcttgaacctgggagacagaggtcgcagtgagccaagatcgtgccattgcactccagcctgggcaacagagcaagactccatctcaaaataaataaataaataaaaccacagaatgctgcaatgaagggaagtaagaaacttcaggtgaggtttccaatattgatattgcattcccagattaaaagaagaaatctatgggtttaatgcatcctgcaaacatttttttttcctgaatttcctctcattcaaaaactgtggatcccaaatgatgccggccaagggcgtggtgaaggcaaattggtttttctttaacccttgaaagcctgctggaggcacctgagctatgagtggtcacccgatatggaagaggaccaagaggatgggtttactgtggtgctggggaggggatagtagcagagaacgtaggagttgctggtcattctagtggtgatggaagggatggtgatggtggtactgggcttggtggtgtagaattgtggtgataatgaaagtggtggtggtgatggtggtaatactggtggtggtgacattggtggtggtggtgatggtggtgatactggtgatggtggtgatggtggtggcgctggtgaccctgacatggggtccagtagcagtgacagtggatgcaggctcctggtgactgaggagcatctcaggctgaggaggcacctctgatccccgccactgctccttaccccctacagtctctcagcaaacctgctgggcgacagcggactcagatgccttctggaatgtctgccgcaggtgcccatctccggtttgcttgagtaagtggaaagcagcataaaggacagatagcaaggaggaaggctcccctaggccaaaagcatgatgggggctccttctgagggcatcccccagagcaccagaggacaaggactgtggagggcaaggggcaattcttcccttgccttcactcccctggccttgggtcctttcctctgtccctcacacccaccatgggcagatcctccaccaaacacccaagagaggctgtgattcgtggcagggtgacacacccctacagccaaactgacctggggacagggaagcaacattccatccccaaccagctgatgcgggattgcagctgcctggctcctggtccatcccgtccctgaaattcttctgacccaatctgtggaacataaatgtggagatgtccctgtggcaggcaaggggccttaggaagtcatccacatggttgccccatctctcccgtgacctgctggagtgacagccagctccaggacaccacttgttgctaggcaactgagcttcgtgctcgggagtccttgacccatgcggggctagagctgccagcctggccttgccagtgcccagaccccagaccacaggggcagcgggcagggtgagtgcagcgctcaaggactcagggtctggtgccagttctgcctgtgtggggatggtatccttctgggcctcagtgtgtccatctggagaatagatgcttagacatggaggcttctcttcttggaaatgacagctggaagggagatggagggggctgggcagggctccaaggaggtcctgccctcactcccattctcatctccatttcccttctagtctgagtcacaacagcatttctcaggaaagtgccctgtacctgctggagacactgccctcctgcccacgtgtccgggaggcctcagtgaagtaaggggatgttggtccccgaaaagcccctttctgctggccaacaggtgcccctggctgatgatgggagaagcaaggcacccacactttgtggccttccatctgggtggcttggagcaacctctgcctttctctgaatctcagggtttcctgggcatgggatcataatttctatcccctgatgcccgggtgccatggggaccatggaggccatggggtgggaaggccaggtattgccatgctcacagaatgagtttgggggtctcctctggttctgaggcctccatcctcccttgtccttgtgggtgcagccccgcttccctctctgtgccctgtgggtgccctaggtgcctaggaagctggcatgtctgggcaccgtgcttccccaggcccttctctctgcagcctgggctctgagcagagcttccggattcacttctccagagaggaccaggctgggaagacactcaggtaatccctgcagggtgatgggacaggggacagagaggggagaggaggctgaccctatggcggcctccatggccccctcttccctgggccctctcctcctttagagagcagcttcaagctcactgcctgggtctgttcctccagatctgcccccgatgccctggtaactccagtctcagccagggccttggcattgaacttgtgcctcttagcccaccatcctaagcccaactcagcccaacattctcttccttgccatgtcctgactacaggccttgaggcttctgagtgtcacggttaaagattttgaagccaactgaaaataaatccctgatctgccacttaccagctatgtggccctggacaagtaaaatggggataataacacaacctaccccttagggttattgtgaggattaaatgagttaataagtataaagtgccaggaaaaggtctggctcatgggagtgctgtcagcagttattgtaactgttattattattattattattattattattattatcattatcattacccctggtagccctgactcactgccacggccagttcctttacatgtcttacttcagctgtgaacagggcctccaaactgatccctgcatcttatcaggcctcctcccctccattcactccacagcccccagagggatcttcacaacacacatctgacagtgcccctctgctactctgtgcccctcagtggctccccattaaccccagggtgaagttcaaagtccctagcatcttctccctcacagtctgatccaactgtcaccttccaccatgttccttcccacctcccccacaccacacacacgccctacacaccaacccatataccacagatacaccaagcacacccaaacacaccacacagcacgcagcacacacaacacacgcacaccacacagcacacacaacacacaaacgcaccacataccatacacataccacatacacacacatacaccacacacaccacacaatacacacaccccacaaaaacaaaccccccacatacatacctggcacattacaaatacagcacacacaccacataatacctacaaataccacatacacaacacacacacacacacacagttcagccataaccttcactatttgctcctagatcaagccctgcctgaagattctctgcctctgctcacaccgcactcagctcaacattctcttccttgccttttctgagataaaattctcccaatcctttaacacccagctcaaacatcagcccctcctggaagtatcccagcagccctgcctcatcagagtgaactgccccgaggttcactgggccctttcacttggctgggcccgtctgctggccacccagggctgagatgcctggacagcagagccccacggagaatcccaggcacacctccctccccagggagctcagccagtgctggtccgggagagtaaggcagtggttaagagcttggggtctgcagtcagactgacctggatggaaaccagattctgcccttctttcttatctgctgtgtgtccttgggttagtcagtttccccacctctaattggtgctatgagaattaaaggagaccctgcgggtaaggcaggaagtcccatgcacccagaggctggcacagtgcctgacctagagtcagcctccctaaataacttactcctaatactttcttacagggggtgtgggaggttcctccccaaagagacaggaagctcccagagcaggagctgcatatttggcctctcaggccctgctccaggcctttgccctcagaggtgggatgctcccccaataggccctcagggaggctgagatgaagctgagcagcagtgcccacaggcctcacccaggctctgccctggctttctgccctcaggctaagtgagtgcagcttccggccagagcacgtgtccaggctggccaccggcttgagcaagtccctgcagctgacggagctcacgtgagtgacccacccagcccgtgaggacagcagaggggtgggggcaccctgccagagccacctcagtgactgacctctgtctccaggctgacccagtgctgcctgggccagaagcagctggccatcctcctgagcttggtggggcgacccgcagggctgttcagcctcaggtacctcctcccccgctgcctccgggaggggccatggcatgaatgggagcaggggtgggcactggagtaagaggcccccaggatcatggccccagtcatttcctgtacccacaaccctgccatctggaccctgagcaaaccctgtccatctgtcccagagactccacaaggcacacagagaaactgtccttccccacactggaggcctgtgctttgggatttaagaaaaaaagaaagaaagaaagaaagaaggtttcagaggatactgaactgaggacaaaaataaactgaaacgaagttcttgtctgtctgttcactatgatcattttaaaacactcagaaaaagaagataccgaagtagaaagaataattttttaaaactcctattcccagaacctaggtttgacagttgttcatactttttttatatttgcttctatttttatttttatttcagctgaagcggtttcaagtaagttatagacctcataatccatcactcctaaatatttcaccgtgaagctccaaaaaataaggacatttttttcagtaatcacagttccatcaggacacctaagaaactcagttagcgattccttagtgtcgggtactacctagtctaatctaaaatgtccccattgtcccccagataagacagctggcttttgggatccaggatctgtcacatctggtctgcatttgcacgggatggcgatggtcttctgactcttctaacctgcggcatcactgcccccatcccctcaccacagctttctgtttcatgtcagtgtctgttgacaaaatcagcaactgtgtgtactgcagactgtcctgctcctgactctggtggctttctcatgatgtcatggcacgtgttcctctaaccccgactttcctggaaactggacgttagatcaaaaggctccatgacattcagtttcatgtttgtgcccaaaaaacttacgtcaccgacagagctgtgcacttctcattgcagcctgtgacaaggcacctaagaactgactgttccccaaaataacctgtaaaaattattataaaatacacataacaaaatttgccatcttaatcatttctaagtgtaccattcaggagtgttaagtacatccacttttttgtacggccaatctccggaactcttttcctcttgcaaaactgaatctctatccccattaaacaacaccccatttcccccctaccccagcccctggcaaccaccattctgctttctgtctctatgaattggactgctctaaatagtttatatgagtggagtcatttgtatttgtctgtatttgtctttttgtgactggctcatttcattgggcataatgtcctctggttcattcatgttgcagcgtgtgtcactgtgtcagactttccttcctttttttttttttttttttttttgagacagagtctcactcttgtcacctgggctggagtgcactggctcgatctcagctcactgcaccctccacctcttgggttcaagcgattctcctgcctcagcctccggagtagctgggattacaggcgcccgccaccacacccagctaatttttttttgtatttttgtagagacagggtttcaccatgttggcgaggctggtctcgaactcctgacctcagatgatctgcccgtttcggccttccaaagtgctgggattacaggcatgagccaccacacccagccctttccttttttaaggctgcataatattccattgtgtggatggaccacattttgtgtatccacttatccatcaattgacacttgggttgtccattcaagtgcccaattgacagtccctgctttctttttttaaatattattttatttcaaaaacaatagagatgaggtctcactgttttgcccaggatgatcttgatctcctgagctcaagtgatcctcccacctcagcctcccaaagtgctaggcgtgagccaccatgcccagccagaaagtcccagctttcaattattttggttatatatccagaattgctagagcacccaaaataactttttttttttgagacggagtctcgctctgttgcccaggttggagtgcagtggtgcgatctcggctcactgcaagctccgcctcctgggttcacgccattctcctgcctcagcctccagagtagctgggactacaggtgcccgccaccacgcctgactaatgttttgtatttttagtagagacggggtttcaccatgttagccaggatggtctcgatctcctgacctcgtgatccccccacctcagcctcccaaagtgctgggattacaggtgtgagccactgcacccagccaaaataacattttcaaataaaacttttcttagtctaaaaataatattggttgggggaagtggcacacgcctgtaatcccaacactttgggaggctgaggtgggcagattgtttgagctcaggcgttcaagaccagcctggacaacatggcaaaaccccatatctacaaaaaataaaaataaaaaaataatatttaatcattgttgaaatgtgcagaaaatccagaaatacataaagaaaatagtgctttaaaaattcagcataactttaaagcagtaatatttgacttaattctcttttttcctactttcaaattaatgcacatgcattgtagaaagtttagaaaatatagaaaattaaagaagacataaaataaaaatcactcatgagaattctatcatcttaaacaaccaccatgaacatttaatatattttcctatgttttccacacatctctctccctgtttctttccacactttttttctccaaatactttcctttttttgaaatgcaaaattgggatcatgttttatatacagtttggtttccttacctttgtgatgtaacattatgtgaatcttttcttaaatctaaaaatatcagtggcccagtgcagtggctcacgcctgtaatcccagcactttgggaggccgaggcaggtggatcacttgaggtcaggagttcaagaccagcctgaccaacatggtgaaaccccatctctactaaaaatacaaaaattagccaggcgtggtggcgcatgcctgtaatcccagctacttgggaggctgaggcaggagaatcgcttgaacccaggaggcagaggttgcagtgatctgagatcatgccattgcactccagtctgggcaacaagagcaaaactctgtctcaaaaataaaataagataagataaaaaaataaaatataaaaatatcatttaaaaaataatattttctgtttggattgtcacaacaatagttgttggaataagggtgatgttaatttccttttttagattgatgcctacttgtataattttatagttttaaaatgagcaaaaaaaactcaaaaagcctctaggtcccccccttgacactcctcccccggccccgtcatgtgtgctgattgtctgctgctcaccttgggggggccttatctgtgtccccttctgtgacagggtgcaggagccgtgggcggacagagccagggttctctccctgttagaagtctgcgcccaggcctcaggcagtgtcactgaaatcaggtgagtccagagaagaggcccctttggaattcttcatctttcataagcattgggacttttccttgaccttccctcatcctgtggggtaatagctgtgtcaccagctagttttccatgtccccagggtagcaggagctcctggggcatatgtgaggggctacacatttgttgggactagtgcagtagtcaagccacagtgtcagaggaagacatccccagaatcaaaacaaagggctattggatccaggcagacatggctgggagtccacgctggttgcttggaagtggccccccagatgcagtaacacacattatggctcttcaaccagaaataacacaatgacacacagagtagcttatagcaaaggttttagcatcccactcagctatgttcagatcccaactcagtcacttactggttggagcccattactgtgtctctctgacctcaacctcctgctcttaaaagagtctaattacggccctttgcagggctgggaggattacaagaactggagcctgtaaagatgtctgctgtactgtcaccagccacacagcctgccctgcttcttccttctctcctccaggagtgagcaaggggatgctctggggactttataatctcccatagccctctccccataagcaccccatgaacataacattcaagtgaaggcagtgagcttagagcgcaaatgcagactccagacacatcccctaccccacccttccaccacactgtggtccttgtgcccctccctcagaaaattctggaactgcccttggatccctctaatggctttctgtcatggtctgaaaaggcttatcaacttattaactttaaattgttgaaaagggccaggcgcggtggctcacgcctgtaaccccagcactttgggaggccgaggcaggaggatcactgaagcccagagttcaaggctgcagtgagctatgatcgtgcccaccactgcacttcagcctgggctacagagcaagaccctgtctctttaaaaaaaaaaaaaaagaaagagaaaaattgttgaaaaggcactacttggggtattgtgtgtgactcacggaagcacctactttccagtcctaagctggtccctggcaggggagaaggggacccaggcaaagtgagagttcagagttggagccgggcagcccaggtgccagctaggccctccggggaaggctgcccgacctcacgttggttactgctcactcctcagcatctccgagacccagcagcagctctgtgtccagctggaatttcctcgccaggaagagaatccagaagctgtggcactcaggtgggacccagcaccagggaccccaaggcaggggctggtgttggggagggggcagggctgcttctgaccaatattcaccaccctgcccagagaccttaggggttcgaagtctttacacaggctacagaggtctgaccaacccacttctgaggcgtttcagccccactccaggccccagtctcagctccagtcacccccatgaactttcagttccccgaacaccatcttgcttagaccttagggcatttgcacaggctgtgctctctgcccagaatgttctcttcacgcctacctgcttcacctgcctaactcctcctcatccctcaggtctcagcttaaatgccaccacctcagggaggccccctggaccccaaggcttagtcaaacacttccattatccactcttatagatccctggattcacagcacctctaaatccatatggcacagtttgggaaattaaaatgtcacccttttgagtggatgcagccctgcatgtgtacattctgggaaatagagcatggtaggatctcagcctcacctcacctcctcggctgtgtgtccttgtgcggtgaacaacctgcacaaccataccagctgccccatctggactcctgcttcctagcacttctcataagtgaatagcaaactgtaggacttcatttgatcagcatttatttacccctacaccataagctccttgcaggcagatactgaatcccacatactggactagatgttccaaaactgtcgtctccctgtctgtgtccaggttggctcactgtgaccttggagcccaccacagccttcttgtcgggcagctgatggagacatgtgccaggctgcagcagctcaggtcagcgcctggaaactctgtgtggggccctgagttctctggttgaccctggtacctactccaggccatgtgtgaccctggcattctcacttccttgtgcaggagaaaatcacacttggccagtggaggggagggagagccccagggtggctcaggggagctcttgggtggccccttctcctctcttggcacccccttctggatgtgatgacctctgaggtgtgtccagcctgaaatcctctagaatatccttggaccttttcagcttgtctcaggttaacctctgtgaggacgatgatgccagttccctgctgctgcagagcctcctgctgtccctctctgagctgaagacatttcggtatgtagacaagacattcactcagtcccctttgcagctctgccctgccctgacacctcccgttattcccagccctgggctcagaggactcttactctgtgtcttactctgtggacacaaaccacaggtggccctggagatgatttttaggggtacctagtcgtaaacatgaccttaggaacattgagccacatggcaagaaagttgttccctttttaacactctttcattgtttttcttttaaaataactgcgaactaacacaaagtttcaagaagactgagaactgctgtgtgccatttacccaaattcacccttagagctgggcgtggtggctcatgtctgtaatcctagcactttgggaggccgaggcaggtggattgcctgagctcaggaattcgagaccaccctggacaacacggtgaaaccccgtctctactaaaatacaaaaaaattagctgggcatggtggtgcatgcctgtaatcccagctaattgggaggctgaggcacaagaattgcttgaacccgggaggctgaggttacagtgagccaagattgtgccactgcactctagcctaggtgacagagcgaggctcggtttccgaaaaaaaaaaaaaagaacaaattcaccctttgccaatctttttccacatttgctcatttcttccctccctccttctttcccacctcccttttctttcactctctccctctctccttttctgaaccatttagaagtaagttgtaatcatgtccctttacccgttaacatttcagcgaatttgctagaaataaggacattctcttccataatccagtaaaattataaaatccaggaaatgtgacattgatacactactattatctcaactacagtttatactccaatctcaccagttctcccaataatgttgcttattgcatttttttcccagttgtggatccaatccaggatcacacgtctcatttagtgtcatctctttagtgtctccttcaatctggaacacgtccttggcccttctttgtctttcatagcattgtctctgacatttacaggccagttattttatagaatgtccttccacttgggtttgtccaatgtttcctcatgtttagagttagagtctgccctttgggcaggaatatcacacaggtgatgctgtgttatcgtgccttccatcggggcacatgatgtgtcagagtcctcgggctagtgatgttaactgtgatcacctgtgacagtggtgtctgccaggtctctccacttgcaaatttactaactttccctttgtaatcaacatagattatgtggggagatactttaagattatgtattaagtcttcctcaaactctcattggcaaattttagcagccgttaataaatcttacttaaatcgatgaatcagcatgacagttgcaaaatgtagctttcctaactttacattttatttccatctaactgattacaccaagaagaaactcttgggctgggaacagtggctcaagcttgtaatcccagcactctgggaggccgaggaggaaaaatcgcttgagcccgggagttcgacaccagcctgagcaacatagcgagaccacccccatctctacaaaaaataaataaataaaataaatgtttaaaaaggaagaaactctttaggacagagagatctttgacacttcttcagtatttgctttaaagatgcagagtttgtaataaacaacagtaactagctaaactacagtgatacctaatcctggcttaagttgtgaagttgctacctgaatgactgcggtttaggaaatactgaactagtccatgcttctgcttccaagctctgtggtggcttaatgagttcatggtggaagagatttacgaagggaaggaggtctcctcacattgcccgccacatccctaccccacatccttgccctctgccaccagcattcagagctcccaagacccagggcggctcctgcctgacctgttgccctttgacccccaccaggctgacctccagctgtgtgagcaccgagggcctcgcccacctggcatctggtctgggccactgccaccacttggaggagctggagtgagttgcagagtggagggattggggacaagtggcccagctgagggtgaggggtggagaagagagcagggcgtttgggagggcaggcaatgagacttcaaccaatgacccttcccctgatgaagtgcagcagttctgggtgtggcctggggaaggaagagcaccacagttttggtctgaatttcgccactgactcacagaggggctgtgggcatggctgttccactctgggctttgattgccttatctatgaaaatggggctcatgagccttgctctgctgggctggctgtgggagtcaggctacggagagggctgaagaacaagagggtgtgtgtgtgtgtgtgtgtccctagtcccccagcttcctctctgcagccttcatccagggcatagtttctcagctgggccagctgtgactatcatgcctacccagagcctgagccctggagctagggatacccatggggaacctggacagcgagggtggcccagggcatgcagatgcagagttggcctcccaggggacagagcaggagaggggagctgacaggacagctcagctccagggctgggcaggctgcgctaacccttgcctctgcctggtcttctgcagcttgtctaacaatcaatttgatgaggagggcaccaaggcgctgatgagggcccttgaggggaaatggatgctaaagaggctggagtaagtagtgatggtggttgtgggtgagtgagtggtgggggtggttaatggatggtggaagtgggtgagtggtggggttggttaatggatggtggaagtgggtgagtggtggggttggttaatggggaatggggtgagtgagtggtgggagtggttaatggggaatgggctgagtgagtggtgggagtggttaatggggaatggggtgagtgagtggtgatggtggttaatggggaagggtgtgagagtggtgatggtggttaatggggaagggggtgagtgagtggtgatggtggttaatggggaagtgttgtgagtgagttgtgttggtggttaatggggaaggagatgagtgagtggtgttggtggttaatggggaagggttgtgagtgagtggtggcgttggttaatggggaagggggtgagtgagtggtgatggtggttaatggggaagagttgtgagtgagtggtgttggtggttaatggggaagggggtgagtgagtggtggggttggttaatggggaagtgttgtgagtgagtggtgatggtgattaatggggaagggttgtgagtgagtggcgttggtggttaatggggaagggagggagtgagtgatgatggtggttaatggggaagggttgtgagtgagttgtggggttggttaatggggaagcgttgtgagtgagtggtgatggttggttaatggggaagggttgtgagtgagtggtgatggtggttaatggggaagggggtgagtgagtggtgttggtggttaatggggaagtgttgtgagtgagtggtgatggtggttaatggggaagggttgtgagtgagtggtgttggtggttaatggggaagggggtgagtgagcgatgatggtggttaatggggaagggttgtgagtgagtggtggggttggttaacggggaagggggtgagtgagtggtggtggtggttaatggggaagggggtgagtgagtggtgttggtggttaatggggaagggggtgggtgagtggtgatggtggttaatgggaagggagtgagtggtgatggtggttaatggggaagggttgtgagtgagtggtgatggtggttaatggggaagggggtgagtaaggggtgggggtggttaatagggaagagttgtgagtgagtggtggggttggttaatggggaagggggtgagtgagggatgacagtggttaatggggaaaggagtgagtgaggggtgatggtgcttagtgctgcatggtcagtgagtagcatgcctaggaacctttgcatgttttgtgaacacaaaccgccatgtttctggatggacccaggtgagctgaatgcccttacatgaccttttactttctattctggatctcagtgccagcaagaaccttggtcataggaaacagaatacacaactcaaagcaatccaagacagaaatatattggcttatgtcatggaaaattacgaggccaatgacttcaggcacagctggatccaggggttctatatttgtcaggcttctctctcacacacttcactctggcccttactctttctctgtccaccttggcttccttctcaggcaggccatccctgcacctgcaggcttactttctctcagcttagtggaaagggagtaccattctctctgtggttacaacaaaaggtcctagactgagtctcactggactagcttgagtcacctgccccaccctaaagcaatcactgtggctgtgagcacaaaatattctcctcactggccagacctgggcgcatgcacaccctatcttctggacttagaggggtggtatttcaggatgtgagtaacagaagaggaaagaaactctgggcagaaaaaaatctacagatgtccactacatttgtctacagttgtttccttggtaactggcagcttttactactctcccccataatttgaagtcatcaaattcttagaaatgccagaaacagcctcagtctaaaagacaggtccccgtcctgcacagattcctgtttagacagtatctggacagaaaatttaacagaatatcttctgcttttcatctcttaactttttctgatgaccaaaaaagttccatctttctagaaatatgtaacaaataacatgaaatgccccggggatgacaccccctgagaaaacttctgttgaacggtttgtgaatttttctccagatttttttttctacatatgttttgaattcagcttgaaagtagccttttgactttttgccccttaacattgaaattcttccgcttgtccctctttgcttgtcctggggagaggatcaggtaaaaggagaagagggattacagagacctttgaccacagggccctcctgtcgtctcactggtctgtttctttgcccactgtccatgtacctgcatctcggctcagccttctggaagcttttatttaggggattggaggcccagtgaggtcattcattggctcattcatgcattcgacaaatatgtactgagctgggcacctgggccggggacaggacagattcatccatgcccctgggggcctttttcttcctcctgatttcccaggcaccatgtgctgctccttacctcctgctgccttagttgccctatctgtaaactgggcataatatcttccctgtccgaaggaaggggatggatcgtcagtgcccggaggtctcttcccatctcagatctgtcatttccaagtgtaactccccacaggcagttaccctcaaatccagtcagcttcttccagctgtatacctgtgatggagtgggtaggagcatggaccctagttaggagcctcactgcctgggttcaactctgggtggggtaactgacacttccagtttgcttggagctttccccattttggcacccaaagtcccacatccaggaaaaactcttctgttctgagccaaccaagacagttgaccatcttttgcttctgcctcttattttattatttatttatttgagacccagtctctctccgttgcccaggctggagtgcagtggcacagtcttggctcactgcaacctccgcctcccgggttcaagcaaccctcctgcctcagcctcccaagtagctggcattacaggcacatgccaccaggcccagctaatttttctatttttagtggagatggggtttcactttgttggccaggctggtctcgaactcctgacctcaggtgattcacccgccttggcctcacaaagtcctgggattacaggcatgagccattgcgcccagccagttctgtttcttaatgtgtgaactcgtgccagtccctcagcctctctgttctttggcctcctcatcttaactttgaggataagagcaatctcccctgctacggttgttgtgagtattaaatgagataatatgtgttacagtcttagagtctggtcagagttcacactctacaagtgctagctattgttattctcctctcctgcctaggctgggggcctctagaagtacaatcgcctgggtcacatatggttggggctcaggaatgggagttctatagtttttggttctgttcctgaagcagccactttgtgtatgaccttaagcaagttctctaactctctgaaccttggtgttcctcacctgtaaaatggggacgataataaacccacctttccagatggccccaagccctgagtttggcccacattttatgatcaatgtgtgaccgccattattacggatcattagtcttggtccatgtggttcagaacatagaactgctgcctgcctgacctcagtaattcatgcagagaaacagcatttggacctcccagtacagttcattttgtagaatttttacactgtgtggatataagtggctgtcttggaggtccctaggcttgctaagcacagaggcctcagacccccagactggacagtgccccacccccagatgtcaagttcacctggcctcctcttctccagcctcagtcaccttctgctgaacagctccaccttggccttgcttactcacagactaagccagatgacctgcctgcagagcctcaggtgagtgaccgagcggccccatgggaatgagtgggaagaaacacttcccactcagttgggaccacatccagggaagcactgaggccacctcccaggggatcctttgcggatccctcccaggcccatccctgtgccctcccaggtgggtgcccactgctcttgccttctaatgccatcagcttcctcctggttacaaaagtggcctaaagggcttaggcccacgtcgtagaacaacccttgaggcacacacacagttcaccctgggctcttgttaaaatgctcattctgattccccaggtctggaattctgcctagactgtgcttttttttttttttttttttttttttttttttttttttttttgagttggggcctcactgtgtggcccaggctggagtgcagtggcaatgcacaggtgcaatcgtgttgcactgcagcctcaaactcctgggcgaacgtgatcctcctgcctcaccctcctaagcagctgggactacaggcctaaggcgttgcacccaaacttagcatttctttttttgtttgtttgtttttgagacagagtttcgctcttgttgcccaggctggagtgcaatggcacaatctcagctcactgcaacctccgcctcccgggttcaagcgattctcctgcctcagcctcccgagtagccgggattataggcatgtgccaccacgcccggctaatttttgtatttttggtagagacagtgtttctccatgttggtcaggctggtcttgaacgtccaacctcaggtgatctgcccacctcggcctcccaaagtgctgggattacaggcgtgagccaccacgcctggcttcagactctgcattttctaacaagcttccgggtggtatcaattctgggggccacggtcagcactttgagtagtgtgggtctagactcagatggggtggccttcctacactccctttgtgatttcactccctgctgctaggataaataaacatgacacttactttcaatgtgatttttcaaaacatgaaatcttgtgactaaaaacaaatccaagcagtgacacaaagcattgctttgtttatatccaagtacacctcctaccccctacctcgggcagagcagagtaggtaggaaatgaggttagagagttccaggaggttatatcatattggaccatttcacccaaaattaatttactgaaaggtgatccattaaagtgtatttatttatttctattttatttttattttttgagacacagtctcactctgtcgcccaggctggagtgcagtggcatgatctcacttcactgcaacctctgcctcctgggttcaagcgattctggtgcctcagccgcccaagtagctgggattacaggtatgcaccaccacgcccagataatttttgtatatttttagtacaaatggggtttcaccatgttggccgggctggtctcgaacccctgacctcaaatgatccacctgcctagactccgaaagtgctgggaatacaggtgtgaaccactgctcccagccccattaaaatttaatttgcaaaataaaagaaagtaaaaacaacatgcaaacaaatacttcccaaggggctaagaccatttgcctcagctatttattgttttttcctacccaggcagagcaaggtcagggctcagtaaagacaataccctgggtttaaggaaaaacctaccatttgcatggatgagaacacatatgcccctgagaactgatctgcgtgaatcagagaatcccacgtgaaagtggcattcagccgggccagcccggagatccctgacacagaggctgaggtgaagcttggcaaagaaatgtagagactcctcctgggccaggggctctggatttgtttccacccagcctgcaagtccctaagtctctggccagtcacagctcactgctggctctcaagttttctcacctggacactggggacaataattcccaccttgctcaccactccccacctgccatgacccccagaagttttgctaccagcatatgaattcctgggcgtgtaaggctttgcaaactgtagagttcttagcacagcacctgcaaaggcctttaagctcctgaaagcctcttggtctattccctgcttttccagactgaacaggaacagtatcggtgatgtcggttgctgccacctttctgaggctctcagggctgccaccagcctagaggagctggagtgagttgcccattctgcccccagacccaggacaattttggccgggaaagatgacaagggcaaggggctacctgagcacgccctttgcttcttcatctcatctccttcacccacttctacactgtgtaaacaacctggggcctagaagcttgggggacccaaagacaggatgtaagagtgtcaattgtagcaagagggatttaggtcagacaatggggagaacatcctaaacagaagccaagggttaggagctgtcactcaacatggggtgatggggctctctgtgtgagtcgaggcccttcctgggacttcagcctccccttctttttctgggagtggggtgtggacaagatgagacggcagaaggctgatgaagctgttttctcccccaagcttgagccacaaccagattggagacgctggtgtccagcacttagctaccatcctgcctgggctgccagagctcaggaagatagagtgagtagccagccctacagaggagggccacaggggtcacacgatggtcctaggagatactggcccctagctgaggccagcatggtaaaatctcccctgcgccaacctcagtgtccaggcagtggggctcggtgacctcctggccctcactgcgggaccttaagccaccccagcccctgctcttctctgggcctttctgcctcattgtctgggtaggtgtgtggtgtcggggggttgtctcttaggccccctgaagcaggggtggcagacccagcagatgtgctggggtgtcggggagagggggcatcagaggacctgatggctgcccccctcccacagcctctcagggaatagcatcagctcagccgggggagtgcagttggcagagtctctcgttctttgcaggcgcctggaggagttgatgtgagtgtctgcccaggtggcctctgccctctgtgccccccaggtccacctggcctcctctcccgcagtgggcacagggcagggcgggggtcccgagtgggcaggcccagtactcaatgctcattcctctcctcttccaggcttggctgcaatgccctgggggatcccacagccctggggctggctcaggagctgccccagcacctgagggtcctacagtgagtggccccctgcccataccatgcagggctggtggggaggagggtcctcgggagcagtgggggggtccaggcccccatcagttgagctgccctgccccaagtcaagcttggcatatacccactctcctgcctgttccttccctgcctctgatgtctgcagcaagaaaatcaggaggcccagcctagtcctggctctgccactggcccctgcctgaccttggccaaacccctgccccttctcagcctcagtttcttcacatgcaaaagaagtacaatgatcccagttcattgtgccctgtgagcgggtccctgagggcgaatgagaaatcctggcagagggcttcgcaggagcacggtgccaatcaacgtggcctcagcacttcacaaatgacctcattgcagccccatggcagcccccagagtcccagagtgctgggaccttgttttttttttttttttttttttttagatggagtctctctctgtcacccaggctggagtgcagtggtgcaacctcggctcactgcaacctccacctcccgggttcaagcaattcttgtgcctcagctaccagagtagctgggattacgagcatgcccaccatgcccagctaatttttgtatttttagtagagacggcatttcaccatattgcccaggctggtcttggactcctggcctcaagtgatccacccacctcagcctccaaaagtgctgggattacaggcgtgagccaccatggctggctggtgctgggacttttatgtgctcccttttccaggcaagggaatgaaggccaggagaggtgtggagaattttccttactcatacacgaaggacccaggtgttgaatttgggatctcagaccccaaagccagggtccttgatacctacccaggtcctgtgtggatggggaattagccagagactgtctacgggctggcactgcagcctgagacaaggctgagggtggggctctggaaacgccagtccctcaggctcctctcaccctctcctctttccccagcctaccattcagccatctgggcccaggtggggccctgagcctggcccaggccctggatggatccccccatttggaagagatcaggtaagtaggggctgcccagcccaggcacggggacagtcctgggcgggtctgggggttcctctcacaggtatctcccctaccctgcagcttggcggaaaacaacctggctggaggggtcctgcgtttctgtatggagctcccgctgctcagacagatagagtaagtagcctcccctgcctgcctaggggaccagtggcaggctgagggcagcccttctctgactgagcctaacacctggggaggcctttgaagtgatagaagccccagggatggtgggggcctggctcaagaaaggaagtctttcctaaaacgcctagcttaccccagaccctggtggctctggaggcaggacctgctagatcccctgactcaaacaacccccatcccatcccatgcccttctccatccccagcctggtttcctgtaagattgacaaccagactgccaagctcctcacctccagcttcacgagctgccctgccctggaagtaatcttgtgagtgattggaagagccctgagctggctgggaaaaggaaaagtcgggaggggtcgggggagttggctccagcctgctgtgtggcctggagctgctcccatcctctctggccagtcctcccatttgtaaatggggaagatcatccttactcagacatcctctcaaagacattttaacacttgagctgcaggtaatgttgggtaaaacagtttaccttcttctgcctttttccccatttgtagattggtgggaggggaggtggaccagatggtctttaaaggtttttggtccaaccttccttttgggaggcaactggatagaccaccttgcctgcttgatgaaacctccatttatgaaccacagttggtagaaacagtggctaaagccaggagaaagccacccccagacctgctggctggccgtgcttggctgtctcttagcaatcagaatcccccagaccttggggctttgcagtgctgcctcatgagtaaactagaattctaggactagcctgggaccctaaccatggtatggaggacaaagctgtttcctaaagaacaggacacaagtgattacgagaagattttagtttgcatcctaaaggtcttaacccttctcattacaccaaagcgaaagtctcagatcagtggtaattcatctttaacacctaacactggattctccctttttaaccaaaagggttaaaaacccaacatcttaggaagggcatatgttccaactagaagttaataccattgtttgtactatatttatttttgtaactaccttctatatggagtctgtaacacaagttttccattgatagtagcaataaaagtttcctttcaagatttttttttttttttttttttgagatggagtctccctctgttacccaggctggagtgcagtggtgcaatctcggctcactgcaacctccacctgccgggttcaagagattctcctgcctcagcctcctgagtagctgggattacaagtgcccaccaccacacccagctaatttttgtatttttagtagagacaggatttcaccatgttggttaggctcgtctcaaacacctgaccttggcctcccaaagtgctgggattacaggcgtgagcaaccacgcccagccaagattaattttttaaagtaagaaaaaagagggggccaatttaaagaaaaatatgatgcatcttaaatacaggaggtacatgtatgtggcaaaaatggcaacatcttgtgaacaacgtcatgattcaaacttgacggggaggggagcagggaggaaggtaacctgcaccctgacgtcttcaggggaggacacacaagcaccctatcaggtggcctctcttgaaaacccttgcccccacgactggcaccctgctttccccattcactgccttgtctccacccctcgacctccttgctctcctgccgctgactttgggacccctaccctgcaggctgtcctggaatctcctcggggatgaggcagctgccgagctggcccaggtgctgccgcagatgggccggctgaagagagtggagtatgaggggccgggggaggaatgggacgggctaaagggggacctacatcccgggaacaccaagaggccactgggtcagtcccctgcctcccagaaagcccttccttgagttgcacactctggcctgttccaagcccctgccaggcttagttccccctgggttctagccttcagccttcctgctgcacctgccaccagtcccctgttgtcttttgggttccctgagaaggtagtgtgggagactgtgtcccctgaccttggcctgaggaagggacctaggaaactctcacacccattctcatggccgtgtttctctttcccctcccctcactgtccactgagaagcctggagaagaatcagatcacagctttgggggcctggctcctggctgaaggactggcccaggggtctagcatccaagtcatccggtaacagaggcctgcaggggcagggatggtgggtgggaggctacaccaacccccagatctaatgggactccctggaggaggcggcagggcctgggctggggattatcaaaggagacttggaccactccaccaagaatttggcagcaagcagacttggatcaaaccccagctctgccacttgccaactgtgtaactttgtagccataactcaacctctctgaaccccaattttctcatctgtgaaatggggatactgatagtatctacctcagagagttgtgaagactaaatgagcatataaagcactgaacccaatgcctggcacatagtaagcacttaaaatggcagctataatcagagccatcacatacagttgtataggttgtgcactgcacaagggcattaaacctaaggggcaccattcacattgtcaacctgctagatttctagcagatgagagtaaagtaccttgttctaccaaaatcatatattatgacaatttcagacagatggaagtaaaacatcttgaagaaagagggtcttttccttatttgcacaaatgtgtcatatgagtgtggccttagctggcatcactatctcccagggaggaaggttgagttggaggactcaggaggcaggtgtggggtacaccctctccctaggtcagctatgctggtctaacacctgcctctgccaggtaactctaggcacagctctacctttttgggcctcagcctcccaatctgcagatacgacagatggcaaagatgggaggatgaatgagtgcctatatctgtgccccacagcctctggaataaccccattccctgcgacatggcccagcacctgaagagccaggagcccaggctggactttgccttctttgacaaccagccccaggccccttggggtacttgatggccccctcaagacctttggaatccagccaagtgatgcacccaaatgatccacctttcgcccactgggataattgactcaggaaagaagagcctcggcagggcgctctgcactccacccaggaggaaggatacgtgtgtcctgctgcagtcctcagggagaacttttttgggaaccaggagctgggtctggacaaaggagtaccctgcattacgtgggatatgtgtgatcaattggggacatgcgacacacaatgagggtgtcatgacaatgcatgacacgtacggttatatgtggcagtgtgaccccttgacatgtggcgttacatgaaagtcagtgtggcacgtgttctgtggcatgggtgctggcatcccaagtagcaggatacatgattgttggtctatatatgacacatgacaaatgtccatgtcacaggactcatggctggccagatgacctcaggctggcccaagatctaatttattaatttttaaagcaaatacatatttatagattgtgtgtatggagcagctaagtcaggaaaagtcttccgcccgagctgggaggggagagtgtccatgcactgaccagtccaggggctcaagggccagggctctggaacaagccagggactcagccattaagtcccctcctgcctcaatcctcagcctacccatctataaacttgatgactcctcccttacttacatactagcttccaaggacaggtggaggtagggccagcctggcgggagtggagaagcccagtctgtcctatgtaagggacaaagccaggtctaatggtactgggtagggggcactgccaagacaataagctaggctactgggtccagctactactttggtgggattcaggtgagtctccatgcacttcacatgttacccagtgttcttgttacttccaaggagaaccaagaatggctctgtcacactcgaagccaggcttgatcaataaacacaatggtattccacgtc

SEQ ID NO: 15686 - DNA, 39944 bp, Homo sapiens
gtggctcttccgcttggacatcaggtgagcgtgcctctccgcccccagccctgcccctgtcccccatcccacaggtcatctgctcccacgtgggccccttgtccaccagtttcatgccaacctgtcatcctcagcaccttgggcagtaccagatctgcagagcatgtgatgggcgtccactgaatgaatgaatgatcaaatgaatgaataagtatggcctcacggatgctcaaatttctccaaattcaccattagagagttcattgactctgcctcactcgttctttggatagtccttagagatttttttttttaggattttttttttaattattatactttaagttctagggtacatgtgcacaacatacaggtttgttacatatgtatacatgtgccatgttggtatgctgcagagacttttaagaaaactgggggccaggcgcggtggctcacgcctgtaatcccagcattttgggaggccaaggtgggcggatcacgtgaggtcaggagtttgagaacagcctggccaacagggtgaaaccctgtctctgctaaaaataccaaaaaaaaaaaaaaaagtatctgggcgtggttgtgagcccttgtagtgccagccgctcaggagtcaggagaatcacttgaacccaggaggcgaaggttgcagtgagctgagatcgtgccactgcactccagcctgggcgacagagtgagactccatctcaaaaaaaaaaagaaaagaaaagaaaactgggagcttcctagttgccactggggactcagggacctgtcttaattgtgggagctgatgagaatataaaaggggaggcaccagccagccaagccaccccaggcactcagggcaccgcatccatgattttcaggggaggtctgcttccctttcccttccctaaggacccccaagaatgggaggtgccacagcagatggaccaggctcagttacttaactgctgcgagctcagagcaggtcccagagcctctccaggcctcagtttcctcatctgtaaaatggagataagaataattactggcctggcacagtggctcaagcctgtaatcccagcactttgggaggccaagacaggaggaggaggatcacctgagcctaggagtttgagaccagcctggacaacatggtgagacccccccatctctacagaaactttaaaaattagccaagcgtgatggcatgcacctacttgggaggctgaggtgggaggattgcttagactcaggagatcgaggctacagtgagttgtgatcacaccattgcactccagcctgggcaacagagcaagactctgtctcaaagaaaaaaaaatgtcaggcacaatggctcacatctgtaattccagcactttgggaggctaaggcaggaggatcgtttgagccatggagtttgagaccagcctgctcaacatggcaaaaccccatctctacaaaaaatacaaaaattagacagtcatggtggggcgttcctgtagtcccagctacttgggaggctgaggcagtaggatcagttgagcccggggaaggttgaggctgcagtgagccatgactgcaccactgcacaccagcctgggcgacagagcaagaccctttcttcgaaacaacaacaaagaagaatttcttacctcattgtttattgtgagaatcaaatgagaaatgtcgatggtgtgctttgcatgtgacttgatacatgtaattgttgcttaatctattccttgtttgctaagaaagcaggccaccccaggccctccttgccctgaccagtctgggttcttgccactgccagggaagttggtctttgaccattttcaaactgctgcttcctctctgcttccagctttgaaagccaacacatcctcctgagaggggacaagacaagcaggtgaggagggaacgctcggggtgggggagtcccctcccgctctggtccccgtctgttggaggtccccccacccccagacccatgctgaccactcagctctcagttaaaccacccaagtccggcacactaggtttaatcaccacttcagtaaccaccgccccccccataaattgtcagtaatcaactgccctgttttccccttggaaggaggcaatgcagatgggaggaagggagggatatggttgggagaggtcccagagcagggcaggtgcccgcagattgctgctgtgtgggaggagacaggagaacatttgtgcttctgcgtttcggggaattttgtagacccaccgctccatacatgtcactgccctttcacgctctgaaggcaggggccgtgggtgctctgaaaaaacattttccccgtcttcgcagtaaacaaccaatactagtttagctcttcatgatgttcccggctgccctctagtgggaccaggcctcttggcctcacttgggagcagtggcagcggacagggtgggcccatgtgcagctggctgggtggagagagtcacagctagtgtgtcaagaaaaggcactgccgtacagatgggctgtcaggagtcaggggtggctcaagcctgggtggtcttgcttcccaggataggatctctgtttctggggaacccccgggttcttgaggcccaaagaactgacgtacagggaggcagaagtcatgtgatgccaagcagtggtcagagaggctctgtcttgggtcctcctgcctgctcacctggacaggaacaagctgctggcttttctaactcaggcttcccttccctgagcctcagtttccccatctgaacaatgagggactgagctaggatctagtgactgcattgtctctgagatgccttccagccctgactttccaagtctgggagtccaatgtgggtgatctgaactttcctttctaaacgatccccctcctaggggtatatgggctgggctgggagtccgagggggtgatctgaactttcctttctaaatgatccccctcctagggatatgtgggccactggatctttgccagacttcccagctgcagccaagttcttagggttccgtcagcgctgcatccccaggagcctctggtactgtcccagcccttcttgtttgggggtaaccataatagggatgaggcgtcagagggggcagagctggcagggggctagggctggggattgggatagagggaagagagggagtttaagagaaaaggaaaagaaagaggcgtgggtgtgaggggtgctgggagttggggagctctggcccctgacgggcagctcagctggcccatgccccgcattctccttggagagaagattccacatttctgtgaagcaaacagagcagctcagccactccctgcctggggtctccatctgctctgggggacacccactttccagaaagaaaggggttggcctgtctccccactaatacactccccatctgcaagctctgccatgagaggctgtgagaccctgacttggccccacctctctctaggcctccagggaagtggaggcaagtgaggccctgggaaggacatttcaatttcactgttagccccagggcaatggggagccacgggggtaacagggagaggcctggtcagatgtgcagtgttaaaatgtgagacacttgtggggcagagagggattaaagggaggcaagagtggaagcccagagggtgttaaatggtcaaggtgagtgaggatggtggcctgggctctggagggggcggtggggaggacttggagagtcactgacaagggcagctgggaactcagggtcctgcactgtcactgtcagggcaggaggattgggggctgcaggggagactcgagagggaagcgagtgccccacaggggaaggggcctgtggcctcccacttagagtgagggatgctgggagaaggatagagcccctggggctagccagggaccctgggctttctctgattccctgccctgcccattgcccctttgcagcctcagtgagtgtcctctggagcccccaagcctcacccgcctctgtgccactctgaaggactgcccgggacccctggaactgcagtaagtaacgaggacacagccccagagggcaccatgtggggatctgcccagtgacctgggagggggcttcttggttagaagacaggtgagtctttctcgatttcttcccaccagccctgccccatgagagtcccctggcctttggtagaaacttggctgtctctcggcagcccccagccttaggcagcgcatgtctcccactgggagatgctgtgctggactggggaagccttcacctgcaccatccactcaactcagggcacctgggagccctgtccacctccaaccccacccctggagcctcaccagggcacccacttgaacctgcctgcatggctggagcgtagcacttctgaaagcccttcctcaaggcacccccactctccttggggttaccacctcactcgccccagaacatctgggtctgtaaccagagactggacctggaatcaggactcttggctcaaaagggatttaactccccgggcctcagcttcttcatctgcacagtggatggtcagcctttccttttattgtcattgtggtgattctattatagtaattaccttaaaataaagaaatccaagacaaaacctgcctcacctaaacaacctcttctctcatcaaatccatgttgtcatgtgtccacaggactgtctactccttgcctatttgcatattcagtttctacctgtttgcagtcataaactagtttcatgcactgtgttttcatagcatctgtgttttccattttgcttcagtcttttttcttgctttctagcccccatctcaaatgcccttccagcccttccaaccagataatccggtttgaccccctggagtgtggccttcccatgtccttctccaggttcaaacatataaccacaaaaccattatcagacctacactattttttttttctgagacagagttttgctcttgttgcccaggctggagtgcaatggcgtgatctcggcttgctgccacctctgcctcctgggttcaagcaattctcctgcctcagcctcctgagtagctgggattacaggcgcccgccatcatgcctggctaatttttgtatttttagtagaggcagggtttcaccatgttggccaggctggtctcgaactcctgacctcaagtgatccaccttcctcagcctcccaaagtgttgggattacaggcttgagccactgcacctggcccagacctaccctattaatggcaattccttaaagtcaaccaatggtcagtggtccctgattgtctcttacctgttttcacagagtatatactgatgccttttaatactaaattgccacagtacgggacgagctgcaagttactccaccacacccttctagagtctagatcaagggtgtccaatcttttggcttccctgggccacattggaagaagaaaaagaattgtcttgggccacacataaaatacactaacactagcgatagctgatgtgctaaaaaaaaaaaacaaaactccaaagaaaaatctcatagtgttttaagaaagtttacgaatttttgttaggccgtattcaaagccatcctaggctgcatgcagcaggccatgtggcttggacaacttggtctagattgaaatccaaactgcttctaggtgttgtgttttgttttgtgtagcactgcagtcagtgctacaaaaagcactcttacgtgatttgactgttaagtacctattgtataccatgcactgggccagatcctgggaacacaaggagactgggatgcgggctctgctggccaaggcaaatcatctgcagaggaagcttaatataaaaagcccactggcggcccggcacggtgactcacgcctataatcccagcactttgggaggccgaggtggctggatcatgaggtcaggagttcgagactagcctggccaacatagtgaaaccccatctctactaaaaatacaaaaattagccaggcatggtggtgcacccctgtaatcccagctactctggaggcaggcaggagacttgcttgaacccgggaggcagagattgtggtgagccaagactgcgccactgtcctccagcctgggcaacagagcaagactctgtctcaaataaataaataaataaataaataaataaataaataaagcccactggcagcactgggcggtctgagcacaggtgggagtttcaggtccccctccattacctgtggttggggaaagtgcaatagtgaatatgaaagcactttgtcaactgtagagtactgtgatcacttgcaggattattgctataaatagtcatcaaggtactcaatgctgaagtccagtgattccccggggttccaccggggaagccagggaagatagattgtggggctccatcccccctccctgaattcaagcactgcaggtctactttgcctgtgtacacatgggcataccatgtgggatgtggtaaagagtaaagattccattgctttaaaaaaaaaaaaaaggagggtgtaatcacctcctttgccaaccagagcccatggtgtatttgggggtctggtgggacaccatacgggatgtgtttctggaaagaccaccctcaataaaggccccagtcctgactgtgcctcaggggcccatgcccagtccctggggcagaaagggtagagttgggcctccagcctgggccctggcagaggctccaacatgaggctgctcctcccgccctaccctgccccccagctcactgagccagttgatgtagggcccctgtactccatgcctcccctccaaacagccagaggagaaagcagcagagatgggccaggcccttggaggccccggagaggggagagggcagcctgcagaggatgaaggaacagaaagagaggaagggggaggtggagaaggcagaaggagaacatagtagaggtctgcgggggttgggaagtggctccaggccccccaggaaggggctgtaggtaaaccccagggaactcagtgtcttgagttgtcctggtcctccatctagagcagagacagcaaggcaggtatctggagtttctcctaaatgcactgggttctgacgaattatctgaacaatgatgagctggttggtctggtgttaatgggcaactagagacccaagccagtccctgtctccttcgctgacctgttgtatgctgaatttccactgtcatatccactcctctgggttaaggcagcattgttttcttttcttttttatttttttgagatagagactcgctctgtcacccaggctggagtgcagtggtacgatcttggctcactgcaacctctgcctcccaggttcaagtgattcccatgcctcagcctcctgagtagctattactacaggtgtgcaccaccacgcctggctaatttttttttcgttttttgtagtagaggtggaatttcaccatgttgcccaggctggtcccagactcctgacctcagatgatccacccacctcagcctcccaaagtgctgcgattacaggcatgagccaccatgcccagctgcattcttttcttaacaaacatgttttgcggaacactaaccttcatggcccttaaaaattaattctgctagtccatttagtttggggaaaagtctgctgtagctccttggaaattcataatgcacagcagcctatcgcagcctcagagaagccctgcagcaaacaaaaccatttaatttggcttaaccccgtatttcccaaacttaaaagaccttcctcttcttccagcctcacggataacccatggacccagtgctgggagggaatgtttcaggtgaccctggttaggtcccatctccagaaggctctggctatgaggccgtgctccctgctttcctggaaggtttcccccacctcatccacctgctttgtttcacagattgtcctgtgagttcctgagtgaccagagcctggagactctactggactgcttacctcaactccctcagctgagcctgctgcagtaagacgagagtttttcctatttcccggttccttgtgctcgtgtttctaaggctcctccatggcaaagctgtacctgccctctaacccctcaaccccccgcctttaccccctccaaccccctctacccgctccattctttccttaggttgttttatcattttacctggcacaactggggactccaatctgcttccagctccaccctaatactttgtcaacctcagggggcgtcgtttgcctcctctgcgtctcagtttcctcatctgacaaatgggattaatattccccgcccattcccccagagttgggactcaaataagttattctaaaatcaccttaagaaatggaagatctgtgacaaatgagctgtccaacttctccccacccacggagggtcacccactcgtagaaaggggctgtacagatgtaggtcctgtacttatcacatgctgctttttaaaggtcaccgtcaaactcgcaaaaagggaatttaagcagaattcccccaaagtattaaaactattttctaatttcagctcagactggttagaattttaaaagtatttaggccatgtgtggtggctcatgcctgtaatcccggcactttgggaggccgaggcgggcagatcacctgaggtcaggagtttgagaccagcctggccaatgtggtgaaaccccgtctctactaaaaatacaaaaattagcccggtgtggtggtgggtgcctgtaattccagctacttgggaggctgaggcaggagaattgcttgaacttgggaggcggaggttgcagtgagccgagatcgcgccattgcactccagcttgggcgacaagagtgaaactccatctcagaaaaaaaaaaagaaaaaaagaaaaagaaagaattttagaaggatttactttaaacagtcttctagtggtgggaggcggggtgggaagcagctgcagctaagatgaaaaaatacagcaggaaagtaaatcataatgttaataacatcggtgcaaaggctggggctctctgggatgtctaagatggctcgcatcacctccaggatctcgcttatgcttgggttttatctgggagggagggaggagacgtgacaacattccaggggcaagtacagcccagctcacagcaccccatggcaccctgtaatagtcccaccctgcccggagataatgagtcagaaaggactcctttggacataaaaggtggcaggttaaaattgaacaggttggaaacctcagaccggagaggaacttctctttgcctaaatcacacagcttcacccctgactcctcgtccgcctttggagtggcgtggccagcctgaccccttgccagggtttaaactttgtagtactcaacgtgtagtgcttgtggccctactgtgggccaggcattgtgtgacgacacagcagaaaaagttgaccatgtccttatcttcttggagctcctcttacaatagtgggagctgaaaaataagtaaagtaaaatcaaataagatgaacttagccagtgataagagaattttctcgggatgtggtgaagagtggctggagaggtgatttagatgtggcagaagccatcagggaacatctctgaggagggatgctgagctgggacctaaaggaagagagagagctcgccttgtgaagagcagggaactgcattccaggcagagggaacggcatgtgtgaggccctgaggcatgattaagcttggtgggctccaggaacagcgcggaaccgagacagccagagcacagtgactggcagggacagtcctaggagaggaggaagagagagatgggctcgggttgggttgcatggggcctggcacccatggggagagtttagacttttgttcctgggaacatgaaagggagaggaataatttgggttttctttctttcttttttgtgggggagggtctcgctctgtcacacaggctggagtgcaatggcgcaatctcggctcactgcaacctccgcctcccaggttcaggcaattcttgtgcctcagcctcccaagtagctgggattacaggcgtgcaccatcatgcccagctaatttttgtatttttagtagagacagagtttaaccatgttgaccatgctggtctcaaactcccgacctcaagtgatccgcccgcctcggcttcccaaagtactgagattacaggcaggagccactgcacccgttcctcatttgggttttcaaaagttcagactgagtgctgggtagagaatggattgggagatacgagtggaaatgagagtgggaagagatgtgtgcagcagggtgaagggtgctgggggctgatcactgctggggtgggatagaagttggtagactcagggtggatcttgagagtggaatttacagacaagctgatagggggattactggatgaggcaaatggaggtgctgaggctgcctctgagggcagagtggacccatctcactttctctaaggcagtggtttccaactgggggtgattttcacccttgggagtcatttggaaatatctggagatatttttggtggtcatgactgcgggtgaggggtgctgctactggcatcgaatgaatagagatctgggatgctgctgaacatcctatagggcacaggagagcccacaacaaagaattattggacctcacatctcaatagtgctaaggtttaaaaactgtgtctgaagggcctgaagcttcccactctctgtgagcaaggactcgcctgtgaaatctgtgcttgcaggtaaaaacaatagtaataataacagcaagcacaggtcccatgcccggcagtgcacctgcatgatgtaattaaatcctcatatacctcgagagtcatacatgacgagtcttgatttccagataaggaaactgaagctcagagaggtgaagtcacttctccaaggtcacacagccaataagcagaactgggactcaaatccaaatctgcctgtccctcagccctatttgtgcctcttgatcccctgcctgcttccctattgccttgctgagctgctagccctccccaccctccctttccttaccctccaggctagccaggttccttgtccactcatcttgccggatctaccccctttccttttcaggctgagccagacgggactgtccccgaaaagccccttcctgctggccaacaccttaagcctgtgtccacgggttaaaaaggtggatctcaggtgggcattcccctgggacagccaggactcgtcctgaagggttgtgcctggagtctggtgggtatgagggggtaggatgaagacagtaggacccaactagaggctgggcttccggaggaggggtgctggccccgtgggggcatcctgaggctgtggccacagctgtctgacccaggtcctgtctgatccaggtccctgcaccatgcaactttgcacttcagatccaacgaggaggaggaaggcgtgtgctgtgggtaagcccccttgaaccatgcctaggcagctagttgatgttggggaccagtagatctgcctcctgggtggccagagcagtatgcagactgcctaccacaaaacattcccctggaacaaccctgcagagggacttgtttcacccagcatgaagaaacacaggtccgggtgggatctactgtgggggtgggagcagtggattctggacacttccagagggtccaagcttgagtggagacccacctggagcccagaggctgtgccctgggctagccaggccggagggggtctcagtggccaaacgccccatcccctgcttgtcccctttacctccgtccagcaggttcacaggctgcagcctcagccaggagcacgtagagtcactctgctggttgctgagcaagtgtaaagacctcagccaggtggagtaagttgagggaggaggaggaaggagaggagcatggacgcatgcctgaggggcactgaagggggtatgagggtccgtgtgtgcacatacactcatgtgtgcctgcctacacctctcaggaccagctgtcagggatgcctgggtcacatacccaaagcttccctgaatcaattttctctctcccgcccccactctcgccatggtggagctagttccatggtgtgccctctgacttgggcagccctcagcctcaagtatgtgcaagctctgctggcagatgggggctaaaacgcaggattcattgttggcccagcaggtggttaaaagtaccggatgactctgcctgaggagggacgcagagccagccagggtggggtcttgcagtctcttgtattgttgagatgtggtatctgcgtggcctgtcttggatattcaaatagtcagcccctgcatgggtggaataataatagctaacagctactgagcactttctccactgttctaagtgcttgacatgttctttttatgtttcccatatccctggatactagtattgttctcattttacagatgagggaactgagacacagagggtgtaagaacttgcccaaggtcacacagctagtaaaatgcagagtccctgctcagacgcattgggaatccagcctaggaccagtgggaaatagagagagcagtccgccaaaaatgccacacaattttcatttctgttgtgatgtggcagagaagaaaaatgtgactgataaaatcatggatttcttttttttttaagacctggggtctcactctgttgcccaggctggagtgcagtggtgcaatgataggtcactgcagcctccaactcctgggctcaagcgatcctcccacctcagcctctggagtagctgggactacaggcacacaccaacatgcctggctaatagtttagttttgtaagagatgaagtctcaccatgttccccaggttggtctcaaacttctgagctcaggtgatcctcagcctcccaggttgctgagattacaggcatgagccgctgtgcttggaatgtattttaaacagatatgaataagaaatatgtctttgagttttttgtttttcattatagagggaaatttttcttttctttctttctttttttttagatggagtctttctctgctgcccaggctggaatgcagtggcgcaatttcggctcactgcaacttccgcctcccaggttcaagcaattctcctgcctcagcctcccaaggagctgagattacaggcatgagccaccatgcctggctaattttggtatttttagtagagacggggtttcaccatgttggccaggctggtcttgaactcctgacctcaggcgatccgcctgcctcgccctcccaaagtgctgggattacagccttgagccaccgcacccagccaatttttcttattttaaagactattttattaagtggcttcataagacagaccaatttttaaatgacgtttctcaggaaaagatgaaattaacaaacatcaaaaatgtcacagacctaggaggaaaatcagatgttccgggacacactggttatattatttctgaaactgtagttaaaactagctgggcgtggtggctcacgcctgtaatcccagcactttgggaggccaaagcgggtggatcacctgaggtcaggagtttgagaccagcctgatcaacatggtgaaaacccgtctctactaaaaatacaaaaataattagccaggcatagtggcacatgcctgtaatcccagctacttgggaggctgaggcaggagaatctcttgaacctgggagacagaggtcgcagtgagccaagatcgtgccattgcactccagcctgggcaacagagcaagactccatctcaaaataaataaataaataaaaccacagaatgctgcaatgaagggaagtaagaaacttcaggtgaggtttccaatattgatattgcattcccagattaaaagaagaaatctatgggtttaatgcatcctgcaaacatttttttttcctgaatttcctctcattcaaaaactgtggatcccaaatgatgccggccaagggcgtggtgaaggcaaattggtttttctttaacccttgaaagcctgctggaggcacctgagctatgagtggtcacccgatatggaagaggaccaagaggatgggtttactgtggtgctggggaggggatagtagcagagaacgtaggagttgctggtcattctagtggtgatggaagggatggtgatggtggtactgggcttggtggtgtagaattgtggtgataatgaaagtggtggtggtgatggtggtaatactggtggtggtgacattggtggtggtggtgatggtggtgatactggtgatggtggtgatggtggtggcgctggtgaccctgacatggggtccagtagcagtgacagtggatgcaggctcctggtgactgaggagcatctcaggctgaggaggcacctctgatccccgccactgctccttaccccctacagtctctcagcaaacctgctgggcgacagcggactcagatgccttctggaatgtctgccgcaggtgcccatctccggtttgcttgagtaagtggaaagcagcataaaggacagatagcaaggaggaaggctcccctaggccaaaagcatgatgggggctccttctgagggcatcccccagagcaccagaggacaaggactgtggagggcaaggggcaattcttcccttgccttcactcccctggccttgggtcctttcctctgtccctcacacccaccatgggcagatcctccaccaaacacccaagagaggctgtgattcgtggcagggtgacacacccctacagccaaactgacctggggacagggaagcaacattccatccccaaccagctgatgcgggattgcagctgcctggctcctggtccatcccgtccctgaaattcttctgacccaatctgtggaacataaatgtggagatgtccctgtggcaggcaaggggccttaggaagtcatccacatggttgccccatctctcccgtgacctgctggagtgacagccagctccaggacaccacttgttgctaggcaactgagcttcgtgctcgggagtccttgacccatgcggggctagagctgccagcctggccttgccagtgcccagaccccagaccacaggggcagcgggcagggtgagtgcagcgctcaaggactcagggtctggtgccagttctgcctgtgtggggatggtatccttctgggcctcagtgtgtccatctggagaatagatgcttagacatggaggcttctcttcttggaaatgacagctggaagggagatggagggggctgggcagggctccaaggaggtcctgccctcactcccattctcatctccatttcccttctagtctgagtcacaacagcatttctcaggaaagtgccctgtacctgctggagacactgccctcctgcccacgtgtccgggaggcctcagtgaagtaaggggatgttggtccccgaaaagcccctttctgctggccaacaggtgcccctggctgatgatgggagaagcaaggcacccacactttgtggccttccatctgggtggcttggagcaacctctgcctttctctgaatctcagggtttcctgggcatgggatcataatttctatcccctgatgcccgggtgccatggggaccatggaggccatggggtgggaaggccaggtattgccatgctcacagaatgagtttgggggtctcctctggttctgaggcctccatcctcccttgtccttgtgggtgcagccccgcttccctctctgtgccctgtgggtgccctaggtgcctaggaagctggcatgtctgggcaccgtgcttccccaggcccttctctctgcagcctgggctctgagcagagcttccggattcacttctccagagaggaccaggctgggaagacactcaggtaatccctgcagggtgatgggacaggggacagagaggggagaggaggctgaccctatggcggcctccatggccccctcttccctgggccctctcctcctttagagagcagcttcaagctcactgcctgggtctgttcctccagatctgcccccgatgccctggtaactccagtctcagccagggccttggcattgaacttgtgcctcttagcccaccatcctaagcccaactcagcccaacattctcttccttgccatgtcctgactacaggccttgaggcttctgagtgtcacggttaaagattttgaagccaactgaaaataaatccctgatctgccacttaccagctatgtggccctggacaagtaaaatggggataataacacaacctaccccttagggttattgtgaggattaaatgagttaataagtataaagtgccaggaaaaggtctggctcatgggagtgctgtcagcagttattgtaactgttattattattattattattattattattattatcattatcattacccctggtagccctgactcactgccacggccagttcctttacatgtcttacttcagctgtgaacagggcctccaaactgatccctgcatcttatcaggcctcctcccctccattcactccacagcccccagagggatcttcacaacacacatctgacagtgcccctctgctactctgtgcccctcagtggctccccattaaccccagggtgaagttcaaagtccctagcatcttctccctcacagtctgatccaactgtcaccttccaccatgttccttcccacctcccccacaccacacacacgccctacacaccaacccatataccacagatacaccaagcacacccaaacacaccacacagcacgcagcacacacaacacacgcacaccacacagcacacacaacacacaaacgcaccacataccatacacataccacatacacacacatacaccacacacaccacacaatacacacaccccacaaaaacaaaccccccacatacatacctggcacattacaaatacagcacacacaccacataatacctacaaataccacatacacaacacacacacacacacacagttcagccataaccttcactatttgctcctagatcaagccctgcctgaagattctctgcctctgctcacaccgcactcagctcaacattctcttccttgccttttctgagataaaattctcccaatcctttaacacccagctcaaacatcagcccctcctggaagtatcccagcagccctgcctcatcagagtgaactgccccgaggttcactgggccctttcacttggctgggcccgtctgctggccacccagggctgagatgcctggacagcagagccccacggagaatcccaggcacacctccctccccagggagctcagccagtgctggtccgggagagtaaggcagtggttaagagcttggggtctgcagtcagactgacctggatggaaaccagattctgcccttctttcttatctgctgtgtgtccttgggttagtcagtttccccacctctaattggtgctatgagaattaaaggagaccctgcgggtaaggcaggaagtcccatgcacccagaggctggcacagtgcctgacctagagtcagcctccctaaataacttactcctaatactttcttacagggggtgtgggaggttcctccccaaagagacaggaagctcccagagcaggagctgcatatttggcctctcaggccctgctccaggcctttgccctcagaggtgggatgctcccccaataggccctcagggaggctgagatgaagctgagcagcagtgcccacaggcctcacccaggctctgccctggctttctgccctcaggctaagtgagtgcagcttccggccagagcacgtgtccaggctggccaccggcttgagcaagtccctgcagctgacggagctcacgtgagtgacccacccagcccgtgaggacagcagaggggtgggggcaccctgccagagccacctcagtgactgacctctgtctccaggctgacccagtgctgcctgggccagaagcagctggccatcctcctgagcttggtggggcgacccgcagggctgttcagcctcaggtacctcctcccccgctgcctccgggaggggccatggcatgaatgggagcaggggtgggcactggagtaagaggcccccaggatcatggccccagtcatttcctgtacccacaaccctgccatctggaccctgagcaaaccctgtccatctgtcccagagactccacaaggcacacagagaaactgtccttccccacactggaggcctgtgctttgggatttaagaaaaaaagaaagaaagaaagaaagaaggtttcagaggatactgaactgaggacaaaaataaactgaaacgaagttcttgtctgtctgttcactatgatcattttaaaacactcagaaaaagaagataccgaagtagaaagaataattttttaaaactcctattcccagaacctaggtttgacagttgttcatactttttttatatttgcttctatttttatttttatttcagctgaagcggtttcaagtaagttatagacctcataatccatcactcctaaatatttcaccgtgaagctccaaaaaataaggacatttttttcagtaatcacagttccatcaggacacctaagaaactcagttagcgattccttagtgtcgggtactacctagtctaatctaaaatgtccccattgtcccccagataagacagctggcttttgggatccaggatctgtcacatctggtctgcatttgcacgggatggcgatggtcttctgactcttctaacctgcggcatcactgcccccatcccctcaccacagctttctgtttcatgtcagtgtctgttgacaaaatcagcaactgtgtgtactgcagactgtcctgctcctgactctggtggctttctcatgatgtcatggcacgtgttcctctaaccccgactttcctggaaactggacgttagatcaaaaggctccatgacattcagtttcatgtttgtgcccaaaaaacttacgtcaccgacagagctgtgcacttctcattgcagcctgtgacaaggcacctaagaactgactgttccccaaaataacctgtaaaaattattataaaatacacataacaaaatttgccatcttaatcatttctaagtgtaccattcaggagtgttaagtacatccacttttttgtacggccaatctccggaactcttttcctcttgcaaaactgaatctctatccccattaaacaacaccccatttcccccctaccccagcccctggcaaccaccattctgctttctgtctctatgaattggactgctctaaatagtttatatgagtggagtcatttgtatttgtctgtatttgtctttttgtgactggctcatttcattgggcataatgtcctctggttcattcatgttgcagcgtgtgtcactgtgtcagactttccttcctttttttttttttttttttttttgagacagagtctcactcttgtcacctgggctggagtgcactggctcgatctcagctcactgcaccctccacctcttgggttcaagcgattctcctgcctcagcctccggagtagctgggattacaggcgcccgccaccacacccagctaatttttttttgtatttttgtagagacagggtttcaccatgttggcgaggctggtctcgaactcctgacctcagatgatctgcccgtttcggccttccaaagtgctgggattacaggcatgagccaccacacccagccctttccttttttaaggctgcataatattccattgtgtggatggaccacattttgtgtatccacttatccatcaattgacacttgggttgtccattcaagtgcccaattgacagtccctgctttctttttttaaatattattttatttcaaaaacaatagagatgaggtctcactgttttgcccaggatgatcttgatctcctgagctcaagtgatcctcccacctcagcctcccaaagtgctaggcgtgagccaccatgcccagccagaaagtcccagctttcaattattttggttatatatccagaattgctagagcacccaaaataactttttttttttgagacggagtctcgctctgttgcccaggttggagtgcagtggtgcgatctcggctcactgcaagctccgcctcctgggttcacgccattctcctgcctcagcctccagagtagctgggactacaggtgcccgccaccacgcctgactaatgttttgtatttttagtagagacggggtttcaccatgttagccaggatggtctcgatctcctgacctcgtgatccccccacctcagcctcccaaagtgctgggattacaggtgtgagccactgcacccagccaaaataacattttcaaataaaacttttcttagtctaaaaataatattggttgggggaagtggcacacgcctgtaatcccaacactttgggaggctgaggtgggcagattgtttgagctcaggcgttcaagaccagcctggacaacatggcaaaaccccatatctacaaaaaataaaaataaaaaaataatatttaatcattgttgaaatgtgcagaaaatccagaaatacataaagaaaatagtgctttaaaaattcagcataactttaaagcagtaatatttgacttaattctcttttttcctactttcaaattaatgcacatgcattgtagaaagtttagaaaatatagaaaattaaagaagacataaaataaaaatcactcatgagaattctatcatcttaaacaaccaccatgaacatttaatatattttcctatgttttccacacatctctctccctgtttctttccacactttttttctccaaatactttcctttttttgaaatgcaaaattgggatcatgttttatatacagtttggtttccttacctttgtgatgtaacattatgtgaatcttttcttaaatctaaaaatatcagtggcccagtgcagtggctcacgcctgtaatcccagcactttgggaggccgaggcaggtggatcacttgaggtcaggagttcaagaccagcctgaccaacatggtgaaaccccatctctactaaaaatacaaaaattagccaggcgtggtggcgcatgcctgtaatcccagctacttgggaggctgaggcaggagaatcgcttgaacccaggaggcagaggttgcagtgatctgagatcatgccattgcactccagtctgggcaacaagagcaaaactctgtctcaaaaataaaataagataagataaaaaaataaaatataaaaatatcatttaaaaaataatattttctgtttggattgtcacaacaatagttgttggaataagggtgatgttaatttccttttttagattgatgcctacttgtataattttatagttttaaaatgagcaaaaaaaactcaaaaagcctctaggtcccccccttgacactcctcccccggccccgtcatgtgtgctgattgtctgctgctcaccttgggggggccttatctgtgtccccttctgtgacagggtgcaggagccgtgggcggacagagccagggttctctccctgttagaagtctgcgcccaggcctcaggcagtgtcactgaaatcaggtgagtccagagaagaggcccctttggaattcttcatctttcataagcattgggacttttccttgaccttccctcatcctgtggggtaatagctgtgtcaccagctagttttccatgtccccagggtagcaggagctcctggggcatatgtgaggggctacacatttgttgggactagtgcagtagtcaagccacagtgtcagaggaagacatccccagaatcaaaacaaagggctattggatccaggcagacatggctgggagtccacgctggttgcttggaagtggccccccagatgcagtaacacacattatggctcttcaaccagaaataacacaatgacacacagagtagcttatagcaaaggttttagcatcccactcagctatgttcagatcccaactcagtcacttactggttggagcccattactgtgtctctctgacctcaacctcctgctcttaaaagagtctaattacggccctttgcagggctgggaggattacaagaactggagcctgtaaagatgtctgctgtactgtcaccagccacacagcctgccctgcttcttccttctctcctccaggagtgagcaaggggatgctctggggactttataatctcccatagccctctccccataagcaccccatgaacataacattcaagtgaaggcagtgagcttagagcgcaaatgcagactccagacacatcccctaccccacccttccaccacactgtggtccttgtgcccctccctcagaaaattctggaactgcccttggatccctctaatggctttctgtcatggtctgaaaaggcttatcaacttattaactttaaattgttgaaaagggccaggcgcggtggctcacgcctgtaaccccagcactttgggaggccgaggcaggaggatcactgaagcccagagttcaaggctgcagtgagctatgatcgtgcccaccactgcacttcagcctgggctacagagcaagaccctgtctctttaaaaaaaaaaaaaaagaaagagaaaaattgttgaaaaggcactacttggggtattgtgtgtgactcacggaagcacctactttccagtcctaagctggtccctggcaggggagaaggggacccaggcaaagtgagagttcagagttggagccgggcagcccaggtgccagctaggccctccggggaaggctgcccgacctcacgttggttactgctcactcctcagcatctccgagacccagcagcagctctgtgtccagctggaatttcctcgccaggaagagaatccagaagctgtggcactcaggtgggacccagcaccagggaccccaaggcaggggctggtgttggggagggggcagggctgcttctgaccaatattcaccaccctgcccagagaccttaggggttcgaagtctttacacaggctacagaggtctgaccaacccacttctgaggcgtttcagccccactccaggccccagtctcagctccagtcacccccatgaactttcagttccccgaacaccatcttgcttagaccttagggcatttgcacaggctgtgctctctgcccagaatgttctcttcacgcctacctgcttcacctgcctaactcctcctcatccctcaggtctcagcttaaatgccaccacctcagggaggccccctggaccccaaggcttagtcaaacacttccattatccactcttatagatccctggattcacagcacctctaaatccatatggcacagtttgggaaattaaaatgtcacccttttgagtggatgcagccctgcatgtgtacattctgggaaatagagcatggtaggatctcagcctcacctcacctcctcggctgtgtgtccttgtgcggtgaacaacctgcacaaccataccagctgccccatctggactcctgcttcctagcacttctcataagtgaatagcaaactgtaggacttcatttgatcagcatttatttacccctacaccataagctccttgcaggcagatactgaatcccacatactggactagatgttccaaaactgtcgtctccctgtctgtgtccaggttggctcactgtgaccttggagcccaccacagccttcttgtcgggcagctgatggagacatgtgccaggctgcagcagctcaggtcagcgcctggaaactctgtgtggggccctgagttctctggttgaccctggtacctactccaggccatgtgtgaccctggcattctcacttccttgtgcaggagaaaatcacacttggccagtggaggggagggagagccccagggtggctcaggggagctcttgggtggccccttctcctctcttggcacccccttctggatgtgatgacctctgaggtgtgtccagcctgaaatcctctagaatatccttggaccttttcagcttgtctcaggttaacctctgtgaggacgatgatgccagttccctgctgctgcagagcctcctgctgtccctctctgagctgaagacatttcggtatgtagacaagacattcactcagtcccctttgcagctctgccctgccctgacacctcccgttattcccagccctgggctcagaggactcttactctgtgtcttactctgtggacacaaaccacaggtggccctggagatgatttttaggggtacctagtcgtaaacatgaccttaggaacattgagccacatggcaagaaagttgttccctttttaacactctttcattgtttttcttttaaaataactgcgaactaacacaaagtttcaagaagactgagaactgctgtgtgccatttacccaaattcacccttagagctgggcgtggtggctcatgtctgtaatcctagcactttgggaggccgaggcaggtggattgcctgagctcaggaattcgagaccaccctggacaacacggtgaaaccccgtctctactaaaatacaaaaaaattagctgggcatggtggtgcatgcctgtaatcccagctaattgggaggctgaggcacaagaattgcttgaacccgggaggctgaggttacagtgagccaagattgtgccactgcactctagcctaggtgacagagcgaggctcggtttccgaaaaaaaaaaaaaagaacaaattcaccctttgccaatctttttccacatttgctcatttcttccctccctccttctttcccacctcccttttctttcactctctccctctctccttttctgaaccatttagaagtaagttgtaatcatgtccctttacccgttaacatttcagcgaatttgctagaaataaggacattctcttccataatccagtaaaattataaaatccaggaaatgtgacattgatacactactattatctcaactacagtttatactccaatctcaccagttctcccaataatgttgcttattgcatttttttcccagttgtggatccaatccaggatcacacgtctcatttagtgtcatctctttagtgtctccttcaatctggaacacgtccttggcccttctttgtctttcatagcattgtctctgacatttacaggccagttattttatagaatgtccttccacttgggtttgtccaatgtttcctcatgtttagagttagagtctgccctttgggcaggaatatcacacaggtgatgctgtgttatcgtgccttccatcggggcacatgatgtgtcagagtcctcgggctagtgatgttaactgtgatcacctgtgacagtggtgtctgccaggtctctccacttgcaaatttactaactttccctttgtaatcaacatagattatgtggggagatactttaagattatgtattaagtcttcctcaaactctcattggcaaattttagcagccgttaataaatcttacttaaatcgatgaatcagcatgacagttgcaaaatgtagctttcctaactttacattttatttccatctaactgattacaccaagaagaaactcttgggctgggaacagtggctcaagcttgtaatcccagcactctgggaggccgaggaggaaaaatcgcttgagcccgggagttcgacaccagcctgagcaacatagcgagaccacccccatctctacaaaaaataaataaataaaataaatgtttaaaaaggaagaaactctttaggacagagagatctttgacacttcttcagtatttgctttaaagatgcagagtttgtaataaacaacagtaactagctaaactacagtgatacctaatcctggcttaagttgtgaagttgctacctgaatgactgcggtttaggaaatactgaactagtccatgcttctgcttccaagctctgtggtggcttaatgagttcatggtggaagagatttacgaagggaaggaggtctcctcacattgcccgccacatccctaccccacatccttgccctctgccaccagcattcagagctcccaagacccagggcggctcctgcctgacctgttgccctttgacccccaccaggctgacctccagctgtgtgagcaccgagggcctcgcccacctggcatctggtctgggccactgccaccacttggaggagctggagtgagttgcagagtggagggattggggacaagtggcccagctgagggtgaggggtggagaagagagcagggcgtttgggagggcaggcaatgagacttcaaccaatgacccttcccctgatgaagtgcagcagttctgggtgtggcctggggaaggaagagcaccacagttttggtctgaatttcgccactgactcacagaggggctgtgggcatggctgttccactctgggctttgattgccttatctatgaaaatggggctcatgagccttgctctgctgggctggctgtgggagtcaggctacggagagggctgaagaacaagagggtgtgtgtgtgtgtgtgtgtccctagtcccccagcttcctctctgcagccttcatccagggcatagtttctcagctgggccagctgtgactatcatgcctacccagagcctgagccctggagctagggatacccatggggaacctggacagcgagggtggcccagggcatgcagatgcagagttggcctcccaggggacagagcaggagaggggagctgacaggacagctcagctccagggctgggcaggctgcgctaacccttgcctctgcctggtcttctgcagcttgtctaacaatcaatttgatgaggagggcaccaaggcgctgatgagggcccttgaggggaaatggatgctaaagaggctggagtaagtagtgatggtggttgtgggtgagtgagtggtgggggtggttaatggatggtggaagtgggtgagtggtggggttggttaatggatggtggaagtgggtgagtggtggggttggttaatggggaatggggtgagtgagtggtgggagtggttaatggggaatgggctgagtgagtggtgggagtggttaatggggaatggggtgagtgagtggtgatggtggttaatggggaagggtgtgagagtggtgatggtggttaatggggaagggggtgagtgagtggtgatggtggttaatggggaagtgttgtgagtgagttgtgttggtggttaatggggaaggagatgagtgagtggtgttggtggttaatggggaagggttgtgagtgagtggtggcgttggttaatggggaagggggtgagtgagtggtgatggtggttaatggggaagagttgtgagtgagtggtgttggtggttaatggggaagggggtgagtgagtggtggggttggttaatggggaagtgttgtgagtgagtggtgatggtgattaatggggaagggttgtgagtgagtggcgttggtggttaatggggaagggagggagtgagtgatgatggtggttaatggggaagggttgtgagtgagttgtggggttggttaatggggaagcgttgtgagtgagtggtgatggttggttaatggggaagggttgtgagtgagtggtgatggtggttaatggggaagggggtgagtgagtggtgttggtggttaatggggaagtgttgtgagtgagtggtgatggtggttaatggggaagggttgtgagtgagtggtgttggtggttaatggggaagggggtgagtgagcgatgatggtggttaatggggaagggttgtgagtgagtggtggggttggttaacggggaagggggtgagtgagtggtggtggtggttaatggggaagggggtgagtgagtggtgttggtggttaatggggaagggggtgggtgagtggtgatggtggttaatgggaagggagtgagtggtgatggtggttaatggggaagggttgtgagtgagtggtgatggtggttaatggggaagggggtgagtaaggggtgggggtggttaatagggaagagttgtgagtgagtggtggggttggttaatggggaagggggtgagtgagggatgacagtggttaatggggaaaggagtgagtgaggggtgatggtgcttagtgctgcatggtcagtgagtagcatgcctaggaacctttgcatgttttgtgaacacaaaccgccatgtttctggatggacccaggtgagctgaatgcccttacatgaccttttactttctattctggatctcagtgccagcaagaaccttggtcataggaaacagaatacacaactcaaagcaatccaagacagaaatatattggcttatgtcatggaaaattacgaggccaatgacttcaggcacagctggatccaggggttctatatttgtcaggcttctctctcacacacttcactctggcccttactctttctctgtccaccttggcttccttctcaggcaggccatccctgcacctgcaggcttactttctctcagcttagtggaaagggagtaccattctctctgtggttacaacaaaaggtcctagactgagtctcactggactagcttgagtcacctgccccaccctaaagcaatcactgtggctgtgagcacaaaatattctcctcactggccagacctgggcgcatgcacaccctatcttctggacttagaggggtggtatttcaggatgtgagtaacagaagaggaaagaaactctgggcagaaaaaaatctacagatgtccactacatttgtctacagttgtttccttggtaactggcagcttttactactctcccccataatttgaagtcatcaaattcttagaaatgccagaaacagcctcagtctaaaagacaggtccccgtcctgcacagattcctgtttagacagtatctggacagaaaatttaacagaatatcttctgcttttcatctcttaactttttctgatgaccaaaaaagttccatctttctagaaatatgtaacaaataacatgaaatgccccggggatgacaccccctgagaaaacttctgttgaacggtttgtgaatttttctccagatttttttttctacatatgttttgaattcagcttgaaagtagccttttgactttttgccccttaacattgaaattcttccgcttgtccctctttgcttgtcctggggagaggatcaggtaaaaggagaagagggattacagagacctttgaccacagggccctcctgtcgtctcactggtctgtttctttgcccactgtccatgtacctgcatctcggctcagccttctggaagcttttatttaggggattggaggcccagtgaggtcattcattggctcattcatgcattcgacaaatatgtactgagctgggcacctgggccggggacaggacagattcatccatgcccctgggggcctttttcttcctcctgatttcccaggcaccatgtgctgctccttacctcctgctgccttagttgccctatctgtaaactgggcataatatcttccctgtccgaaggaaggggatggatcgtcagtgcccggaggtctcttcccatctcagatctgtcatttccaagtgtaactccccacaggcagttaccctcaaatccagtcagcttcttccagctgtatacctgtgatggagtgggtaggagcatggaccctagttaggagcctcactgcctgggttcaactctgggtggggtaactgacacttccagtttgcttggagctttccccattttggcacccaaagtcccacatccaggaaaaactcttctgttctgagccaaccaagacagttgaccatcttttgcttctgcctcttattttattatttatttatttgagacccagtctctctccgttgcccaggctggagtgcagtggcacagtcttggctcactgcaacctccgcctcccgggttcaagcaaccctcctgcctcagcctcccaagtagctggcattacaggcacatgccaccaggcccagctaatttttctatttttagtggagatggggtttcactttgttggccaggctggtctcgaactcctgacctcaggtgattcacccgccttggcctcacaaagtcctgggattacaggcatgagccattgcgcccagccagttctgtttcttaatgtgtgaactcgtgccagtccctcagcctctctgttctttggcctcctcatcttaactttgaggataagagcaatctcccctgctacggttgttgtgagtattaaatgagataatatgtgttacagtcttagagtctggtcagagttcacactctacaagtgctagctattgttattctcctctcctgcctaggctgggggcctctagaagtacaatcgcctgggtcacatatggttggggctcaggaatgggagttctatagtttttggttctgttcctgaagcagccactttgtgtatgaccttaagcaagttctctaactctctgaaccttggtgttcctcacctgtaaaatggggacgataataaacccacctttccagatggccccaagccctgagtttggcccacattttatgatcaatgtgtgaccgccattattacggatcattagtcttggtccatgtggttcagaacatagaactgctgcctgcctgacctcagtaattcatgcagagaaacagcatttggacctcccagtacagttcattttgtagaatttttacactgtgtggatataagtggctgtcttggaggtccctaggcttgctaagcacagaggcctcagacccccagactggacagtgccccacccccagatgtcaagttcacctggcctcctcttctccagcctcagtcaccttctgctgaacagctccaccttggccttgcttactcacagactaagccagatgacctgcctgcagagcctcaggtgagtgaccgagcggccccatgggaatgagtgggaagaaacacttcccactcagttgggaccacatccagggaagcactgaggccacctcccaggggatcctttgcggatccctcccaggcccatccctgtgccctcccaggtgggtgcccactgctcttgccttctaatgccatcagcttcctcctggttacaaaagtggcctaaagggcttaggcccacgtcgtagaacaacccttgaggcacacacacagttcaccctgggctcttgttaaaatgctcattctgattccccaggtctggaattctgcctagactgtgcttttttttttttttttttttttttttttttttttttttttttgagttggggcctcactgtgtggcccaggctggagtgcagtggcaatgcacaggtgcaatcgtgttgcactgcagcctcaaactcctgggcgaacgtgatcctcctgcctcaccctcctaagcagctgggactacaggcctaaggcgttgcacccaaacttagcatttctttttttgtttgtttgtttttgagacagagtttcgctcttgttgcccaggctggagtgcaatggcacaatctcagctcactgcaacctccgcctcccgggttcaagcgattctcctgcctcagcctcccgagtagccgggattataggcatgtgccaccacgcccggctaatttttgtatttttggtagagacagtgtttctccatgttggtcaggctggtcttgaacgtccaacctcaggtgatctgcccacctcggcctcccaaagtgctgggattacaggcgtgagccaccacgcctggcttcagactctgcattttctaacaagcttccgggtggtatcaattctgggggccacggtcagcactttgagtagtgtgggtctagactcagatggggtggccttcctacactccctttgtgatttcactccctgctgctaggataaataaacatgacacttactttcaatgtgatttttcaaaacatgaaatcttgtgactaaaaacaaatccaagcagtgacacaaagcattgctttgtttatatccaagtacacctcctaccccctacctcgggcagagcagagtaggtaggaaatgaggttagagagttccaggaggttatatcatattggaccatttcacccaaaattaatttactgaaaggtgatccattaaagtgtatttatttatttctattttatttttattttttgagacacagtctcactctgtcgcccaggctggagtgcagtggcatgatctcacttcactgcaacctctgcctcctgggttcaagcgattctggtgcctcagccgcccaagtagctgggattacaggtatgcaccaccacgcccagataatttttgtatatttttagtacaaatggggtttcaccatgttggccgggctggtctcgaacccctgacctcaaatgatccacctgcctagactccgaaagtgctgggaatacaggtgtgaaccactgctcccagccccattaaaatttaatttgcaaaataaaagaaagtaaaaacaacatgcaaacaaatacttcccaaggggctaagaccatttgcctcagctatttattgttttttcctacccaggcagagcaaggtcagggctcagtaaagacaataccctgggtttaaggaaaaacctaccatttgcatggatgagaacacatatgcccctgagaactgatctgcgtgaatcagagaatcccacgtgaaagtggcattcagccgggccagcccggagatccctgacacagaggctgaggtgaagcttggcaaagaaatgtagagactcctcctgggccaggggctctggatttgtttccacccagcctgcaagtccctaagtctctggccagtcacagctcactgctggctctcaagttttctcacctggacactggggacaataattcccaccttgctcaccactccccacctgccatgacccccagaagttttgctaccagcatatgaattcctgggcgtgtaaggctttgcaaactgtagagttcttagcacagcacctgcaaaggcctttaagctcctgaaagcctcttggtctattccctgcttttccagactgaacaggaacagtatcggtgatgtcggttgctgccacctttctgaggctctcagggctgccaccagcctagaggagctggagtgagttgcccattctgcccccagacccaggacaattttggccgggaaagatgacaagggcaaggggctacctgagcacgccctttgcttcttcatctcatctccttcacccacttctacactgtgtaaacaacctggggcctagaagcttgggggacccaaagacaggatgtaagagtgtcaattgtagcaagagggatttaggtcagacaatggggagaacatcctaaacagaagccaagggttaggagctgtcactcaacatggggtgatggggctctctgtgtgagtcgaggcccttcctgggacttcagcctccccttctttttctgggagtggggtgtggacaagatgagacggcagaaggctgatgaagctgttttctcccccaagcttgagccacaaccagattggagacgctggtgtccagcacttagctaccatcctgcctgggctgccagagctcaggaagatagagtgagtagccagccctacagaggagggccacaggggtcacacgatggtcctaggagatactggcccctagctgaggccagcatggtaaaatctcccctgcgccaacctcagtgtccaggcagtggggctcggtgacctcctggccctcactgcgggaccttaagccaccccagcccctgctcttctctgggcctttctgcctcattgtctgggtaggtgtgtggtgtcggggggttgtctcttaggccccctgaagcaggggtggcagacccagcagatgtgctggggtgtcggggagagggggcatcagaggacctgatggctgcccccctcccacagcctctcagggaatagcatcagctcagccgggggagtgcagttggcagagtctctcgttctttgcaggcgcctggaggagttgatgtgagtgtctgcccaggtggcctctgccctctgtgccccccaggtccacctggcctcctctcccgcagtgggcacagggcagggcgggggtcccgagtgggcaggcccagtactcaatgctcattcctctcctcttccaggcttggctgcaatgccctgggggatcccacagccctggggctggctcaggagctgccccagcacctgagggtcctacagtgagtggccccctgcccataccatgcagggctggtggggaggagggtcctcgggagcagtgggggggtccaggcccccatcagttgagctgccctgccccaagtcaagcttggcatatacccactctcctgcctgttccttccctgcctctgatgtctgcagcaagaaaatcaggaggcccagcctagtcctggctctgccactggcccctgcctgaccttggccaaacccctgccccttctcagcctcagtttcttcacatgcaaaagaagtacaatgatcccagttcattgtgccctgtgagcgggtccctgagggcgaatgagaaatcctggcagagggcttcgcaggagcacggtgccaatcaacgtggcctcagcacttcacaaatgacctcattgcagccccatggcagcccccagagtcccagagtgctgggaccttgttttttttttttttttttttttttagatggagtctctctctgtcacccaggctggagtgcagtggtgcaacctcggctcactgcaacctccacctcccgggttcaagcaattcttgtgcctcagctaccagagtagctgggattacgagcatgcccaccatgcccagctaatttttgtatttttagtagagacggcatttcaccatattgcccaggctggtcttggactcctggcctcaagtgatccacccacctcagcctccaaaagtgctgggattacaggcgtgagccaccatggctggctggtgctgggacttttatgtgctcccttttccaggcaagggaatgaaggccaggagaggtgtggagaattttccttactcatacacgaaggacccaggtgttgaatttgggatctcagaccccaaagccagggtccttgatacctacccaggtcctgtgtggatggggaattagccagagactgtctacgggctggcactgcagcctgagacaaggctgagggtggggctctggaaacgccagtccctcaggctcctctcaccctctcctctttccccagcctaccattcagccatctgggcccaggtggggccctgagcctggcccaggccctggatggatccccccatttggaagagatcaggtaagtaggggctgcccagcccaggcacggggacagtcctgggcgggtctgggggttcctctcacaggtatctcccctaccctgcagcttggcggaaaacaacctggctggaggggtcctgcgtttctgtatggagctcccgctgctcagacagatagagtaagtagcctcccctgcctgcctaggggaccagtggcaggctgagggcagcccttctctgactgagcctaacacctggggaggcctttgaagtgatagaagccccagggatggtgggggcctggctcaagaaaggaagtctttcctaaaacgcctagcttaccccagaccctggtggctctggaggcaggacctgctagatcccctgactcaaacaacccccatcccatcccatgcccttctccatccccagcctggtttcctgtaagattgacaaccagactgccaagctcctcacctccagcttcacgagctgccctgccctggaagtaatcttgtgagtgattggaagagccctgagctggctgggaaaaggaaaagtcgggaggggtcgggggagttggctccagcctgctgtgtggcctggagctgctcccatcctctctggccagtcctcccatttgtaaatggggaagatcatccttactcagacatcctctcaaagacattttaacacttgagctgcaggtaatgttgggtaaaacagtttaccttcttctgcctttttccccatttgtagattggtgggaggggaggtggaccagatggtctttaaaggtttttggtccaaccttccttttgggaggcaactggatagaccaccttgcctgcttgatgaaacctccatttatgaaccacagttggtagaaacagtggctaaagccaggagaaagccacccccagacctgctggctggccgtgcttggctgtctcttagcaatcagaatcccccagaccttggggctttgcagtgctgcctcatgagtaaactagaattctaggactagcctgggaccctaaccatggtatggaggacaaagctgtttcctaaagaacaggacacaagtgattacgagaagattttagtttgcatcctaaaggtcttaacccttctcattacaccaaagcgaaagtctcagatcagtggtaattcatctttaacacctaacactggattctccctttttaaccaaaagggttaaaaacccaacatcttaggaagggcatatgttccaactagaagttaataccattgtttgtactatatttatttttgtaactaccttctatatggagtctgtaacacaagttttccattgatagtagcaataaaagtttcctttcaagatttttttttttttttttttttgagatggagtctccctctgttacccaggctggagtgcagtggtgcaatctcggctcactgcaacctccacctgccgggttcaagagattctcctgcctcagcctcctgagtagctgggattacaagtgcccaccaccacacccagctaatttttgtatttttagtagagacaggatttcaccatgttggttaggctcgtctcaaacacctgaccttggcctcccaaagtgctgggattacaggcgtgagcaaccacgcccagccaagattaattttttaaagtaagaaaaaagagggggccaatttaaagaaaaatatgatgcatcttaaatacaggaggtacatgtatgtggcaaaaatggcaacatcttgtgaacaacgtcatgattcaaacttgacggggaggggagcagggaggaaggtaacctgcaccctgacgtcttcaggggaggacacacaagcaccctatcaggtggcctctcttgaaaacccttgcccccacgactggcaccctgctttccccattcactgccttgtctccacccctcgacctccttgctctcctgccgctgactttgggacccctaccctgcaggctgtcctggaatctcctcggggatgaggcagctgccgagctggcccaggtgctgccgcagatgggccggctgaagagagtggagtatgaggggccgggggaggaatgggacgggctaaagggggacctacatcccgggaacaccaagaggccactgggtcagtcccctgcctcccagaaagcccttccttgagttgcacactctggcctgttccaagcccctgccaggcttagttccccctgggttctagccttcagccttcctgctgcacctgccaccagtcccctgttgtcttttgggttccctgagaaggtagtgtgggagactgtgtcccctgaccttggcctgaggaagggacctaggaaactctcacacccattctcatggccgtgtttctctttcccctcccctcactgtccactgagaagcctggagaagaatcagatcacagctttgggggcctggctcctggctgaaggactggcccaggggtctagcatccaagtcatccggtaacagaggcctgcaggggcagggatggtgggtgggaggctacaccaacccccagatctaatgggactccctggaggaggcggcagggcctgggctggggattatcaaaggagacttggaccactccaccaagaatttggcagcaagcagacttggatcaaaccccagctctgccacttgccaactgtgtaactttgtagccataactcaacctctctgaaccccaattttctcatctgtgaaatggggatactgatagtatctacctcagagagttgtgaagactaaatgagcatataaagcactgaacccaatgcctggcacatagtaagcacttaaaatggcagctataatcagagccatcacatacagttgtataggttgtgcactgcacaagggcattaaacctaaggggcaccattcacattgtcaacctgctagatttctagcagatgagagtaaagtaccttgttctaccaaaatcatatattatgacaatttcagacagatggaagtaaaacatcttgaagaaagagggtcttttccttatttgcacaaatgtgtcatatgagtgtggccttagctggcatcactatctcccagggaggaaggttgagttggaggactcaggaggcaggtgtggggtacaccctctccctaggtcagctatgctggtctaacacctgcctctgccaggtaactctaggcacagctctacctttttgggcctcagcctcccaatctgcagatacgacagatggcaaagatgggaggatgaatgagtgcctatatctgtgccccacagcctctggaataaccccattccctgcgacatggcccagcacctgaagagccaggagcccaggctggactttgccttctttgacaaccagccccaggccccttggggtacttgatggccccctcaagacctttggaatccagccaagtgatgcacccaaatgatccacctttcgcccactgggataattgactcaggaaagaagagcctcggcagggcgctctgcactccacccaggaggaaggatacgtgtgtcctgctgcagtcctcagggagaacttttttgggaaccaggagctgggtctggacaaaggagtaccctgcattacgtgggatatgtgtgatcaattggggacatgcgacacacaatgagggtgtcatgacaatgcatgacacgtacggttatatgtggcagtgtgaccccttgacatgtggcgttacatgaaagtcagtgtggcacgtgttctgtggcatgggtgctggcatcccaagtagcaggatacatgattgttggtctatatatgacacatgacaaatgtccatgtcacaggactcatggctggccagatgacctcaggctggcccaagatctaatttattaatttttaaagcaaatacatatttatagattgtgtgtatggagcagctaagtcaggaaaagtcttccgcccgagctgggaggggagagtgtccatgcactgaccagtccaggggctcaagggccagggctctggaacaagccagggactcagccattaagtcccctcctgcctcaatcctcagcctacccatctataaacttgatgactcctcccttacttacatactagcttccaaggacaggtggaggtagggccagcctggcgggagtggagaagcccagtctgtcctatgtaagggacaaagccaggtctaatggtactgggtagggggcactgccaagacaataagctaggctactgggtccagctactactttggtgggattcaggtgagtctccatgcacttcacatgttacccagtgttcttgttacttccaaggagaaccaagaatggctctgtcacactcgaagccaggcttgatcaataaacacaatggtattccacgtc

SEQ ID NO: 15687 - DNA, 35511 bp, Homo sapiens
ctgacttccttctgcgtctgcacaggccctgggcaccagcagacaggctatgctttcacccacctcagcctgcaggagtttcttgctgccctgcacctgatggccagccccaaggtgaacaaagacacacttacccagtatgttaccctccattcccgctgggtacagcggaccaaagctagactgggcctctcagaccacctccccaccttcctggcgggcctggcatcctgcacctgccgccccttccttagccacctggcgcagggcaatgaggactgtgtgggtgccaagcaggctgctgtagtgcaggtgttgaagaagttggccacccgcaagctcacagggccaaaggttgtagagctgtgtcactgtgtggatgagacacaggagcctgagctggccagtctcaccgcacaaagcctcccctatcaactgcccttccacaatttcccactgacctgcaccgacctggccaccctgaccaacatcctagagcacagggaggcccccatccacctggattttgatggctgtcccctggagccccactgccctgaggctctggtaggctgtgggcagatagagaatctcaggtgagtaagagtggaggaggaccggggaggggattgggcttttgggggagcagaggccaaccagtctagcaaacctctgccaagaggactggataagaatcttgaatatcagaacataatggcctgcaatgcaagagaggaagctccataccttgacaggacctctggagtccaaatggatcctcctcttgtctgtggtttctggactctcagtctctctgtcaatcatgggctgaaaccacagatccaggctgtctatagaggctggtggactttgggcaagtatatggagcacacacatgcacactgtctaggccagagtttcttcgttcctaaaacgaatctgtaacaatagccaactcatatggtcattgcaagaatgagatgggatggtgcatgaaaaacattttgtagcacagtgcctagcacagagcaaaggctcagtgtgcatattagctagagaaaaggctaggctgcagtaacagagaaacctcctccccaaatacagtaggttaaataatgtagaattttatttctctctcatggaagagtcagaggtaggtggtccaggtcagtggaatggctcagctccacgcagtcatgcaggtacccaggtccctcccattttgctccattatccccttgggaatcctatctgcacagtcaaagctacgtcatgggtatatctgtgctctggcttgggaacaaggaaagagcatggaggaacatgtcaatgcattaaagttcagtcctgaaactaggatacatcccttccactcacattccattggtgagaacatagtcacctggccacactgagctgcaagggaggctgggaaatgtgatctctggctgggaaaccatgttcctcatgatagctctattgctgtagatgaagtggagaatgggctttggtggacgattagaagtctcggccataatatgtatttgttagtactactgtattaagccccatctctctgaggggatggcgatgacttctcagctctgcccagcactgatcctctgacacttcgcttcttcttatggcagctttaagagcaggaagtgtggggatgcctttgcagaagccctctccaggagcttgccgacaatggggaggctgcagatgctggggtgagccaggccttggagctgagaagggtcttcagctggggatgcctggtactctcctccctctccttaatcctacacaaggcagattcctggccccgcccttttcccctcctcgttcctccccaccatctttgcttactctgtaggttagcaggaagtaaaatcactgcccgaggcatcagccacctggtgaaagctttgcctctctgtccacagctgaaagaagtcaggtgagtgatctccaggagggctcactgactggggagatgagccactgcccaggtcccagagtccccctggggcctgcatgttcctccaagtctgaccagtagtttttcagtgagacccagagagggaaggcatcagtccaagtactcagtagggctgagtccaaacccaaggctcccagagtccccagagcaaggcttccttcatctaatattttagactgtcttggaggagcatgagtgttaaggctccctccctctttctgaaatcccaggagaagggatagcagtgcgtaggcaggaatcaggcactgtgggtacacataactacatgaagcaccacacaccttcacatttgttcacacatgtctacacttgcacagaagtacacaggcatatgcaagaatatgcacccacacatgcccactcataggtgtgcacatgtatgcagcgcacacatgcacctttaactacatgtacacattttgatgccagcacactctaactaactaagcttgtatgcacaaatatactcctgccctgtgtctgggactcagtaccatggggaggagtgggaccagtgaccctcctccctggcagaacgctgctagtttatatggcacctttatgacatttagagaaggcaccacttcatccacacagatgcagcctgtcactaaggttcagcacttgttgagtgaaaataataagttggaccacagtccctattgtcgtctcggctgggcatctgtgaaccgtgattaagccaaggttcagaagtactgaacttgttgacatttttcttccctggctattgaaagtgactttaattttgtctttcatcacccaccattgttcttaatcaccctcactcccctcaactcatctgtctccccagctaggaacccaggcaaggctggcttgtgaacaggtggggaaagtgaggtcagagaggaatgcgcttggctcagggctctgggtgagtcagggccacagccgaggctggaagcgatgtctgcagcgtcccagtctagactttactcattgcctggggggcctatcccaggcacatcccaggcataagccctgggagcagggtgctaggtctcctcattgtgcctcatgaagaggccgtcagtctgtcttctagatcccttgagccgccaggcaaaaacttccccataggaacagaatagacccagaattgaggccagcagagggtctttcctcctagccgtgcctgctggaatccggcgagcaggccatcagctctttctgggcccctgtcttatgtctcccacatgagggtggccatcctgtcacttgctaactggggcttgcaagtgccccaaccccagggcaaagggactgggccttggtctcctcgcagttttcgggacaaccagctcagtgaccaggtggtgctgaacattgtggaggttctccctcacctaccacggctccggaagcttgagtaagtgatctttccactgcctctgcagcccagtccctctctatacctgattcaccccactcccttgcaaggcaaggaaggtctggggcccctggggtaggggattccactcctgacacctttgccacaatcttgcagcctgagcagcaacagcatctgcgtgtcaaccctactctgcttggcaagggtggcagtcacgtgtcctaccgtcaggatgcttcaggccaggtgagcagaaggaaagggatcttggccttatgggccttgagaaaagaggaggggaaagtgggatgggaaatggaggaggcccctcgtctgcaggataaatctgtgcataccctactgttttactcacagctttaccttcagaacctagctcaggcttggcacctggtacttggtatatattgaattaatggatggatgaaaagatggatgtatggatggatggctgaaaagatggatgggtggatgaaaagatggatggatgaatggatggctgaaaagatggatgggtggatgaaaagatggatggatggatggatggatggatggctgaaaagatggatgggtggatgaaaagatggatggatggatggatggatggatgaaaagatggatgggtggatgaaaagatggatggatggatggatggatggaaagattgatgggtggatgaaaagatgaatggatggatggatagatgaatggatggatggatagatggctagctgaaaagatggataggtgtgtgaaaagatggatggatggatggatggatggatggatggatggatggatggatggatgaaggaatgagtcaacaagtctacgaagcacaggcatagccaaaggaataattagctgtgtgttgccctccatggtgctgaaccaatatagccagttttgatcatggggtaggttaggtgtcatttttcttactcataaaaatttctattaaaaaaaattcagccgggctcagtggctcatgcctgtaattccaacactttggaaggccaaggcaagaggattacttgagctcaggagttcgagaccaacctgggcaacatagtctctacaaaaaatgaacaaaattaatggggcatggtggtgcatgcctgtggttccagctatttgggaggctgaggtgggaagattgcttgagccgtggaggttgaggctgcagtgaggtgtgaacacaccactgcactccagcctgagtagcagagtgagatctccatctcaaatttaaaaagaaaggaaaaaaaaaaactcacaacattcttaatttttattatatttcttgtgaaaattgtttttctgactttttaaaacactcttgcaggattcatcaagcaaagacataatcagtatttcacatgcctgatttaaaacacttttgctagttccgttatgtttccctgtcaattgcaaaatcagctttatctggatgtttgaacatttggggcagaaaagggtgtgcctgtggtgggtgatgtgctggtttccagtctctgggtttcatggcttggtatctgatcctgcagggaggcggacctcatcttccttctttccccgcccacagagacaactgcagagctacaaaggtaagaagccaagaggcggtgggcctggggccatccttagaagcaacttgggctcaggcagttgaggggaaaggtgaccaagagactaggaagagctggggtatgggaattcttcctgctactgctgcactgaggaatgaattactgcttaggttggcaaaggattttaacttcctctagcgtgtccagaccacatctggtccctgtggaaggaagcatccccagaagactcagaggaaggcaaacccttggggagaacataaagatactgttagactggcattactagatggtgaaaactctggaaaagcccttacaactgaaaaaagacagggagggcaattatggtacctacatcttagggttgttctgagaattaaatgagttactacacttaaggagtttagagcactgttggcatgcagtgggcagtcaaatgctggctattccagctgtgcatggattccagcttggccagtcttggatgggctgagaaaagggagctgcttttccctaaaagaccatcccaactgtgctctaccacactttgctctcctggctaagactcagagacagatgtatgtatgcccctgagcaatctctttcccttctctggatctcgattccttgcttgtataatgacctggtagtgtaggaccaatgttgctgggtgcggtggctcatgcctgtaatcctagcactttggaacgccaagcacgagaatctcttgattccaggtgttcaagaccagcctgggcaacatagcaagaccccatctctaaaaaaaaaaggcaggcgtggtggtgcacacctgtagtcccagctactcaagatgctgacgttgggaggatcgcttgagcctgggagcttgagccatgatcacaccactgtactccagcctgggtgacagagagggactctgtctcaaaaaatgacccactaggaccagtgtcactttcttttccctctaactgcttaaagctgtgatgctcagtaggatagccactagccccatatggctatttcaatttaaataaattaaaattttaatgctatttcaatttaaataaattaaaattttaatgctattttaatttaaataaattaaaattaagtaaaatgaaattttcagttcattagtcacattagctatatttcaactgctcagtggccataggtggctagtggctcccatagcaagtggtacagatgccaggacatttccatcattgcagaaagttctattaaacaggctggcatggtggctcatgtctgtaaccccagcactttgagaggctgagggggcaggatcgcttgaagctaggagttcaagaccagcctgggcaacaaagtgagacccccatctctacaaaaaaaaaaaaaaaatagctgggcatggtgattcactcctatagtaccagttactcaggaagccaaggtgggaggatcacttgagcccaggagtttgaggctgcagtgaactgggatagagccactgcactccagcttggggactgagtgggaccctgtctctaaaaaaaaaaaaatggttagcaccaatccaaaaagtctgtgaaacctggctcatgatgtcctagcttccctgcatcccctaacgctccctcagcccagtgggagagagtctgtggtttaccatagcctggactcactgcatacagctcatgctcctcgccttctgaaccacagacagcacatccacaaatggagaccatcacatcatcgacaatagcagcttctgtttactaaccttcgattttacacctatgctgggtacttggacatacattgtctcattcaatccttcaggtacctatgtgctagatgttgtcatccgttttagaaaagagaaaagggagccgactgcagtgatttgcccaaggccacatggctatacatggcagagccaaaatttgaataaaggttccatttgacctcaaacctgttgcccctcctgctctgctgaatcacatcttgagcatctgcaagcagtctcctttgttaccgactcactttgggttgtgcttcagggtcttcagcctctagaagccaaggaaagaggcttgatccaccaggccctagatgcctgagcccaggccaatgcttgatttgttcttgccagagctccagacctgcaggaaagtgacggccagaggaaaggggctcagagcagaagcttgacgctcaggtaccttggagggatctattgccttaggagagggatatgatatgggggaaagtccgaggcaagggagagcaggggcagggaggataaagggaaaagcagatgagggacagggaaaggattagccgggtgtggtgcccatcctggatagcccatcctggcttgaataaggagcatctgtcataataacaatagctgcaacttaatggaaccggctatctatatgccgggcattgcactagatgttttacatccattacctcactgtaattcctttagaatctctgtgaagtacacattattattcccctttgagggaggaggaaactgagtctcagacaggttaagtcccttgctcaagatcacccagctactaagaggtgtggctaggattagacccaggtctgtgggccccctgactcccccagcattggaagctggaggggccatggagtaggggctgtttgccctgagcccttctgtcccccactcctacccaaggctgcagaagtgtcagctccaggtccacgatgcggaggccctcatagccctgctccaggaaggccctcacctggaggaagtggagtgagtatcacgggaagccctggcgtaggagccaggaaaggaggttggagagggtgggcagggcctcgcctttgggtgggtggtgtgggggaggggcatgctgcctcatgaagaatttgggggaatcagatcattgtaacagctgctactattcagcacttgtcccgggtcaggtgctgtgctagggactgtacatgcctcctcgcattcactcctcacatctctgtgatgtaagcactgttactgtcctcattttatagaggaggaagttaagctgcagaaagataaacttgctcaaggccacacaggtaggaagagtctaggctagggttcaagcccagacagtctggctcgcagcctcatcctcataaccactgctacctctcttgctgagatctgccaagtagaaaccccaccacacctgggtctgccttccaaaccacagtccctcagggctccccccacccccttcatccttctcccagagtagagtgggataaccttctcttttcgggatggagaaattcccatggcgtccagcccctggctgaagccaataagagtagtgcttggggatggacggaggctctgtcacgaccctaggaggggcgcccctccaggaaacctccaagtgaacatgaaggcagatgatggaacgccaggatgtgttctgggtcgagtggccccacctcagggtaagacggataggggtgagggttgtcgtggtgatcacctcttgatcctggacctcgtcccattgggagaaccaggacagaattagaaggtggttttttaacaagctcacacacttctacctgcctcaccagcactgagcatgcccctccccgagtgccatcacctgcagaagcagccccatcacccgcctggttacgcagccacctcctagcccccttgcccttctcccacatttagtccctccagatggacctactggtagcgctcaaaactatcctcttttcctccacctttctagtccaacccaccctcatctcttacctggatgaccccctcgccttgccttccttgctggcttccctgctttcaccctggccacttccacctggcagagagtagatcacttttcactgatgcctgcccccttcactccttcccactgctcaggataaaacccacattctaaactcccaggtggtccagaaccctgcccccagcctcctaaaccccatctgaccccatccttccactcaatctccaatccagacacactggctctctttcaggtcctcatatgtgttatgccacagggcctttgaatgtactgcttctaccaccaggaacacccttcctccatctctcccccaaccttttacctactgaactcccagttatttcagcaagtagcttaagcaacaaataagccatccccgactcccagactaggtcagatgcccccataatcatgaagtttatcacaaaaagcaattatgtaacttgcagcataaaggaagagttgagggtggggccttgaaggcaggctgcctgggttcaaatccaggttctccctcgagcaagtgccttaactttactctgcacttaaccactctgcacttgagtttactcatcagtaaggtgaggataattacagtgcccacgtcatcggcactatgaggatgaaataggccaatagtcatagaagaacctaggatgttgccaggcatgtggtatggagtctgtcgatttcagttattatcaaggttcattcctgagagtgacactttgactaaagttagcaaaggaggagtaagtgatggggattgagggaggactccagccccacaatacagtgcattgggccccccgtctcagcctctcagggaaccagctggaagatgaaggctgtcggctgatggcagaggctgcatcccagctgcacatcgccaggaagctggagtgagttgtccaccccaccgctgggtaccagggaaggccctgtagagccccaggaggtccccgtgttcgtaatcagcagtaagggtgctgatccactgccacccctgcttcctcccaactccagcaaagtcaagatggtttgaccatgccttgccttcacctccggcatgagccactgtcttagtccaatcatctagcacccttacatgtgtaaaatgcgttcattatacatcagtggcttgcattccaattcatctttgtagctgccctggagcacggtggggtggggtgttgcactggggaggtgtcagggtgggtgggatgttgcactgtggaggtgtcatgctggggtgctagggtagggagtggtgtgttcctgtggggatacactgttggggtgaggggtggtgagatggaaaggtaggctattaggctgctgggtgtgctgtggtgttgcatggggtgagggtgatgtttgggtgggggtgtcttgggggtcttaggatcaagtgtgggtcgggtttggggagtgttgagattgggtagcagtggtttggggcctcagctttggatttcaatcttcgctctgtcacttagtagcattgtgaacctgggaaagtaattgaatgtctctgggcctcggtttcccctctgtaaaatgggatcacatgaaaccatatatgtacaaagccttttgtacagagtctggtatagtcagggctcagaaaatggtggttattttacagatgagaaaactgggggtcagagaggtgaaaacactgagttcttgctgtcaagctggacaactttattttccaaatgggatgggggtgtcatgcattttttggcttactcacacgcaccagaatcctttgagatcccctggcaagggacctaggacatccaggagtgacagccagcaagctgctgagccacagggaggggctagagctggctggggctgggtacctcagccacatgccaacggctgccttctcctgctctccacagcctcagtaacaacgggctttctgtggccggggtgcattgtgtgctgagggccgtgagtgcgtgctggaccctggcagagctgcacatcaggtgggagctccctcagaccacggtacccatccccccccccatcatgctctctctgaagcccttggaattccttctgggcccaggccttgggacgggcagaagatgctgctgctgtcccacccagaccccgttacagccggcacccctcttcctagctgctgtggatataggctgctcatggtttatacctctggagaactacccttggctgataagaaccagagacgcctggcagggtacaacccccactttcccctaacctagagtggccaatgacagaggcagagggcacaactctccagcccaaactctccagtgggacaaagctccctgggagactaggccaaggacttgctccgtttggcttccctcagtcccttactgtttctcctgagagcagaccgtcagttcatgatgtgcgcaactgacaagtgacatgcgaccccctaccccactcacagacccaggctctgccactagggaacccaatcctatttctgtaagtctcgccgttgagtatggggaggtgaggacagatgatgattaatgtcaactcagttcccactcggaggaaagcctcattctcaacccagtagggtggtccctgctttaaacacccctcaagggaggagagggaaaccgattcacccaaaaggtagattaggggaccttggttcactgtatatgatgattcaataaagggtccctagtgcattccaagcgatgccctgttcacttccaggaacttatactaaataaattatcacgattgtgcaaacacatttagctgtagggatgttcacctcagtattggttataataggaaaaaaaaagaaaatagctggaatgtttaaccgagggatattagttagactaagttacttccagagagaactcagtggaaccatagaaaaaaaaatgataatataggtgcagtttcaatatggaggggtgacggggagttattaagtaaacataaagaaatttctttagagacaggatcttgctctgttaccaaggctggagtacagtgacacaatcacagctcactgtaacctccaaatcctgggctcagcaatccatctctcttagtctcccaaagtgctgggattacagtcatgagtcactatgcctggcaattttttttatttttagtagagagagggtcttgctatattgaccaggctgttctcaaactcccgagctcatgtgatcctcctgccctggcctcccaaagagcaaggattataggtatgaaccactgcaccaggccaaacataaaaattttaactcattatcttaaaagattataaaagattataataaagcttttcaagatatgcaatggcagaaagaatggtataatctgggccaggtgctgtggctcatgctgtaaacccagcactttgggaggctgaggcagggggatcacctgaggtcaggagttcaagaccagcctggccaataggatgaaaccccgtctctactaaaaatacaaaaactagctgggcatggtggcgtgcacctgtaattccagctactcaggaggctgaggcaggagaatcgctggaacctgggaggcggaggttgcagtgagccgagatcatgccactgcactccagcctgggagacagagcaagactctgtctcaaattaaaaaaaaaaaaaaaaaaagagagagcatggtatatataatctgttcccatcaataatgatcaagtattaataattatttgtcatccctgcttctagcccttaaaaaactaatgtttaaaaagagaatctatagtttaatcccatgtttgtaaaacaaaaattattgcactagaaaatggaaggtttgaaggactcactccaaaggttaccaggggtaatccacacatactttgagcacagacagaacactgactagcagagagaggggtttcagtctggggctaaaagagagaacacagaatttgttttcttttaagacttgccaggaaatggggcttacttaggcaatagatacatttgtgaaatatctgtggtagaaagatttcagccctccaaaagctcagaggaagtcagaggggagtcagaggaagtggctgcagctggaggcagggggatggaacttgagaggtcctcccgggccaggggtaaaaagtgacaggccgggcacggtggctcacacctatcatcccagcactttgggaagcaaaggtgggaggatcacctgagcccagaagttcgagaccagagtagacaacatagactgtctctacatacttttttttttaattagctgggcctgatggcacaagcctgtaatcccagctactcaggaggctgaagtgggaggattgcttgagcccaggaggtggaggcttcagtgagccatgattgcaccactgcacaccagcttgggcaacagactgagaccttctctcaaaaagaaatagtaacagggagccaataacctctcgcttcctcacccctcttttgtcttcacagcctgcagcacaaaactgtgatcttcatgtttgcccaggagccagaggagcagaaggggccccaggagaggtagggcccgatttcaccccaactccatgctcagtcagggacattcccctctctaccctccacagctgggcagtgccagtcagtcaactgccagggtgacctggacaaattcacggaagagcgggaagtgagcaggcttggcaaaggatgcagccccaaagggggagggtccaaatccagaccacctccgcctctcatggtgcctgaaaggagccccagtgtgtaggatatagacagcaggccagggcaggagttgggtagccagagggggattccgggagactagagccctccagcttaaacccaggggattgcctggcctgtagctctggtcctggtcggaacttctgtatccctttcacacaaggacccattagggtcctggattgccccagcctagcgcatgggtagagactcagctctttgctcccggagcccacccacaatctcttctgtagagtctggactactgaaggctcgattccagctggggctgacatctctgaagcacagatgaggaggaggatgagattaatgataatagcagtcaaggtcaattgagtacttgccatgtatgcaccaagcaccaaactaaggcagttcacatacagtctcccattgagaggctgtgatttgtccagggtcacacaaccaggaagtggagaagccaaattggcaccaaggtctgattgactctaggtggaggatagggctcgatggtggaaggccaggctgaggatggattctggagatggcggacatggcctttgctcagcctggccttggtgatgtccctccagggctgcatttcttgacagcctcatgctccagatgccctctgagctgcctctgagctcccgaaggatgaggtacagtgatggcctccagccctgtgtgtgattccagccccctcccttcccctgctcagagcctgctcccaaacctgtgcccaggccccacatgctccctgaaggacacctgacctgctgtgtccaggggtcatggcctggcttccctacctcctacctcccctgcccagcccaccccagacagggctcacaaggcagccccgtcaaccaccttcccaagcccaggagaccccactccccttagctccctgacccccagcagctgaggggttgtggagactctgaaaagaggtgaaggggagcactgggctccttctgtcatgatcctggtgcctgggcctgggggctcccatcagcactcttccccccttctctcttggtctttgtctgtcctaatctccctctgtccctctgcctgtttctctcatttcttccctctctcatcgtgtatttctgttttatcagtttatttaactgttatttcagtcttatctgtcttcctctgatctgctctctctctctgaggtctctgtgccttggtttccttccatctgtgtctctgcccaccctctgcctatatgtgacatcctgtgggtgtcgtgtgtgttggtccctctttgtccgtctgtctaggtgccagatacatcccagtccctcctctcctgcaagcctcattctctgcctctgtgtctggggggtgggaaagcggctccttcccgcctctgttcagtggggcatgcagcactgtgtttttgtccctgggcaggctgacacattgtggcctccaagaaaagcacctagagcagctctgcaaggctctgggaggaagctgccacctcggtcacctccacctcgagtgagtggtttgtgtgttggaaggtgggtgggtggggccaattacagtgagttagtgttggtgtttgggtttggtttttaagatttagatcaactgttctttccctgctgaagtcagaaaccccttggagaatctggtgaaagttgtgactcttcctcccaagatacagatcccccatgtctgacacgctcggaggctcacccctggtccctcagaggtccacgaacctcagaataagaacctgggggagaccccagctgcccgtgccagatctgctgagatctggcctggcagcccagggctgtgtccagtttcaggaagttgagtaactggaatgcagggaccatgctgccagcaacccactccccacctgctaatgttctcccctcccttctccccacccccagcttctcaggcaatgctctgggggatgaaggtgcagcccggctggctcagctgctcccagggctgggagctctgcagtccttgaagtgagtagcccgctaggcagagcctctgaggctggggcagggggggagcattctctgtcccatccccctctttcctggggttattgtaaagattaaatcggaaaatgcatgaaaattgcccctaatacaatgtaagttctcggtgaaggctagctaatagatgattcttactcagagagtctgtgactcaataatcccacttctgattcaaggtttcacttctggaacctgtctccgcatctctgaacaggcttctgaggccaccctggggagggcaggtgtgggtgcgaagtatgactaacggctggcagttgttattctggccctggggtgccgggaggggctggggctgttagctggggtatggtcagggtagacagggagggtttgtaccagagaggacactcaagcagggtgcccagggctgccaaggatccctgagtacctggcagagagtgtgtaggaggaatccccaaagtttgcctgcaatggaccagagttcttgatccctaaatgcccttggtgcttttggctcacaaagcaccccctcctcccaggcacttctgggccaaagccagaggagcccaggggagaggtcacaggtcctatattccaggctgtctctgtgaacacgctttgctgtgtgattctgggcaagttacatcccctctccgagtccctggttcccagtcggtaaatacataaattgcaggcgtggcctctgttggtggctacgatctctgaaatgagtgctggggcctaaggaccccctgctcacaccctgtttttgtgcaatgctgggaaggaagggagttgccttggttcctgttcagggcctgcacctgggaaggaaggaaggtctaaccattgcaggcaaattacatgaagactggaggttttagtatgtcctcatgtgaccttcttattagtgtggactcgtgacctggtgctgtgagggtccacactcgccctaccagtgtccccgtgggaggggagtgtagcattaaatagtaaatagaaaacaataacaagttgacaggagaccctgaaagaaaggagacactttgttcctgctttctgcacaagagaccctgcattttcattttgtcctgggtaccacccctcccttatcaggtggagaaaaggaggcccagctccagccagaaagcactcctcagatccatcacagaccgagggacccactgggtgcccatctcagctctgtcaccaacatgtctcataaccttgggctagaccttgattctctctaggactctgtttccccatctccaccatgaggacttgcaaggggtgctctctgaccatcttgggttcagtgggttccgtcatctggaaccagggatccctcccccgccctgtgccctgaccacaaagaggatgtgtttgggtcctgagtgacctccattgtgccacccctgtgatctccagcctcagtgagaacggtttgtccctggatgccgtgttgggtttggttcggtgcttctccactctgcagtggctcttccgcttggacatcaggtgagcgtgcctctccgcccccagccctgcccctgtcccccatcccacaggtcatctgctcccacgtgggccccttgtccaccagtttcatgccaacctgtcatcctcagcaccttgggcagtaccagatctgcagagcatgtgatgggcgtccactgaatgaatgaatgatcaaatgaatgaataagtatggcctcacggatgctcaaatttctccaaattcaccattagagagttcattgactctgcctcactcgttctttggatagtccttagagatttttttttttaggattttttttttaattattatactttaagttctagggtacatgtgcacaacatacaggtttgttacatatgtatacatgtgccatgttggtatgctgcagagacttttaagaaaactgggggccaggcgcggtggctcacgcctgtaatcccagcattttgggaggccaaggtgggcggatcacgtgaggtcaggagtttgagaacagcctggccaacagggtgaaaccctgtctctgctaaaaataccaaaaaaaaaaaaaaaagtatctgggcgtggttgtgagcccttgtagtgccagccgctcaggagtcaggagaatcacttgaacccaggaggcgaaggttgcagtgagctgagatcgtgccactgcactccagcctgggcgacagagtgagactccatctcaaaaaaaaaaagaaaagaaaagaaaactgggagcttcctagttgccactggggactcagggacctgtcttaattgtgggagctgatgagaatataaaaggggaggcaccagccagccaagccaccccaggcactcagggcaccgcatccatgattttcaggggaggtctgcttccctttcccttccctaaggacccccaagaatgggaggtgccacagcagatggaccaggctcagttacttaactgctgcgagctcagagcaggtcccagagcctctccaggcctcagtttcctcatctgtaaaatggagataagaataattactggcctggcacagtggctcaagcctgtaatcccagcactttgggaggccaagacaggaggaggaggatcacctgagcctaggagtttgagaccagcctggacaacatggtgagacccccccatctctacagaaactttaaaaattagccaagcgtgatggcatgcacctacttgggaggctgaggtgggaggattgcttagactcaggagatcgaggctacagtgagttgtgatcacaccattgcactccagcctgggcaacagagcaagactctgtctcaaagaaaaaaaaatgtcaggcacaatggctcacatctgtaattccagcactttgggaggctaaggcaggaggatcgtttgagccatggagtttgagaccagcctgctcaacatggcaaaaccccatctctacaaaaaatacaaaaattagacagtcatggtggggcgttcctgtagtcccagctacttgggaggctgaggcagtaggatcagttgagcccggggaaggttgaggctgcagtgagccatgactgcaccactgcacaccagcctgggcgacagagcaagaccctttcttcgaaacaacaacaaagaagaatttcttacctcattgtttattgtgagaatcaaatgagaaatgtcgatggtgtgctttgcatgtgacttgatacatgtaattgttgcttaatctattccttgtttgctaagaaagcaggccaccccaggccctccttgccctgaccagtctgggttcttgccactgccagggaagttggtctttgaccattttcaaactgctgcttcctctctgcttccagctttgaaagccaacacatcctcctgagaggggacaagacaagcaggtgaggagggaacgctcggggtgggggagtcccctcccgctctggtccccgtctgttggaggtccccccacccccagacccatgctgaccactcagctctcagttaaaccacccaagtccggcacactaggtttaatcaccacttcagtaaccaccgccccccccataaattgtcagtaatcaactgccctgttttccccttggaaggaggcaatgcagatgggaggaagggagggatatggttgggagaggtcccagagcagggcaggtgcccgcagattgctgctgtgtgggaggagacaggagaacatttgtgcttctgcgtttcggggaattttgtagacccaccgctccatacatgtcactgccctttcacgctctgaaggcaggggccgtgggtgctctgaaaaaacattttccccgtcttcgcagtaaacaaccaatactagtttagctcttcatgatgttcccggctgccctctagtgggaccaggcctcttggcctcacttgggagcagtggcagcggacagggtgggcccatgtgcagctggctgggtggagagagtcacagctagtgtgtcaagaaaaggcactgccgtacagatgggctgtcaggagtcaggggtggctcaagcctgggtggtcttgcttcccaggataggatctctgtttctggggaacccccgggttcttgaggcccaaagaactgacgtacagggaggcagaagtcatgtgatgccaagcagtggtcagagaggctctgtcttgggtcctcctgcctgctcacctggacaggaacaagctgctggcttttctaactcaggcttcccttccctgagcctcagtttccccatctgaacaatgagggactgagctaggatctagtgactgcattgtctctgagatgccttccagccctgactttccaagtctgggagtccaatgtgggtgatctgaactttcctttctaaacgatccccctcctaggggtatatgggctgggctgggagtccgagggggtgatctgaactttcctttctaaatgatccccctcctagggatatgtgggccactggatctttgccagacttcccagctgcagccaagttcttagggttccgtcagcgctgcatccccaggagcctctggtactgtcccagcccttcttgtttgggggtaaccataatagggatgaggcgtcagagggggcagagctggcagggggctagggctggggattgggatagagggaagagagggagtttaagagaaaaggaaaagaaagaggcgtgggtgtgaggggtgctgggagttggggagctctggcccctgacgggcagctcagctggcccatgccccgcattctccttggagagaagattccacatttctgtgaagcaaacagagcagctcagccactccctgcctggggtctccatctgctctgggggacacccactttccagaaagaaaggggttggcctgtctccccactaatacactccccatctgcaagctctgccatgagaggctgtgagaccctgacttggccccacctctctctaggcctccagggaagtggaggcaagtgaggccctgggaaggacatttcaatttcactgttagccccagggcaatggggagccacgggggtaacagggagaggcctggtcagatgtgcagtgttaaaatgtgagacacttgtggggcagagagggattaaagggaggcaagagtggaagcccagagggtgttaaatggtcaaggtgagtgaggatggtggcctgggctctggagggggcggtggggaggacttggagagtcactgacaagggcagctgggaactcagggtcctgcactgtcactgtcagggcaggaggattgggggctgcaggggagactcgagagggaagcgagtgccccacaggggaaggggcctgtggcctcccacttagagtgagggatgctgggagaaggatagagcccctggggctagccagggaccctgggctttctctgattccctgccctgcccattgcccctttgcagcctcagtgagtgtcctctggagcccccaagcctcacccgcctctgtgccactctgaaggactgcccgggacccctggaactgcagtaagtaacgaggacacagccccagagggcaccatgtggggatctgcccagtgacctgggagggggcttcttggttagaagacaggtgagtctttctcgatttcttcccaccagccctgccccatgagagtcccctggcctttggtagaaacttggctgtctctcggcagcccccagccttaggcagcgcatgtctcccactgggagatgctgtgctggactggggaagccttcacctgcaccatccactcaactcagggcacctgggagccctgtccacctccaaccccacccctggagcctcaccagggcacccacttgaacctgcctgcatggctggagcgtagcacttctgaaagcccttcctcaaggcacccccactctccttggggttaccacctcactcgccccagaacatctgggtctgtaaccagagactggacctggaatcaggactcttggctcaaaagggatttaactccccgggcctcagcttcttcatctgcacagtggatggtcagcctttccttttattgtcattgtggtgattctattatagtaattaccttaaaataaagaaatccaagacaaaacctgcctcacctaaacaacctcttctctcatcaaatccatgttgtcatgtgtccacaggactgtctactccttgcctatttgcatattcagtttctacctgtttgcagtcataaactagtttcatgcactgtgttttcatagcatctgtgttttccattttgcttcagtcttttttcttgctttctagcccccatctcaaatgcccttccagcccttccaaccagataatccggtttgaccccctggagtgtggccttcccatgtccttctccaggttcaaacatataaccacaaaaccattatcagacctacactattttttttttctgagacagagttttgctcttgttgcccaggctggagtgcaatggcgtgatctcggcttgctgccacctctgcctcctgggttcaagcaattctcctgcctcagcctcctgagtagctgggattacaggcgcccgccatcatgcctggctaatttttgtatttttagtagaggcagggtttcaccatgttggccaggctggtctcgaactcctgacctcaagtgatccaccttcctcagcctcccaaagtgttgggattacaggcttgagccactgcacctggcccagacctaccctattaatggcaattccttaaagtcaaccaatggtcagtggtccctgattgtctcttacctgttttcacagagtatatactgatgccttttaatactaaattgccacagtacgggacgagctgcaagttactccaccacacccttctagagtctagatcaagggtgtccaatcttttggcttccctgggccacattggaagaagaaaaagaattgtcttgggccacacataaaatacactaacactagcgatagctgatgtgctaaaaaaaaaaaacaaaactccaaagaaaaatctcatagtgttttaagaaagtttacgaatttttgttaggccgtattcaaagccatcctaggctgcatgcagcaggccatgtggcttggacaacttggtctagattgaaatccaaactgcttctaggtgttgtgttttgttttgtgtagcactgcagtcagtgctacaaaaagcactcttacgtgatttgactgttaagtacctattgtataccatgcactgggccagatcctgggaacacaaggagactgggatgcgggctctgctggccaaggcaaatcatctgcagaggaagcttaatataaaaagcccactggcggcccggcacggtgactcacgcctataatcccagcactttgggaggccgaggtggctggatcatgaggtcaggagttcgagactagcctggccaacatagtgaaaccccatctctactaaaaatacaaaaattagccaggcatggtggtgcacccctgtaatcccagctactctggaggcaggcaggagacttgcttgaacccgggaggcagagattgtggtgagccaagactgcgccactgtcctccagcctgggcaacagagcaagactctgtctcaaataaataaataaataaataaataaataaataaataaagcccactggcagcactgggcggtctgagcacaggtgggagtttcaggtccccctccattacctgtggttggggaaagtgcaatagtgaatatgaaagcactttgtcaactgtagagtactgtgatcacttgcaggattattgctataaatagtcatcaaggtactcaatgctgaagtccagtgattccccggggttccaccggggaagccagggaagatagattgtggggctccatcccccctccctgaattcaagcactgcaggtctactttgcctgtgtacacatgggcataccatgtgggatgtggtaaagagtaaagattccattgctttaaaaaaaaaaaaaaggagggtgtaatcacctcctttgccaaccagagcccatggtgtatttgggggtctggtgggacaccatacgggatgtgtttctggaaagaccaccctcaataaaggccccagtcctgactgtgcctcaggggcccatgcccagtccctggggcagaaagggtagagttgggcctccagcctgggccctggcagaggctccaacatgaggctgctcctcccgccctaccctgccccccagctcactgagccagttgatgtagggcccctgtactccatgcctcccctccaaacagccagaggagaaagcagcagagatgggccaggcccttggaggccccggagaggggagagggcagcctgcagaggatgaaggaacagaaagagaggaagggggaggtggagaaggcagaaggagaacatagtagaggtctgcgggggttgggaagtggctccaggccccccaggaaggggctgtaggtaaaccccagggaactcagtgtcttgagttgtcctggtcctccatctagagcagagacagcaaggcaggtatctggagtttctcctaaatgcactgggttctgacgaattatctgaacaatgatgagctggttggtctggtgttaatgggcaactagagacccaagccagtccctgtctccttcgctgacctgttgtatgctgaatttccactgtcatatccactcctctgggttaaggcagcattgttttcttttcttttttatttttttgagatagagactcgctctgtcacccaggctggagtgcagtggtacgatcttggctcactgcaacctctgcctcccaggttcaagtgattcccatgcctcagcctcctgagtagctattactacaggtgtgcaccaccacgcctggctaatttttttttcgttttttgtagtagaggtggaatttcaccatgttgcccaggctggtcccagactcctgacctcagatgatccacccacctcagcctcccaaagtgctgcgattacaggcatgagccaccatgcccagctgcattcttttcttaacaaacatgttttgcggaacactaaccttcatggcccttaaaaattaattctgctagtccatttagtttggggaaaagtctgctgtagctccttggaaattcataatgcacagcagcctatcgcagcctcagagaagccctgcagcaaacaaaaccatttaatttggcttaaccccgtatttcccaaacttaaaagaccttcctcttcttccagcctcacggataacccatggacccagtgctgggagggaatgtttcaggtgaccctggttaggtcccatctccagaaggctctggctatgaggccgtgctccctgctttcctggaaggtttcccccacctcatccacctgctttgtttcacagattgtcctgtgagttcctgagtgaccagagcctggagactctactggactgcttacctcaactccctcagctgagcctgctgcagtaagacgagagtttttcctatttcccggttccttgtgctcgtgtttctaaggctcctccatggcaaagctgtacctgccctctaacccctcaaccccccgcctttaccccctccaaccccctctacccgctccattctttccttaggttgttttatcattttacctggcacaactggggactccaatctgcttccagctccaccctaatactttgtcaacctcagggggcgtcgtttgcctcctctgcgtctcagtttcctcatctgacaaatgggattaatattccccgcccattcccccagagttgggactcaaataagttattctaaaatcaccttaagaaatggaagatctgtgacaaatgagctgtccaacttctccccacccacggagggtcacccactcgtagaaaggggctgtacagatgtaggtcctgtacttatcacatgctgctttttaaaggtcaccgtcaaactcgcaaaaagggaatttaagcagaattcccccaaagtattaaaactattttctaatttcagctcagactggttagaattttaaaagtatttaggccatgtgtggtggctcatgcctgtaatcccggcactttgggaggccgaggcgggcagatcacctgaggtcaggagtttgagaccagcctggccaatgtggtgaaaccccgtctctactaaaaatacaaaaattagcccggtgtggtggtgggtgcctgtaattccagctacttgggaggctgaggcaggagaattgcttgaacttgggaggcggaggttgcagtgagccgagatcgcgccattgcactccagcttgggcgacaagagtgaaactccatctcagaaaaaaaaaaagaaaaaaagaaaaagaaagaattttagaaggatttactttaaacagtcttctagtggtgggaggcggggtgggaagcagctgcagctaagatgaaaaaatacagcaggaaagtaaatcataatgttaataacatcggtgcaaaggctggggctctctgggatgtctaagatggctcgcatcacctccaggatctcgcttatgcttgggttttatctgggagggagggaggagacgtgacaacattccaggggcaagtacagcccagctcacagcaccccatggcaccctgtaatagtcccaccctgcccggagataatgagtcagaaaggactcctttggacataaaaggtggcaggttaaaattgaacaggttggaaacctcagaccggagaggaacttctctttgcctaaatcacacagcttcacccctgactcctcgtccgcctttggagtggcgtggccagcctgaccccttgccagggtttaaactttgtagtactcaacgtgtagtgcttgtggccctactgtgggccaggcattgtgtgacgacacagcagaaaaagttgaccatgtccttatcttcttggagctcctcttacaatagtgggagctgaaaaataagtaaagtaaaatcaaataagatgaacttagccagtgataagagaattttctcgggatgtggtgaagagtggctggagaggtgatttagatgtggcagaagccatcagggaacatctctgaggagggatgctgagctgggacctaaaggaagagagagagctcgccttgtgaagagcagggaactgcattccaggcagagggaacggcatgtgtgaggccctgaggcatgattaagcttggtgggctccaggaacagcgcggaaccgagacagccagagcacagtgactggcagggacagtcctaggagaggaggaagagagagatgggctcgggttgggttgcatggggcctggcacccatggggagagtttagacttttgttcctgggaacatgaaagggagaggaataatttgggttttctttctttcttttttgtgggggagggtctcgctctgtcacacaggctggagtgcaatggcgcaatctcggctcactgcaacctccgcctcccaggttcaggcaattcttgtgcctcagcctcccaagtagctgggattacaggcgtgcaccatcatgcccagctaatttttgtatttttagtagagacagagtttaaccatgttgaccatgctggtctcaaactcccgacctcaagtgatccgcccgcctcggcttcccaaagtactgagattacaggcaggagccactgcacccgttcctcatttgggttttcaaaagttcagactgagtgctgggtagagaatggattgggagatacgagtggaaatgagagtgggaagagatgtgtgcagcagggtgaagggtgctgggggctgatcactgctggggtgggatagaagttggtagactcagggtggatcttgagagtggaatttacagacaagctgatagggggattactggatgaggcaaatggaggtgctgaggctgcctctgagggcagagtggacccatctcactttctctaaggcagtggtttccaactgggggtgattttcacccttgggagtcatttggaaatatctggagatatttttggtggtcatgactgcgggtgaggggtgctgctactggcatcgaatgaatagagatctgggatgctgctgaacatcctatagggcacaggagagcccacaacaaagaattattggacctcacatctcaatagtgctaaggtttaaaaactgtgtctgaagggcctgaagcttcccactctctgtgagcaaggactcgcctgtgaaatctgtgcttgcaggtaaaaacaatagtaataataacagcaagcacaggtcccatgcccggcagtgcacctgcatgatgtaattaaatcctcatatacctcgagagtcatacatgacgagtcttgatttccagataaggaaactgaagctcagagaggtgaagtcacttctccaaggtcacacagccaataagcagaactgggactcaaatccaaatctgcctgtccctcagccctatttgtgcctcttgatcccctgcctgcttccctattgccttgctgagctgctagccctccccaccctccctttccttaccctccaggctagccaggttccttgtccactcatcttgccggatctaccccctttccttttcaggctgagccagacgggactgtccccgaaaagccccttcctgctggccaacaccttaagcctgtgtccacgggttaaaaaggtggatctcaggtgggcattcccctgggacagccaggactcgtcctgaagggttgtgcctggagtctggtgggtatgagggggtaggatgaagacagtaggacccaactagaggctgggcttccggaggaggggtgctggccccgtgggggcatcctgaggctgtggccacagctgtctgacccaggtcctgtctgatccaggtccctgcaccatgcaactttgcacttcagatccaacgaggaggaggaaggcgtgtgctgtgggtaagcccccttgaaccatgcctaggcagctagttgatgttggggaccagtagatctgcctcctgggtggccagagcagtatgcagactgcctaccacaaaacattcccctggaacaaccctgcagagggacttgtttcacccagcatgaagaaacacaggtccgggtgggatctactgtgggggtgggagcagtggattctggacacttccagagggtccaagcttgagtggagacccacctggagcccagaggctgtgccctgggctagccaggccggagggggtctcagtggccaaacgccccatcccctgcttgtcccctttacctccgtccagcaggttcacaggctgcagcctcagccaggagcacgtagagtcactctgctggttgctgagcaagtgtaaagacctcagccaggtggagtaagttgagggaggaggaggaaggagaggagcatggacgcatgcctgaggggcactgaagggggtatgagggtccgtgtgtgcacatacactcatgtgtgcctgcctacacctctcaggaccagctgtcagggatgcctgggtcacatacccaaagcttccctgaatcaattttctctctcccgcccccactctcgccatggtggagctagttccatggtgtgccctctgacttgggcagccctcagcctcaagtatgtgcaagctctgctggcagatgggggctaaaacgcaggattcattgttggcccagcaggtggttaaaagtaccggatgactctgcctgaggagggacgcagagccagccagggtggggtcttgcagtctcttgtattgttgagatgtggtatctgcgtggcctgtcttggatattcaaatagtcagcccctgcatgggtggaataataatagctaacagctactgagcactttctccactgttctaagtgcttgacatgttctttttatgtttcccatatccctggatactagtattgttctcattttacagatgagggaactgagacacagagggtgtaagaacttgcccaaggtcacacagctagtaaaatgcagagtccctgctcagacgcattgggaatccagcctaggaccagtgggaaatagagagagcagtccgccaaaaatgccacacaattttcatttctgttgtgatgtggcagagaagaaaaatgtgactgataaaatcatggatttcttttttttttaagacctggggtctcactctgttgcccaggctggagtgcagtggtgcaatgataggtcactgcagcctccaactcctgggctcaagcgatcctcccacctcagcctctggagtagctgggactacaggcacacaccaacatgcctggctaatagtttagttttgtaagagatgaagtctcaccatgttccccaggttggtctcaaacttctgagctcaggtgatcctcagcctcccaggttgctgagattacaggcatgagccgctgtgcttggaatgtattttaaacagatatgaataagaaatatgtctttgagttttttgtttttcattatagagggaaatttttcttttctttctttctttttttttagatggagtctttctctgctgcccaggctggaatgcagtggcgcaatttcggctcactgcaacttccgcctcccaggttcaagcaattctcctgcctcagcctcccaaggagctgagattacaggcatgagccaccatgcctggctaattttggtatttttagtagagacggggtttcaccatgttggccaggctggtcttgaactcctgacctcaggcgatccgcctgcctcgccctcccaaagtgctgggattacagccttgagccaccgcacccagccaatttttcttattttaaagactattttattaagtggcttcataagacagaccaatttttaaatgacgtttctcaggaaaagatgaaattaacaaacatcaaaaatgtcacagacctaggaggaaaatcagatgttccgggacacactggttatattatttctgaaactgtagttaaaactagctgggcgtggtggctcacgcctgtaatcccagcactttgggaggccaaagcgggtggatcacctgaggtcaggagtttgagaccagcctgatcaacatggtgaaaacccgtctctactaaaaatacaaaaataattagccaggcatagtggcacatgcctgtaatcccagctacttgggaggctgaggcaggagaatctcttgaacctgggagacagaggtcgcagtgagccaagatcgtgccattgcactccagcctgggcaacagagcaagactccatctcaaaataaataaataaataaaaccacagaatgctgcaatgaagggaagtaagaaacttcaggtgaggtttccaatattgatattgcattcccagattaaaagaagaaatctatgggtttaatgcatcctgcaaacatttttttttcctgaatttcctctcattcaaaaactgtggatcccaaatgatgccggccaagggcgtggtgaaggcaaattggtttttctttaacccttgaaagcctgctggaggcacctgagctatgagtggtcacccgatatggaagaggaccaagaggatgggtttactgtggtgctggggaggggatagtagcagagaacgtaggagttgctggtcattctagtggtgatggaagggatggtgatggtggtactgggcttggtggtgtagaattgtggtgataatgaaagtggtggtggtgatggtggtaatactggtggtggtgacattggtggtggtggtgatggtggtgatactggtgatggtggtgatggtggtggcgctggtgaccctgacatggggtccagtagcagtgacagtggatgcaggctcctggtgactgaggagcatctcaggctgaggaggcacctctgatccccgccactgctccttaccccctacagtctctcagcaaacctgctgggcgacagcggactcagatgccttctggaatgtctgccgcaggtgcccatctccggtttgcttgagtaagtggaaagcagcataaaggacagatagcaaggaggaaggctcccctaggccaaaagcatgatgggggctccttctgagggcatcccccagagcaccagaggacaaggactgtggagggcaaggggcaattcttcccttgccttcactcccctggccttgggtcctttcctctgtccctcacacccaccatgggcagatcctccaccaaacacccaagagaggctgtgattcgtggcagggtgacacacccctacagccaaactgacctggggacagggaagcaacattccatccccaaccagctgatgcgggattgcagctgcctggctcctggtccatcccgtccctgaaattcttctgacccaatctgtggaacataaatgtggagatgtccctgtggcaggcaaggggccttaggaagtcatccacatggttgccccatctctcccgtgacctgctggagtgacagccagctccaggacaccacttgttgctaggcaactgagcttcgtgctcgggagtccttgacccatgcggggctagagctgccagcctggccttgccagtgcccagaccccagaccacaggggcagcgggcagggtgagtgcagcgctcaaggactcagggtctggtgccagttctgcctgtgtggggatggtatccttctgggcctcagtgtgtccatctggagaatagatgcttagacatggaggcttctcttcttggaaatgacagctggaagggagatggagggggctgggcagggctccaaggaggtcctgccctcactcccattctcatctccatttcccttctagtctgagtcacaacagcatttctcaggaaagtgccctgtacctgctggagacactgccctcctgcccacgtgtccgggaggcctcagtgaagtaaggggatgttggtccccgaaaagcccctttctgctggccaacaggtgcccctggctgatgatgggagaagcaaggcacccacactttgtggccttccatctgggtggcttggagcaacctctgcctttctctgaatctcagggtttcctgggcatgggatcataatttctatcccctgatgcccgggtgccatggggaccatggaggccatggggtgggaaggccaggtattgccatgctcacagaatgagtttgggggtctcctctggttctgaggcctccatcctcccttgtccttgtgggtgcagccccgcttccctctctgtgccctgtgggtgccctaggtgcctaggaagctggcatgtctgggcaccgtgcttccccaggcccttctctctgcagcctgggctctgagcagagcttccggattcacttctccagagaggaccaggctgggaagacactcaggtaatccctgcagggtgatgggacaggggacagagaggggagaggaggctgaccctatggcggcctccatggccccctcttccctgggccctctcctcctttagagagcagcttcaagctcactgcctgggtctgttcctccagatctgcccccgatgccctggtaactccagtctcagccagggccttggcattgaacttgtgcctcttagcccaccatcctaagcccaactcagcccaacattctcttccttgccatgtcctgactacaggccttgaggcttctgagtgtcacggttaaagattttgaagccaactgaaaataaatccctgatctgccacttaccagctatgtggccctggacaagtaaaatggggataataacacaacctaccccttagggttattgtgaggattaaatgagttaataagtataaagtgccaggaaaaggtctggctcatgggagtgctgtcagcagttattgtaactgttattattattattattattattattattattatcattatcattacccctggtagccctgactcactgccacggccagttcctttacatgtcttacttcagctgtgaacagggcctccaaactgatccctgcatcttatcaggcctcctcccctccattcactccacagcccccagagggatcttcacaacacacatctgacagtgcccctctgctactctgtgcccctcagtggctccccattaaccccagggtgaagttcaaagtccctagcatcttctccctcacagtctgatccaactgtcaccttccaccatgttccttcccacctcccccacaccacacacacgccctacacaccaacccatataccacagatacaccaagcacacccaaacacaccacacagcacgcagcacacacaacacacgcacaccacacagcacacacaacacacaaacgcaccacataccatacacataccacatacacacacatacaccacacacaccacacaatacacacaccccacaaaaacaaaccccccacatacatacctggcacattacaaatacagcacacacaccacataatacctacaaataccacatacacaacacacacacacacacacagttcagccataaccttcactatttgctcctagatcaagccctgcctgaagattctctgcctctgctcacaccgcactcagctcaacattctcttccttgccttttctgagataaaattctcccaatcctttaacacccagctcaaacatcagcccctcctggaagtatcccagcagccctgcctcatcagagtgaactgccccgaggttcactgggccctttcacttggctgggcccgtctgctggccacccagggctgagatgcctggacagcagagccccacggagaatcccaggcacacctccctccccagggagctcagccagtgctggtccgggagagtaaggcagtggttaagagcttggggtctgcagtcagactgacctggatggaaaccagattctgcccttctttcttatctgctgtgtgtccttgggttagtcagtttccccacctctaattggtgctatgagaattaaaggagaccctgcgggtaaggcaggaagtcccatgcacccagaggctggcacagtgcctgacctagagtcagcctccctaaataacttactcctaatactttcttacagggggtgtgggaggttcctccccaaagagacaggaagctcccagagcaggagctgcatatttggcctctcaggccctgctccaggcctttgccctcagaggtgggatgctcccccaataggccctcagggaggctgagatgaagctgagcagcagtgcccacaggcctcacccaggctctgccctggctttctgccctcaggctaagtgagtgcagcttccggccagagcacgtgtccaggctggccaccggcttgagcaagtccctgcagctgacggagctcacgtgagtgacccacccagcccgtgaggacagcagaggggtgggggcaccctgccagagccacctcagtgactgacctctgtctccaggctgacccagtgctgcctgggccagaagcagctggccatcctcctgagcttggtggggcgacccgcagggctgttcagcctcaggtacctcctcccccgctgcctccgggaggggccatggcatgaatgggagcaggggtgggcactggagtaagaggcccccaggatcatggccccagtcatttcctgtacccacaaccctgccatctggaccctgagcaaaccctgtccatctgtcccagagactccacaaggcacacagagaaactgtccttccccacactggaggcctgtgctttgggatttaagaaaaaaa

SEQ ID NO: 15688 - DNA, 31550 bp, Homo sapiens
gtgcagagcgcggaggagccgcgagcgctgagggtgagtgccgggagctctgagggtgagtgccgggcgtgccgcggggctgcgggacccgggctggggcgagcggaagggagaggatcggggttcgaattctgcacggagaggggtggaggggatgtcagaggccctggagcgggaggtgcgggtggccgggtggctggccgatggatagctgggtaagcggacagggcgccagtggcccggcagcgcgcacagcatgcgccccggcagtttggaggaagagttgccggcccgcagaggatggcagatgagggtcgcctggatggggggacacagtaagcggctgtgctcccctccctgcgcagctcctgtcacctaccggatccacccactctctctgtcttttactttgcaacttttcattgattttaaaacaattacggaagttacactgttcattgtacgcaatttagactttttggcctaaacaactttttattgtggaaaattccaaacatatacaatagtagaaggaatagaattaggttgagccttctgcacctgcgggttttcatataatgaagccccacctatccacgttcagcttggacagtcacgaccccaaggccacctactcacgaccccaaggccacctaggtagcccaatctccaccgctggttattttgaaacaaatggcagacagcatagcatctcaactgaggtatttcagaatgtactaaaagataaggcatcttttaaaaacaaaaccacagtaccaccagcatactacaaacattttaatagttattccttaatgtcaaatctccagattatttctaaggaacatttaacctcataagtgataggtgaatacgtgggtgttgttttgttacttgctttctgcattcccatgtggttttcggtcactattctcacccagaaagccaggacctgaaactggctggggtgatcattcgaggaggtcggaagaggctcctaccttcagtgccgtttgcgtccattttataagttggagttcttatgtttccttttttaaaaggttgaagtttctgcagacctaaaaagcagtttgaaaactggcagttcccagcctctaaaacccgggggtagcaggaggcagagagtaccccggggccagatcctggagcctcattgtcccttcaaatcaccttccgtttctctaagggagaaataaaccttgaaaagccatgggcttttcagatgtatctagatgtatctgatgcttttcaggtgtatctagactcccatccagcgtgctttctgcaaaacttactgaaccatagcccagaatggccatccatgatgcccacccgccttgtctcctgaagcacattgccaggtggacctgcacatggtgtggacggcagacagactggggctctcaacaactggtatttgctggatgaccatgaactaaccattcaatttctcgaaactttggtttctcgtctgtaaaatgaacatatgcaaatctatcctacaaagtgtgttttgtggattgaatgagatgatacacgcccacccagtgccttgatcaaccttaaaatgctgcacaagtgtgaggggagatggatccttgaagaagacagacaagcagaggggaaagatcttggaagagtttcacaatatgctgaactttattcctggatcagatacagagctgtccgggtgtccacagggccgggtcagcctcctcagaccccaacacacataccctcttcccctctgaggaaaattcagcaaaacttcttttgctgttgttgttctttattccttttttttttttttttttttttgacgaagtctcactctgttgctcaggctggagtgtagtggcacgatcttggctcactgcaacctccatctcctgggttcaagcgattctcctgcctcagcctcccgagtagctgggattataggcgcccgccgctacacccagctaatttttgtatttttagtagagatggggtttcactatgttcgccaggctggtgtcaaactcccaacctcagatgatccacccgcctcggcctcctgtgggattataggcgtgagccatcttgcccggactcctttttttttttttttttttttttaatagacatgaggtctcaaactcctggcctcaagtgatcagtctgcctctgcctcccaaagtgttgagattatgggcgtgagccaccacacccagccataacttcttagcatgacttttcccatttgttatgagttcaattgtgcctccccacaaaagatatgctgaaggcctaaccctcggcgcctcctaacgtgaccttatttggaaatagggctgttgcagatataactggtgaagatgaggtcatactggagtaggatgggccttgaatccaataggaccggtgtccttataagagaggagatggacacatgaagacagagacatacggggatcagacaatcatggacggaggaggaagagagtgcggcgatgcatctaggagccacaggacacctagaatggccagcagccggtgggaaccaggagaggcaaggacggatcctctcctccagccttcagagggagcccggccctgaccacacctcgatctcagactctgacctccagaactgcgagagaagaaatctcagttgttttaatgtacgcagcttgtggcactttgtgacagcagatacagcagtactgtgacaacactaggaaacgaatacaccatcccagcatctctgctctgttttccatacagaattgaactaaggaccaggcaagctaatgcaagtccaaacactgtaaaaactttggaggcaatctaaggatgtgagccagatttgtttgccagatcttttttattttatttatttatttattttattttattttttttttttagtgagagggagtctcactctgttgcctaggctggagtgcagtgatatgatctcggctcacagcaacctccacctcccaggtttaagtgattctcctgcctcagcttcctgagtagctgggattataggcacctgcccccatgcccagctagtttttgtatttttagtacagacaggatttcaccatgttggccaggctggtcttgaactcctgacctcaggtgatccacctgccttggcctcccaaaatgctaggattacaggcatgagccaccaacacccagcccatatattcatatttttaatggacttatacatgaaaatggtatctcacttttaaaaataaatgatatggaattatgcgttaaagggaaattaaatcttattatatcatgttttaaaatttttaatttttcatagctaatacatttatgtagttttaaaaatgtaaaacatttggaaagatataatgaaaaataagtctccttccatctcctgtctcccagccacccaattgccctccccgaagacaaccaatgttatcaggttcttgtgtctccttccaaagacagtctaagtgtgtttttacaaacatggatatatacatatatatatacacgtatatatgtgtatatatatatacacacacacacacacacacatatacacatatatagacacacacacacatgtgtacttttcccttctcacaaatggcagtgtactatatgtagtgttctctaacttgggttttttttttttaaacttagtgcaatttggaaatctttctacatcaaaattttaaaatctgccctttccctctttctttttaacagctgcctagtatttcaccgtatgactgctctgtaattgatctaacagttgtagaacacttaggttatttcctgtcttttgctatttcaacagtgctgtaatgaatatccttggtcaggcatcatttttcatacgtgggagtgaatctttaagaaaaccaggagtggatttgcaaggtcaaggggaatatgcagtttgaacttggataaataaggcaaattatccccccttaaatgttgtactaatttttgctcccaccagctggagggggaggggccaaatttccatatttgcaaatctgggagacgaacaatggtgtgttttttatgcctcttattacgaatgagtttgaacatcttttcaaatatttaagagtcacctgtagctcattttccataaactgtcagttcatatcctttgcccacttttttattggcttttggtctttttcctgttgagttgtaaaagcacttttcatgttaagggaatttgctctttgtctattatatggttatactgtcatttaaaatggtggcatagttgcttatagaatgtctgaaccatatgcgtcattgttagatatttatattgggtctcattttcttgtattatatatgggatgttttccctgttttttgtaaaaaaaaaaaaaaaagcaagatatgacattttaattcttccaatagttctcaccataatggtgaaggaaaggaaatacgtttgggaaaatacttcgataggatttggggtggctggaacctgtgtgcaaaatggccaacagggaccaggaccattttgggtgggaagagagtgctttgcatggtgtatgtgtatggggcggaggggctgtatttgctcctgaaagaaaagggggtggagggaggggagaagaaaggaaggagagaaggtggagggaggttagccacagagggagatgactcccagaaacttcttaggggaaggatggcaaaagggcattttcggtgagtccaggaatgccctctgctccgtgtgaggcaggtaccagcactgcagacaccggctctggctcaccacctgccatcatgagtgcattcagcttctccactgagcttccacacaccaggccctgctctaggcactgggctacagccgggaacacaaccaactccctgccttgtggagctgatgaggcagtagaaacagacaaacaagtaaacaaagatgtgcatgtcatatgaggtcaggtggaagtgactgcagtgaagaaggcaaggcaggcgagggtggagcatgctggatagagaggcagatgtagccttcttgtagggatgttgggacatttgagagagaacttgaagggagcgtggcagggaaccatgggccatggcatctggaggaagagggaaccagtcagaggggatggcaagaaacaaaaaagtggggagaagaagaaagcagagaagaggagaggagggagaagaggagaaaatgctgcttaaagtctgcttttgtgctcccagatgctcattgtgaatgacatttttgcaatttttgcaattttgttttgtaatttaataatgggctgggctgggcgcagtggctcacgcctgtaattccagcactttgggaggctgagatgggcagatcacttgaggtctgcagtttgagaccagcctggccaacatggagaagccccgtctctcctaaaaatacaaaaatagccaggtgtggtggcacgtgactgtaatctcagctactctggaggctgaggcaggagaatcgcttgaacctgagaggtggaggttgtagtgagttgagatcgtgccatgctctccagcctgagttacagagggagactcggtctcaaaaaaagcaacaaactgcttgaattaaagcaggagccctcagctagaggagtgcccacccacctcctccccaggaatcgcagagctcccaggagaggccatagcctcctataggtcatggcattgcaggtgggttggtgtcccagctggctgtttctgtctcaagaaaggaagggctgctcccgctgacatccaggcgtaagcaacgccctggtgaacatcctcgtagctagagctttgctcacattctggatggcttccttaggctcaatcctcaaagtggactcctaaagggatatatgaacttttattttttaaatgtttgaaaccgtgttgtcaaatttctctcctaaaagattgtgccaatgtagagaggctgccgaccgctggaagcttcccaatcccccagcacctatcccttgtgggtgggatggatcctgtaccatcgccagaccctcaagaaccccttgtcctgcacggtcccttctgtccctcctggtgaaatggaaggagcatgcatgccttgggaagctggtgctttgaggcattcagatcttaccgtggcatcatgtttgaagagagaaatagcttgctgttttgtgtgtctctcaatagtcttattcactgagttcttgaaggtgtcctgtgtgtttctggactgcagaatccttttattgaaatggacaggtcagtgttttcccagagaaagacctatccagtaggagttcacaagaggattttaggaggtatgtggagagggcatccgattccattgaatcgtaaagtgacaaatttgttcccttttcagttctttttcattcttccagactagtgaaagagaaagcctcagtcaggtgctaacgcatctgtaaacctctcacactcttgatattttcagcaaggggaggccaggcctccggtcagagccctgggtctgcagcaatacccagctacagttcaacagcatcatagtgttttttgttttccttggctttctttctttctttttttttctagacaaggtctcactctgtcacccaggctggagtgcactggttgcacagctccgtgcatagtttcctgcagcctctatttcccaggctcaatcgatcctcctgcctcagcctcccaagtagatgggactacaggtgcgcaccaccacacctggctaattgttttttgtttttatttttgatagagacgaggtctcattacgttgcccaggctgatctcaaactcctgagctcaagcagttttcctgccttagcctcccaaagtgctgggattacaggtgtgagcctccatgccccacccttgagtttcttttcgatgataccttcagttcgtggcaagtggtacttcaaaaaataaagttaaaagtgacatggtttctagaaaagctttaaggaaatggtgttctggctttcagataagtcaaaaaaaatctcaaacatgagtaaagagttttggaaattatacacttacccctagagggtgagtttgtgggggaaatttcataatgtatacttccagaatatttagaactttccaaatgagtacaggttatgttcgtaaacaggaaaaataataaagacataataaaatgataatttagttttaaaagacgaccatttgttgaaagcagtattatatttcagttaggaaatggcctctggaatcagcatagattttattgttttatttattttgtttttgagacagtgtctcactctgttgcccacactggagtgcagtagtgtgatcacagcccactgcagcctcaacttcctgggctcaggtgatccttctgcctcagcctcccaaatagctgggactataggtgcacaccactatgccaggctaatttttttgcattttttgtaaagacagattttcaccatgttgccctggctggtctcgaacttccaggttcaagcaatctgcctgtctcggcctcccaaagtgttggaattacaggtgtgagccactgtgcccggccagcatagattttaaatccaccttttgttgcttgacttcttggagcctgtttcttcatctatgaaatgcaggaaacgtgcctggaaatattgcttgagattctaatggggaggtgcaggtggaatactgtagcctgatgcccagcctatgccgggaactcagtacataacagccaatgagcattggctgcggactggacatgtcccctccttgtgctgtagtattaatgtctccaaccctcacagtgatcctgtgaagtaaatgtaaaatcaccacccagatgaggaaaacagtggcacagagaggttaagaaaactgtccaaggttgcacagcactaaaatgttgaaatcaggatttaaacccagccctcctgaccccagaggatcttttttcaaaaattatgttcttttattttatttcgagatgggggtctttcacagtcacccaggctggagtgcagtcacaatatcacggcttactgcgcctcaacctcccaggctcaagtgatcctcccacctctgtcccccaacccccagttgcttaggagcacaggcacacgacaccatgcctggctaatttttgtactttttgtagagatggggtttctccatgttgcccaggctggtctcaaactactgggctcaagcgatcctcctgcttcagcctcccaaagtactgggatcacaggtgtgagccactatgcccagcattagaggctcttttaacagctccacaattccctgtgagatgggctgcatacaaagcattactcctgcttgacatatacacaaaccatggcccaaagggagctgggacttgtccggatgtcagcctctaagtcagttttgggtcagtgagacccaaaaccaaggctctagccgtctagcccctccaacctttcttctgccccagttttatgggtttggcaatgtctgccaggatgggagggagcagttcagatgatccagtctggaggcaaaattctgctaaattcaaagggcccagcctcaagtcactgatgtctttttttttttttttttactttaaaaaaatgtattaattctaaaccacacaagtaagacacgaatcagtcttccttgcagaaagttaaactttttatacataaagctgatatctattttactcactgcttccagccccatgcctgtcccctctcctgcagtaacccctatttgatatgtttccagaactttatctaaaccttcacataataaaaataattcttatatagggcttactaacttccaagcactgctttaagagctttacatatttaagccccacaataactctgtgaggtaggtgctgctcttatccccattttacagatgagaacattgaggcccagagaggctatgtaactggcctggcgtcacccagcctgcagttggtggaaaggtcagtcccaaatctaggcagccttgctccgaaattcatgctcttagcctctaagttataaaacatgctattatcgacctgtgggaagaaacagtattgctgtttgttgatgtgtattttgagacaagtgatatcatgttgtgcatatcattatacaatgtgtcttgtttattccatgatacatcttgaagatacagccacgtcaacaaaaaataagtccctttcctgtacataatcccacagcgtggttacaccaaactttattatggctgtctagggtgtttaaagaccgctgctggaatttctttatccaagactctgtgtgtcttagcccattggggctgctgtaacaaagtgccagagactggctggattctaaacaatagaaatttatttctcacagttctggagactaaagtctgagatcagagtgccagcatggtcgggttctggcaagagcccttttccgggttgccgatggcggacttttcattgtatcctcacatggtgcaaagcaggctagagcattctcttgggtctcttttataagggcatcaatcccattcactacggctcctccctcctgacctaattacctcccccagaccccagctcctaataccctcctattaggggttagagtttcaacatgtgaatttcaggggagcacaaatattcagtcgatcacattgtgtattctgggccccaaggctgtccattttgctttctgctgagaagtttagtggtaaggtcaaagggtagaagcgcagtaagatctagaagtcactgctgatttgccctacaagatgggcaaaccacttcccagcctgcagctctgagccctggatccaggccttctctcctttatgtctcgagcttactctgtcccctgccttacttaccaaaccaaagcaagactcctctgggacattcctgccaggccccatggcaaggttggagctgaggaggggacttccaaaccttggttttattttcactttggcttgggtgtgccaagccctggcagagccacagagttggggcacgaggtgccaagaaacagctcccagtctgaggaaggtgctctgccctgggaaggggataaagctgagtgttggttatggggagacatcctcaaggtctccatctaaatatggtcaacttggtggccttcctgtccccagggcctttggggctctcagaggacaagaatcactcagctctgatttgctggagaagcagagccccaggtgggaggtagcgaggagcctgtctctccccactgggagtggagagctgggtgccacagcctcaaacagttgttcccagacatcggcacatggggaaccccccgggagcttccaaaagtgccagtgcctgcgttctacctcctgggatggtgctgtgatgggtctggagtgtggcccattgggattttttaaagaccctcttcccaggtgatgccgtcgtgcagacaagcatgggaaccactggcctggaagccccagggagaggcctctggggcccgggacacgcaagcgggagccttctcctagcagccttgctagccacccaccccttcctgtgggtgctagacccaaactgccagggctgagcaggagaagcaaggccaccagctggccacctgctgtcccagccaggctcaggctggcagtagggcaccccagtcctggaggagggtgcatctggaaagcttgggggctcttggtggaaagttcaagcctttagcataggaaggtggctggggtgaaggaggcagtttaaagactagtgatgtgggctgggacccagattgctgggtttccaatgaccagaagaagatggccttgttggactggggacagggaccacccaggctcaggcctgaggctgggagtgcaggcatgaatttgagtgcaggctcaggaacatccccagggccgccaggcagggagacacctcttcaactcctggctcctcgactctagctggtgacctaggcaggtccctttcccactgtgagcctcaatttcctcatgtgtaaagcatcatgactgtgtgttttaagtcctttagggccctatctttgtgagggacaacagagacgatggttttcacaggcaacagtcacccctgcatcatcactgactcacagaaatggatatgccctataaggacatctcttgcttgccctgccagcatttgtgggcgggggaggaaatggccactaaccattcctgaaggcacctcccaagggacccctgaaaggagggtgacgcctcccagaaagagaccagtggcccagcccagccctgctcttagttttgtttcctctgctttgaatgccagcaaggcctttccctcccagggcctcagtttccccatctttacaatgggcacagcatagaccccatcactggggctctttctgctctgccaccctgtgcatccaggctcaggtgttatccgaagccctgacatcatcagccattcccggggggaaggcagaggcgctgggttctctgtgtccccctggtagggcttggtgtaggattcagggaggattggagggcctctgtggcctcaggtcctcccccagggtccccaggccctgacctgtccacctggacctaaagaaccaacaacagcagcactttctgtttctttgaggtatttctgtccaaatgtctgtagtcatgactggggtgcctggctatcaccccacaaactgcatcctttctgatctgcacagatgagaaaactgaggtcttgtttcccctccatcccaagacctaatgggacctcctccttaatctaatcctcaagaggcagaaacaggatggaaagcaaaggaatggcagccagaagtctgtggctccactcctgtcctctctgcatccctcacttccttccttacaccaggcgtcaggggctggagagacggaagaagcgatagcaacgacaaccacactagtggtaatcatagcttgtgtggattgaaccttttttttatttttcatttttaatttttgtgggtacatagtaggtgtatatatttatgggttacatgagatgttttgatataggcgtccagtgtgtaatcacatcagggtaaatggggtttccatcacctcaagcatttatcctttgtgttgcaaacaattcaattatactttttgttatttttaaatgtacagttaaattattactgactatagttaccctcttgtgctattgaatactaggttttattcattctaactattttttgtacccactaaccatccccacctcccccaccctggcctcctactatacttcccatcctctggtaaccatccttctactctctatctccatgacttaaattgttttgatttttagatcccacaaataagtgagaacaagtgatgtgtgtctttctgtacctggcttatttcacttaacataatggcctccagtgccatccatgtccttgcaaatgatgggatctcattctttttgatggctgaatagtactccattttgtatgtgtgccacattttcttttactcttttattcttttctttctttcgagatggactcttgctctgtcacccaggctggagtgcagtggcacgatcttggctcactgcaacctctgcttcccaggttcaagcaattctcctgcctcagcctcccaagtagctgggattacaggcatgccccaccatgccctgttaatttttgtacttttagtagaggaggggttttgccatgttagccaggttggtctccaatgcctgacctcaggtgatccacctgcctcagcctcccacagtgctggaattacaggcgtgagctgccgtgcccagctgccacattttctctgttcattcatctgtcgatgaacacttagattaattccaaatcttggctattgtaaacagtgctgtcataaacatagtagtgcagatatctctttgagacactgattcctttcttttgggtatatacctagcagtgggattgctggatcatatggtagctctaaatttagtttagtttttttttgttttttttttttttttgagacagagtctcactctgtctcaaggctggagtgcagtgcgtgatctcagttcactgcaacctctgcctcctgggttcaagcgattctcctgcctcagcctcccaagtagctgggactacaggcatggggcgccactacgcccagctaatttttgtatttttagtagagacagggtttcaccatgttggcgaggatggtctcaatctcttgacctcatgatctgcccacctcggcctcccaaagtgctgggattataggtgtgagcctccgtgcccagccctatttttagttttttgaggtacctccgaactgtcctgtagtggctgtactaatttacattcccaccagtgtatgaggtctcccttttctccacatagattgaggtgtttgtttgtttgtttgtttgtttgtttggagatgaagtctcgctctgtcgcccagactggagtgcagtggcgtgatctcagctcactgccgcctccgtctcttgggttcaagctattctcccacctcagcctgggattacaggcgcctgccaccacgcctggctaattttttttattttaagtagagacgaggtttcctcatgttgcccaggctgctctcaaactccggacctcaggtgatctgcctgcctcagccttccaaagtgctgggattacaggcttgagccaccatgcccagcctggattgagtttgtatcatgtgccaggttccatgtcagggattccacatgccccatcccacaaccatcttgccaggtgggcattatgatgaccccccatagcagacactgtcagagctcccccaaccccatctctgcccggatgcccccactcactgtgggtgacacctgcatccttcttccggggtcgcctttgcctggtgggcattgccttgctcagagatgcctgggcagtcatgcctccctcccccgcccactgggggtgcagtgacgtgaagtgtgaccgaccacccagaccccttgcacatgcgcaggatggacctcttctatcatcacgctccagttctcccatgtggcaggctgaagcgaggcttttgaaaccatatctttgctcagctgcctctgctaccctatctttcttccaccaccccctcaataaacaacttccacaggaacccccttgggctctgcttctagggacctgacctagaagatcctcattttacagatgaggacgctgaggtacgaagaggctgcgtaacctaccagggtcacacagctttggtgtggagtagggactcaaatccagggccctggtacggaggcatttgccctcaccaagattcaggcactgagagaagctgacgggcctagagaatggcaagacttgagatagcagaaggaaggagagagggtgagaaatggatccccgtgctgaggtctggtctggaaggagaagtctgcaaggtaggaaaaagaggaaaggggacgtgaggtagggaagcaggatgtgcaaggcggggacttgtgaaagagaatgccggggggtggtgagcagcatctcatgggcaggtcagcaggtgcaggagaggcctaggagggccggggactggatgatgaaagggcatttgtttatttatcctttgtttttgttttttgttgtttaaattgagaccagctctcacaatgttgcccaggctcgtctcgccaactgtctgcccactcctggcctcaaacgatcttcctgcctcagcctccaaaagtgttgggattacaggcataagccaatgtttattcgtcctgagccttccctggacacctgatatgtagctgctttgtggtggtcacagttccatggtgtgactttatcctggaggcagtgggatgctgatagcaagttcagacaggcatgaggccagaccagagctgagttttcaagataactccagccagaggtatgcgtgcatgtgcacatgtgggtacatgtatgtgtgtgcacgtgcatgtgtgtatgagtgtggactagagatggaatggctttctgagcaaagggaacagccaaggcaaaggcctgtgggctgcagggagagaacaaggtttgatctctgcactccctcctctaagctctgtgtcaacagcattttcaggacagcaggaaggattcccaaagagcacagcagcgagggcagttggagggaggcgtctgctgggacactgaaaccagggtggggtaaactcccctcgcacctcctcagactcagagcccccataaatcttccaggtgcaccccagcccttttccctctctctgtctgaactggggtggcatgatcccaggactgcaactccacgtgtctggattccccttactgactgcgtgaccctggccattttccctccacctttctctcagcgcccccatttgattactcggcctcaggggtgcactggggattcttagaggtaacacttcgaacggaaagccagaggtcctggtgccaaaatgcaaatgtgagggcttgaaagttcatcgggttttattttctctgttccgtttgcagtagctcttctttcttgttttctatagaacagtaaaaaactttatgcatttgaatatcgtgaaccttgtaattcatatgcaatataaaaactactagctatgcatggagaaatcaattgaagaacagtggcttagcatgtctttctcattctttgatggctacctcaaatcaaatcaatatgaacttggggtcaggcatggtggctcacacctgtaatcccaacacttggggaggccaaggcaggaggatcacttgagcgcaggaatttgagactagcttgggcaacatagcgggacctcatcttaatattaaaaaaaaaaaaaagagaaagaaaaaaagtgaacttgggaggtttgaatgacaactcgtatagctgaagtaatagatatattcaacttttaaaacttaattttcattagataacacatgcatatggtataacattctaggccaggtgcagtggctcacatctgtaatcccagcactttgggaggccaaggtgggcagattgcttgagcccaggagttgaagtctagcttgggcaagatggcaaaaccccatctctgcaaaaaacacaaaaaattagctaggtgtggtggtgtgcacttgtagtcccagctactcaggaagctgaggtcggggaatcatataagcccaggaggtggagactgcagtgagccacgaccacaccactgcactccagcctgggtgacagagcaataccctgtctcaaaaaaaaaaggaaaaaaaattcctttcactggggacaattacctttatgaatttcttccagaaatattaatgtatttgtatacacatttttttttgagacagggtctcactctgtcacccaggctggagtgcagggatgcaatcttggctcactgcagcctggatacccccaggctcaagcaatcctcccacctcaaccttgcgggtagcttggacaacatgtgtgcaccaccactcctggctaatttttgtattttttgtcaagatggggttttgccatgttacccaggctcgtctcaaactcctgacctcaagtgatctgcccgcctttgcccctcaaagtgctgggattacaggcatgagccaccatatttattttttctttacacaaaggaagcatattctacaccctgttttgccccggctctcttttaaaaaacagtgtatcttggataccattccatatcattccataaagttcatcttcatcctctttttttttttttttttttttttgagacagggtttcactctgtcgcccaggctggggtgcagtggcactatctcagcttacctcaacctcccgggctcaagtgatcctcccacctcagcctcctgagtggctggatgctgcttctttctttttgatggctgcaaagaattccattgtatagatgtgccataatttaatcataatatgtcctctttgatcatttaggtttttccaatcttttgctattacaagcaaggccacgttaaatatccctgggcatattattttgcacattatgaagatatctgtaggctaaatacctgtgtatggaattgctcagtgtgattacatggcatttaccactttggtagataaaggttgtatcctgttacatgtccacggatgaatttcttccagaaatattcatgtatttgtatacacattttttgagacagggtcacaaaaccgttaacacattattattattattattattattattatttcacattatttagggaagtttcatttttttgtgagctatcactgataatttcttatttactcatcatcttgtatttctcttccttgcacattggggaaatgtctattctagtttttaatgtaaatgttcttgtggcttttttagaaaaaatcaaaatgtgcacattaaaaagtttgaatggttcaaaaggtcctaaaaagggtccacagtggaaaaggctctcctttcccagcaggcccagatccctcctcagacacaagcctgtcgtcagtttcctgtgtagcttcccagagttggtcactatgtatgcaaatacacacacatttaaaatatacacactccacgtccacgtggaatgatgcaaagcatctaagtgcccgttaattcacaaccttgccaactcagtaatatccttgcgaatctaatagctagaaaatggtgtatctttttagttctaatgtattatatttattctattttctgtgagcttgaacatcttttcatatatttaaaagtcattggggccaggggtggtggctcatgcctgtaaccccagcactttgggaggccgaggcaggtagatcacctgaggtcagaagttcgagaccagcctggtcaacatggtgaaactcagtctctattaaaaatacaaaaaaaaaaaattaatcaggcatggtggctcgtgcctgtaatcccagctattgggaggctgaggcagaagaattgcttgaactggggaggtggaagttgcagtgagtggagatcgtgccactgtactccagcctgggcaacagagtgagactctgtctcaaaaaaaaatttttaaatgtcattggtgtttcccttttttgtaaaccttttatgttctttgcctagttttctatgaggtcattggctttttcagtgttggtttttagtaactctcgatttattaaaacatttatacatttatagctttgtttatgatgtatacatttataaccttgtctgtgatgcagatatttttccaatttgtcatctggcttttgaccttatctgtggtattctttgacaatacaaaaattttaatttatatctgatcagtttcatccagttgtttttttcttttttcatgatttctgagttttgtgtcatgcttagcaagatgctctctactctgaaattattttctgtaaaatatttttttcagccaggcatagtggctcacacctgcaatcccagaactttgggaggtagaggtggaaggattatttgagtccaggagttcaaggccagcctgggcaacagagcaagaccccgcctctattttttaaaagagaaatttttttaaaatactttttcccatgttttgtttgagcacttacattttcttaacttttttgtcgtgaaacataacacatagaaaaatgtaatgtaagtgtacaacttcatgaattgttataaattgaacatatagctttctggtactttcatggtttaacttcttacatttaaattttggtttcatctagactttattttgatataattgtgaaatagaaatccatttttattctaaaagaacactttttaaatgttcatgaaatgttttaaaatttattatataccaagcaagaaaaaatctcaacatagtcctcaaagcagaaattgcacaggacttattctttgtacagtgtaatgcacaaaaactaataagaaagccttaaaaacaaccctttattaaattactccattccaaattataatttcaatctacttagcacataagtattgatatacatttatcgaaattggccaaaagtgttttattattttttaaaagaaaaagcctagcaatggcttaagcaataaagtttttaattttaaagaataacaaacagcctcactaaatcagaggaaagaaataaaaagataaaagcaaaaattacagaactagaaaagggaccattccagcaaaattgataaatgaaaacaaaaatttgtttttcaaacataagagttaccaacggctggtgaatctaaaaagaagaaaaaacaaagtaaactaaattaaatgtgaagccatgaagagatttaaaattataagaaaataggccgtgcacggtggctcacgcctgtaatcccagcactttgggaggccgaggtgggtggatcatgaggtcaggagcttgagacccgcctggccaacatggtgaaaccccgtctctaccaaaaatacaaaaattagctggctgtggtagcatgagcctgtagtcccagctacttaggaggctgaggcgggagaatcacttgaacccaagaggtggaggttgcagtgagccgagaccttgccattgctctccagcctgggtggcagagtgagattccgtctcaaaaaataaataaataaataaagctgggcgcagtggctcatgcctctaatcacagcactttgggaggccgaggtgggcggatcacaaggttaggagatcgagaccatcctggctgacatggtgaaaccccgtctctactaaaaatacaaaaaatgagctgggcatggtggcgtgtgcctgtggtcccagctactcgggaggctgaggaaagagaatggcgtgaacctgggaggtggaggttgcagtgagctgagatcacgccactgcactccagcctgggcgacagagtgagactccatttcaaaaaaaaaaatacaagaacatattatatacaactgtgagctacaccatgtttgaacatcttgacaaaatgagcaactttctcaaaactaaattgccaaatgttcatttttaaaaagccaaaaataaccaaccaacacaatgaggataaatttaaagtgatcaagtttgatttttttaaaaaactgttcaaacatcttggtagtgctgggcaggaagttggctttcattctgggtgagatgagaaggctctaaggggcataggacctgatgtcatgggacctgatgcaggctctgtcttaatagctgactcctgcgtggagtaggttattgggggatgggtggacagagaccagggaggaggctggtgcaggaatcccagtgagaaatgatggtgtccaggctaggccatagcagtagaggaagcaagattctggaatgcacttggaaaatgaagccatctttgggcttgagctcaaggaagcatgaagctgcccctaactgaagtggggaaggtggtctggggagcagtttaggaggagagatcaggagctcagtttcggacttggaaattttgaaacgcacatgaggcatccaggtggagttgggagaattaaataatgctgaaaggtactcacttggcaagtagcaaatattcgctatattgtctgttcaactttgtcaactgcttttccagtagaaatgtagtgtccttatcacacatgcataaatgttaaactcaaaagtaaaatgaaatattttctcagtagatatgaataactttttaatttttttgttttttgacatgcggtctcactctgttgcccaggctggagtggggtggcgagatcatagctcactgcagcctcaaactcctgggctcaagcaatcctctgccacagcctcccgattagctgggactacaggcacacaccaccacgcccagctaatcttttattttttgtagagactgagttgcacaatgtagcccaagctggtctccaactcctgagctcaagctatcctcccacctcggcctcccaaagtgttgggattacaggcgtgagccactgcacctggctgctttttaattgtaatattcatcctccatccatcatacttagtgcaaatatttttccccacctattgccttcctatttctcttttatttcacgtcatttagggaagtttcatttttttgtgagctatcactgataatttcttatttactcatcatcttgtatttctcttccttacacattggggaaatgtctattctagtttttaatgtaaatgttcttgtggctttttttaaaaaaaaatcaaaatgtgcacattaaaaagtttgaatggttcaaagggtcctaaaaagggtccacagtgggaaaggctctcctgtcccagcaggcccagacccctcctcagacacaagcctgtcatcagtttcctgtgtagcttcccagagttggtctctatgtatgcaaatacacacacatttaaaatatacacatgccacagctttttaaaatttgaatttatgggccatgtgcagtggctcacgcctgtaaccccaacactttgggaggccgaggcaggtggatcacctgaggtcaggagttcgagaccaacctgaccaatatggtgaaaccccgtctctactaaaaatacaaaaattagctgggcatggtggtgggtgcctataatcccagcttctcaggaggttgagacaggagaatcgcttggacccaggaggcagaggttgcagtgagctgagatcgtgccactacactcaagtctaggcgacagagggagactccgtctcaaaaaaaaaaaaaaaaattgaatttagactcaggtgcagaggctcacgcctgtaatcccagcacttacggaggctgatgaggggagaatcacttgagtccagtagttcaagaccagcctgggcaacacagggaaactatgtctctacaaaaaaattaaaattagcctggcatggtggagtgtgcctgttgtctcacctactcaggagggtgaggcaggggaatcacttgaactcaggagtaggaggctgcatgagctatgattgcaccactgcactccagcctgggtgacagagcaagaccctgtgtcaaaaaaaaaaaaaaagaaaagaaaattagactaccatcatagatggtacaaacacttcccagtttgttgctttcgttttgtttgttgccatttttactatacagaaaaaaaaggcaataaagaatacattattataatatgttaatttctactgcattatttttaacaacttcattgaggtgtaatttacataccgtaaaatctatccattttaggtgtaggattcagtgatttctggtaaatttactgagttatgtgaccatcaccacaatctggttttgggacattttcattactgccataatattcctcaaacccatttagaatcattcctatttctgctcccaggcccaggcaaccagtaatctacttgctgtttcaatagatttgccttttctggatgttttacataaatagaatcatacaatacgtgatctttagtgatcttttttcacatggcataaacttggttcctttttatgttgaataatattccattgtatagatatgtcacagtttgtttctccattcatgagcttttgggtatttgggttgatttcactttttgactgttatggataatgctggtacaaacattcatatacaagtttttgtgtagatgtatattttcatttctcttggaatagacctaggcgtggaattgctggattagatggtaattctattgttttacattctaaggcaggggtccccaacccccaggctacagatcagtgtcggttcatggcctgttaggaactgggccgcacagcaggtggtgagcggccatcgggcgagtattactgcctgagctctgcctcctgtcggatcagcggtgccattagattctcataggagcacaaacccagttgtgaaatgcgcatgtgagggatctaggttgcgagtttctgatgagaatctaatgataaatgtaatgagcttgaatcatcccgaatccatcccccaaccccaacccccgtccggggaaaaaatgatctctcatgaaatcagtccctaggccaaaaagtctggggactgctgttctaaggaactgccaaaactgccaaactgtttttcagagtggctggaccattttacattcccaccggcaatatatacggtgtcctgtttctttacatcctcatcaacatgtgtctttttcattacagccattctatgtgggtgtgaaatgctatgtggctgtgtttttcatttccatgcagaaatttttaatttaattgcttagttaaaaataattctttaaatttaaaacactcatattgccatatgtatatttttatactacaaagtgatacaatttttgttaattttcttgccttgattactctttacctgtatagtatttaaatctttacataagatcacaattatagtgaatagtaatttattcaactcaaaatcttcataggatttagaaaatttaagtcctttaccaaagggattgacttctaacttcattaaaggttgcgaacagtatcaaatccttggtaaagccacattcaatctttggcactccaggattttgagctataactgtagtgatcactaatatgtcatttctaagctgacggtcataatgactaaaacctctcatagattttaaaatacttccttcaaagtcagtaaacattccaagttactaagctgttgaacaatttcttattttgaagattttttctgataagttccaaagtgtttctgatgaaggaaataaaagctgtccagagaaatctgagtcattgaggtgagcacagattccattggctgcttgtgctttcatcattacagtacaattaacttcagaagtcgagagatgctgcagaattttaagtacccaaagtttctcaacaagttgattttcaagcaaggtcattaactgggccattgtttttgccaatcctccaacttcagccatttgaatcttgtatgatgaactcacttgctggtaacctggaatatgctcctttggtggttgtgcctgataaaagtcaacaatacgtttacaattttttatcctcaattcagaacttggtattttcattaagtcacccagaagcgcaactgaactagcagtatctccagcataagttatttcatccgatactttctttttcaaaaatggcaagccacactattttatgatatcatatgcagattctacaaaatgcggctggttttcaatttttactgcacacagattcagaatttcaaatgtctgtactaaatcccttaagggaagttcattctgataacactgtaccagtttcttgacagatttaagttgcttttcttctaagccttctttagcagtctcttcaaaaagtttgatgacaccattaaggtccacaggcttcaaaacaccagttccacatggcgagggaggccttgggaaacatcatcatgatggaaggcaaaggggaagtaaagaccttcttcatggtggcaggaaagagacagcatattgctatgtattttaacaccacttatttccccccttttttctttcaatatcatggattaaatagtgtattttaaatgagtgtgaggctcacttggactctattccatccctttggccaatttttttccatttttaatccaagaatcttaaagtttgaatgatggtcaccttgttatatattttattatgtttggaagcttttttgctattgtctgatcctcccaacaaatagccttttgatagaattgcctttattcgtttctttatatctaattctaacttaagattagacttaaaagtaacttcagcggttttattatgaaatatttaaggcatataaatactgcctcttttctctaaatgactgctaatataattttaccaagttctgttaaagtatcctgttgtacataaagtgctgttgttttttatctgcctgttaacttagagtgggttttattttctttcactttctgtggtcgaaggcaagtatgtcttagtcagtttgggctgttataatgaaacactgtagactgggtggcttaaacaacagaaacttgtttctcacgttctgaaagccgggaagtccccaatcagggagccagcaggcctggtgtctggagaggatgcgcttcctggtttgcagacggcaccttctcattgtgtcctcacagggcagagagcaaaaagaaagggcaagcgctctccagcctcttcctttttcctttttttttttgtttgtttgagatggagtcttgctctgttgcccagactggagtgcggtggcatgatcttggctcaatgcaacctctgcctcctggcttcaagtgattctcctgcctcagcctcctgagtagctgggactacaggtgcctgccaccatgcctgactaatttttatgtttttattagagatggggtttcatcatgttggccagactggttttagactcctgacctcaagtgatctacctaccttggcctcccaaagtgctgggattacaggcgtgaaccaccgcacccggcctccagcctcttcttgtgagggcagtaatcccatcataaggggtccaccctcttgacctaatcacttcgcaaaggtcccacttccaaataccatcacactgggtatttaggcttcaccaggtgaattggtgggggaggtgggacacaaacattcagtccacggcaagtttttatctcaatttgctaaagcctctctttatttctcctgttacagtgtgataatgttttttaaaatatcatttagctggctgtggtgacccatgcctgcagtcccagctactcaggaggctaaggcaaaaggatcacatgaacctaggagtttgaatccagcctgggcaacatagaaagaccctgtctcttaaaaaaataaataaataaataaataaataaataaataaataaataaataaaggaaagaggctgggcacagtggctcatgcctataatcccagcactttgggaggccgaggcgggcagatcacctgaagtcgggagttcaagaccagcctgaccaacatggagaaaccccttctctactaaaaatacaaaattagccgggtgtagtggcacatgcctgtaatcccactacttgggaggctgaggcaagagaattgcttgaaccagaaggtggaggttgtggtgagccgagatcatgccattgcactccagcctgggcaacaagaatgaaactccatctcaaaaaaaaaaaaaaaaaaaaaaagaaagaaaagaaaagaagcacttaaagaggctgaggcaggcagatcacttgaagtcaggagttcaagaccagcctggccaacatggtgaaacctagtctctactaaaaatactagaattagccagacgtggtggcacatgcctgtaatcccagctactcgggaggctgaggcatgagacttgcttgaacctaggaggtggaggttgcagtgagctgagaacatgccattgcactccagcctgggcaacagagcaagactccatctcaagaaaaaagaaagagagagaaagagaaatatagacatatgttattagtcccccaggacctcttcaaaagatctctcttttcctttcttatttctaattaccatactacataccacctccattatgtcagaatgtgccctatttacgtggatttgtctaaagtcatggaactctgagttacattccccgtatttcacagagacacaatcagagcacacgctgatcttccgcctctcttcatttcctccatgtactctgtagctacctgttctcttctttgttcgtaggaagatctctgttgcgtggtgtgggagtttgtgccagctcatctttttattgtgctttctgtgagcagctatcaatgcctccaggtcttctctttaagaagaatgtttactctcaattgtttaaaaaactaactaaataggaagaagattgcaaatcctaacctttttggggttttatattgggggcaaaagttggcatctgcagtaaggattatttcattttcatctgaataaatgagcagtaataactttgctgacttgcagggctcattgtgatgccaaaggacattgtaaggtgcatatctgaattggaggaggaagaggggcatcctctgagccaggtgtggcaggaggtgacatcaaggagggttaggctgcgtaaacccagggacacaaggagctgcagtcggggaagaacaaggtctagcggatggagttggggggactgtgtctggagccaatgttctcagatgtgtctccggcaggcaggggcaagggctggtgcctggtttacagcattccttttggagtctggaatagtggggaaaactccctgtcttctctccccttaggagtctgcactatggaaacaacctgtcaatccagctcaaggcacacatagcccagacacccatgagaccctctccgtggggaccctagagcacctatcatgaacgaggagaccaagtaggtgatttttctctccccttcacctcctcttttcccctcctatctacttcgtcacttttctcctactgccaagactggtccctacccaaatctgccttactgggctgcccccaacacaacaaacctgcccttgaccatcattcagcatgagaatgtaatgatcagacacagaaaatcaggaagagttttgagacagcatctaatctacccattttagagatggtatgactgaggcttatataggaaaaaggcttgctcaaggtcacactatgagtgtatcagctaggataggccaggttacactgtagtacatgcaccctccaaagtcccagtgactcatggcaacaaaagtttatttcctgctcttgcttcctgtctcgtgtggattgactgggattgctcctccacatcatcctgtctcccacactcaggctaacagggtagccatgatttgcaatatttctggtccctggagtagaaaaaaagaaaaagtactgtcaattacaccttggttcttaaaacaactacaggcatgacatgagtcttttttagcatgtttcattgaccaaagcaagtttcatggctgtgcccaatttcaaggaggcagagaagtgtaatcccaccaaaggcctagaaagaggagaaagagtatctgtgaacagccctaatgcctaccacagagaattagtaacagagctgggccatggatctttcaaccatcgtcctctgtctccaagattattccccatggaaatctcaatgactgataatgatgccatgtgctttttctcctgaggatggttagccttaaagagatttgtgtcatatcctaaggggatagaacactaatgatggaaacaaaggtattgtgttagactggctggaggagaaatttgaggatgagaaacatcaccagaaatcacaccatccaggcactacttacttccatctggtgccatgctgccctggaccatttcttcatgggtagcatggatgctggacaccatagcctggaaaagaagttatgccctaggctatggccacatccttttgccgagatcacacaaaatccagggacttagccttgtctggtgccatctaggcctccaaggccttggaaatttactggcctgggaggcaagaaacctcagttctcctcctgcctctgtcatggacttgctgtgtgactgtgggcacaccctttgcccttccttggccatggtctttccgtctgcttagtggaggtggtgatccctgcctgaggatcatggtgtgagcatgtttcataaattctaagactctctgcctgagtgaggacctattgctattagcccagttgaggagaaatgaccagtggggctgacagtacatccaagtatgtctctactgcatgcccagggagcagctgggctctaaaccccaggacgcatagtactggcctcagcctctgggaattgggaaggctggcttctgggtggacctcctactcttttcagagttagaggtggactctctggagttgtgaggataaaataaggtatataaagcacttagacagtgcctaatacacagtgagtgctttccaagtgtgtactgctatgaggaaggacatagtaccagaaagtacatccggaaatgtgatagcatagtccactagatgatggaccaccatttagttggccaatccccaactgttggacatttaggttgtttccaatttttaataattataaataatcttgcagtgagcatctttgcaattaaatattgtatatacgttcatgatcgtttgccaaggttagagtcctagaaatggaattactgaatcaaaggaactgcacattatttaggcttttgctgtgtaaatgccccgtgccctctattggtacttctagaaggaggtggtttaagagttccagttcggccatcatgatggctcacacctgtaatcccagcactttgggaggccgaggtgggcagatcaccctgaggtcaggagtttgagcccagcctggccaacatggtgaaaccccatctgtactaaaaattacaaaaattagctgggcattgtggtgtgcacctgtaatcccagctactcgggaggctgaggcagaagaatcgcttgaacccgggaggcggaggctgcagtgagccgagattgcaccattgcactccagcctgggtgacagagcgagactctgtctcaaaaaaaaaagagttccagttcagaagggaagaatttgcttagcaaaagaggtgatggtctgtgttagctaggattagagttcactgtgagtagcagaaagcactaaacaacagtggcttaaccagaatggaagtgtatttccctgccatgtaacagaagtccaaagtcagtgagcacagggcagatgggcagctttaccttccaccttcctcagtatgggttccacctcatgattcaatatggctgcccaagatccagccatcccatcaacaatccagacaacaggaaggagcaaagaagaatagacaacatttctacttacattccactggccaaattacatggctacatataactgcaagggagactgggatataataatctattctagatgaccagagaatatttagtagttctaatactgaggaagaagggaagaacagattttgggagacaactagttgtctctgccatgaggttagctcagactgagagcagcataaatggttcatggaaataagaatgagtaatgcatcctcacgggactgtccacaggggatgaacaagaccattccagagagccagggtgcaggcacaaatggagtagggagggggtgcagaagaaacagactgatctctggagctgatccctgggcagagacatcaagactccatggagaggccacttccctgcctattttatgtcgctcaaatgtagggactggttcttgactgcttgacttccctagaaactcccttatcccccaactcaccttccccagatcaccttccccctagttcatctgtaccccactcacctgccctcaggtcacctgccccacaactcacctgttctccatctaatcttcctcccagctcccctgtcccccaaatcacctgcccccaatttgcttgtcctccagctcaccggttccccagctcatcttccttccagttcccctgtcccccagctcacctgcctgccctcagttcacctgtcccccagttcatcttcctcctagctcccctgtcccctagctcacctgtgccccagctcccctgtcccccagttcccctgtcccccagctcacctccccctcagctctcctgtcccccagctcatctgcccccagtttacctgtcccctagctcacctcccccccagtttacctgtcccccagctcacctccccccagtttgcctgtcccccagctcaactccccccaagttcccctgtccctcagctcatctgcccccagtttacctgtccccctcaactcacctatcttccctgtccctccagggctggctcctcatggaccccgttggcctccagctcggcaacaagaacctgtggagctgtcttgtgaggctgctcaccaaagacccagaatggctgaacgccaagatgaagttcttcctccccaacacggacctggattccaggaacgagaccttggaccctgaacagagagtcatcctgcaactcaacaagctgcatgtccagggttcggacacctggcagtctttcattcattgtgtgtgcatgcagctggaggtgcctctggacctggaggtgctgctgctgagtacttttggctatgatgatggtaagggcaggtgtgagagacgcaaagcagccgggccagtacctgcgtcatggggagccgggaggagcccagggacccacctaagtcagagagagggtgtagccc

SEQ ID NO: 15689 - DNA, 49360 bp, Homo sapiens
cagaagtgtcagctccaggtccacgatgcggaggccctcatagccctgctccaggaaggccctcacctggaggaagtggagtgagtatcacgggaagccctggcgtaggagccaggaaaggaggttggagagggtgggcagggcctcgcctttgggtgggtggtgtgggggaggggcatgctgcctcatgaagaatttgggggaatcagatcattgtaacagctgctactattcagcacttgtcccgggtcaggtgctgtgctagggactgtacatgcctcctcgcattcactcctcacatctctgtgatgtaagcactgttactgtcctcattttatagaggaggaagttaagctgcagaaagataaacttgctcaaggccacacaggtaggaagagtctaggctagggttcaagcccagacagtctggctcgcagcctcatcctcataaccactgctacctctcttgctgagatctgccaagtagaaaccccaccacacctgggtctgccttccaaaccacagtccctcagggctccccccacccccttcatccttctcccagagtagagtgggataaccttctcttttcgggatggagaaattcccatggcgtccagcccctggctgaagccaataagagtagtgcttggggatggacggaggctctgtcacgaccctaggaggggcgcccctccaggaaacctccaagtgaacatgaaggcagatgatggaacgccaggatgtgttctgggtcgagtggccccacctcagggtaagacggataggggtgagggttgtcgtggtgatcacctcttgatcctggacctcgtcccattgggagaaccaggacagaattagaaggtggttttttaacaagctcacacacttctacctgcctcaccagcactgagcatgcccctccccgagtgccatcacctgcagaagcagccccatcacccgcctggttacgcagccacctcctagcccccttgcccttctcccacatttagtccctccagatggacctactggtagcgctcaaaactatcctcttttcctccacctttctagtccaacccaccctcatctcttacctggatgaccccctcgccttgccttccttgctggcttccctgctttcaccctggccacttccacctggcagagagtagatcacttttcactgatgcctgcccccttcactccttcccactgctcaggataaaacccacattctaaactcccaggtggtccagaaccctgcccccagcctcctaaaccccatctgaccccatccttccactcaatctccaatccagacacactggctctctttcaggtcctcatatgtgttatgccacagggcctttgaatgtactgcttctaccaccaggaacacccttcctccatctctcccccaaccttttacctactgaactcccagttatttcagcaagtagcttaagcaacaaataagccatccccgactcccagactaggtcagatgcccccataatcatgaagtttatcacaaaaagcaattatgtaacttgcagcataaaggaagagttgagggtggggccttgaaggcaggctgcctgggttcaaatccaggttctccctcgagcaagtgccttaactttactctgcacttaaccactctgcacttgagtttactcatcagtaaggtgaggataattacagtgcccacgtcatcggcactatgaggatgaaataggccaatagtcatagaagaacctaggatgttgccaggcatgtggtatggagtctgtcgatttcagttattatcaaggttcattcctgagagtgacactttgactaaagttagcaaaggaggagtaagtgatggggattgagggaggactccagccccacaatacagtgcattgggccccccgtctcagcctctcagggaaccagctggaagatgaaggctgtcggctgatggcagaggctgcatcccagctgcacatcgccaggaagctggagtgagttgtccaccccaccgctgggtaccagggaaggccctgtagagccccaggaggtccccgtgttcgtaatcagcagtaagggtgctgatccactgccacccctgcttcctcccaactccagcaaagtcaagatggtttgaccatgccttgccttcacctccggcatgagccactgtcttagtccaatcatctagcacccttacatgtgtaaaatgcgttcattatacatcagtggcttgcattccaattcatctttgtagctgccctggagcacggtggggtggggtgttgcactggggaggtgtcagggtgggtgggatgttgcactgtggaggtgtcatgctggggtgctagggtagggagtggtgtgttcctgtggggatacactgttggggtgaggggtggtgagatggaaaggtaggctattaggctgctgggtgtgctgtggtgttgcatggggtgagggtgatgtttgggtgggggtgtcttgggggtcttaggatcaagtgtgggtcgggtttggggagtgttgagattgggtagcagtggtttggggcctcagctttggatttcaatcttcgctctgtcacttagtagcattgtgaacctgggaaagtaattgaatgtctctgggcctcggtttcccctctgtaaaatgggatcacatgaaaccatatatgtacaaagccttttgtacagagtctggtatagtcagggctcagaaaatggtggttattttacagatgagaaaactgggggtcagagaggtgaaaacactgagttcttgctgtcaagctggacaactttattttccaaatgggatgggggtgtcatgcattttttggcttactcacacgcaccagaatcctttgagatcccctggcaagggacctaggacatccaggagtgacagccagcaagctgctgagccacagggaggggctagagctggctggggctgggtacctcagccacatgccaacggctgccttctcctgctctccacagcctcagtaacaacgggctttctgtggccggggtgcattgtgtgctgagggccgtgagtgcgtgctggaccctggcagagctgcacatcaggtgggagctccctcagaccacggtacccatccccccccccatcatgctctctctgaagcccttggaattccttctgggcccaggccttgggacgggcagaagatgctgctgctgtcccacccagaccccgttacagccggcacccctcttcctagctgctgtggatataggctgctcatggtttatacctctggagaactacccttggctgataagaaccagagacgcctggcagggtacaacccccactttcccctaacctagagtggccaatgacagaggcagagggcacaactctccagcccaaactctccagtgggacaaagctccctgggagactaggccaaggacttgctccgtttggcttccctcagtcccttactgtttctcctgagagcagaccgtcagttcatgatgtgcgcaactgacaagtgacatgcgaccccctaccccactcacagacccaggctctgccactagggaacccaatcctatttctgtaagtctcgccgttgagtatggggaggtgaggacagatgatgattaatgtcaactcagttcccactcggaggaaagcctcattctcaacccagtagggtggtccctgctttaaacacccctcaagggaggagagggaaaccgattcacccaaaaggtagattaggggaccttggttcactgtatatgatgattcaataaagggtccctagtgcattccaagcgatgccctgttcacttccaggaacttatactaaataaattatcacgattgtgcaaacacatttagctgtagggatgttcacctcagtattggttataataggaaaaaaaaagaaaatagctggaatgtttaaccgagggatattagttagactaagttacttccagagagaactcagtggaaccatagaaaaaaaaatgataatataggtgcagtttcaatatggaggggtgacggggagttattaagtaaacataaagaaatttctttagagacaggatcttgctctgttaccaaggctggagtacagtgacacaatcacagctcactgtaacctccaaatcctgggctcagcaatccatctctcttagtctcccaaagtgctgggattacagtcatgagtcactatgcctggcaattttttttatttttagtagagagagggtcttgctatattgaccaggctgttctcaaactcccgagctcatgtgatcctcctgccctggcctcccaaagagcaaggattataggtatgaaccactgcaccaggccaaacataaaaattttaactcattatcttaaaagattataaaagattataataaagcttttcaagatatgcaatggcagaaagaatggtataatctgggccaggtgctgtggctcatgctgtaaacccagcactttgggaggctgaggcagggggatcacctgaggtcaggagttcaagaccagcctggccaataggatgaaaccccgtctctactaaaaatacaaaaactagctgggcatggtggcgtgcacctgtaattccagctactcaggaggctgaggcaggagaatcgctggaacctgggaggcggaggttgcagtgagccgagatcatgccactgcactccagcctgggagacagagcaagactctgtctcaaattaaaaaaaaaaaaaaaaaaagagagagcatggtatatataatctgttcccatcaataatgatcaagtattaataattatttgtcatccctgcttctagcccttaaaaaactaatgtttaaaaagagaatctatagtttaatcccatgtttgtaaaacaaaaattattgcactagaaaatggaaggtttgaaggactcactccaaaggttaccaggggtaatccacacatactttgagcacagacagaacactgactagcagagagaggggtttcagtctggggctaaaagagagaacacagaatttgttttcttttaagacttgccaggaaatggggcttacttaggcaatagatacatttgtgaaatatctgtggtagaaagatttcagccctccaaaagctcagaggaagtcagaggggagtcagaggaagtggctgcagctggaggcagggggatggaacttgagaggtcctcccgggccaggggtaaaaagtgacaggccgggcacggtggctcacacctatcatcccagcactttgggaagcaaaggtgggaggatcacctgagcccagaagttcgagaccagagtagacaacatagactgtctctacatacttttttttttaattagctgggcctgatggcacaagcctgtaatcccagctactcaggaggctgaagtgggaggattgcttgagcccaggaggtggaggcttcagtgagccatgattgcaccactgcacaccagcttgggcaacagactgagaccttctctcaaaaagaaatagtaacagggagccaataacctctcgcttcctcacccctcttttgtcttcacagcctgcagcacaaaactgtgatcttcatgtttgcccaggagccagaggagcagaaggggccccaggagaggtagggcccgatttcaccccaactccatgctcagtcagggacattcccctctctaccctccacagctgggcagtgccagtcagtcaactgccagggtgacctggacaaattcacggaagagcgggaagtgagcaggcttggcaaaggatgcagccccaaagggggagggtccaaatccagaccacctccgcctctcatggtgcctgaaaggagccccagtgtgtaggatatagacagcaggccagggcaggagttgggtagccagagggggattccgggagactagagccctccagcttaaacccaggggattgcctggcctgtagctctggtcctggtcggaacttctgtatccctttcacacaaggacccattagggtcctggattgccccagcctagcgcatgggtagagactcagctctttgctcccggagcccacccacaatctcttctgtagagtctggactactgaaggctcgattccagctggggctgacatctctgaagcacagatgaggaggaggatgagattaatgataatagcagtcaaggtcaattgagtacttgccatgtatgcaccaagcaccaaactaaggcagttcacatacagtctcccattgagaggctgtgatttgtccagggtcacacaaccaggaagtggagaagccaaattggcaccaaggtctgattgactctaggtggaggatagggctcgatggtggaaggccaggctgaggatggattctggagatggcggacatggcctttgctcagcctggccttggtgatgtccctccagggctgcatttcttgacagcctcatgctccagatgccctctgagctgcctctgagctcccgaaggatgaggtacagtgatggcctccagccctgtgtgtgattccagccccctcccttcccctgctcagagcctgctcccaaacctgtgcccaggccccacatgctccctgaaggacacctgacctgctgtgtccaggggtcatggcctggcttccctacctcctacctcccctgcccagcccaccccagacagggctcacaaggcagccccgtcaaccaccttcccaagcccaggagaccccactccccttagctccctgacccccagcagctgaggggttgtggagactctgaaaagaggtgaaggggagcactgggctccttctgtcatgatcctggtgcctgggcctgggggctcccatcagcactcttccccccttctctcttggtctttgtctgtcctaatctccctctgtccctctgcctgtttctctcatttcttccctctctcatcgtgtatttctgttttatcagtttatttaactgttatttcagtcttatctgtcttcctctgatctgctctctctctctgaggtctctgtgccttggtttccttccatctgtgtctctgcccaccctctgcctatatgtgacatcctgtgggtgtcgtgtgtgttggtccctctttgtccgtctgtctaggtgccagatacatcccagtccctcctctcctgcaagcctcattctctgcctctgtgtctggggggtgggaaagcggctccttcccgcctctgttcagtggggcatgcagcactgtgtttttgtccctgggcaggctgacacattgtggcctccaagaaaagcacctagagcagctctgcaaggctctgggaggaagctgccacctcggtcacctccacctcgagtgagtggtttgtgtgttggaaggtgggtgggtggggccaattacagtgagttagtgttggtgtttgggtttggtttttaagatttagatcaactgttctttccctgctgaagtcagaaaccccttggagaatctggtgaaagttgtgactcttcctcccaagatacagatcccccatgtctgacacgctcggaggctcacccctggtccctcagaggtccacgaacctcagaataagaacctgggggagaccccagctgcccgtgccagatctgctgagatctggcctggcagcccagggctgtgtccagtttcaggaagttgagtaactggaatgcagggaccatgctgccagcaacccactccccacctgctaatgttctcccctcccttctccccacccccagcttctcaggcaatgctctgggggatgaaggtgcagcccggctggctcagctgctcccagggctgggagctctgcagtccttgaagtgagtagcccgctaggcagagcctctgaggctggggcagggggggagcattctctgtcccatccccctctttcctggggttattgtaaagattaaatcggaaaatgcatgaaaattgcccctaatacaatgtaagttctcggtgaaggctagctaatagatgattcttactcagagagtctgtgactcaataatcccacttctgattcaaggtttcacttctggaacctgtctccgcatctctgaacaggcttctgaggccaccctggggagggcaggtgtgggtgcgaagtatgactaacggctggcagttgttattctggccctggggtgccgggaggggctggggctgttagctggggtatggtcagggtagacagggagggtttgtaccagagaggacactcaagcagggtgcccagggctgccaaggatccctgagtacctggcagagagtgtgtaggaggaatccccaaagtttgcctgcaatggaccagagttcttgatccctaaatgcccttggtgcttttggctcacaaagcaccccctcctcccaggcacttctgggccaaagccagaggagcccaggggagaggtcacaggtcctatattccaggctgtctctgtgaacacgctttgctgtgtgattctgggcaagttacatcccctctccgagtccctggttcccagtcggtaaatacataaattgcaggcgtggcctctgttggtggctacgatctctgaaatgagtgctggggcctaaggaccccctgctcacaccctgtttttgtgcaatgctgggaaggaagggagttgccttggttcctgttcagggcctgcacctgggaaggaaggaaggtctaaccattgcaggcaaattacatgaagactggaggttttagtatgtcctcatgtgaccttcttattagtgtggactcgtgacctggtgctgtgagggtccacactcgccctaccagtgtccccgtgggaggggagtgtagcattaaatagtaaatagaaaacaataacaagttgacaggagaccctgaaagaaaggagacactttgttcctgctttctgcacaagagaccctgcattttcattttgtcctgggtaccacccctcccttatcaggtggagaaaaggaggcccagctccagccagaaagcactcctcagatccatcacagaccgagggacccactgggtgcccatctcagctctgtcaccaacatgtctcataaccttgggctagaccttgattctctctaggactctgtttccccatctccaccatgaggacttgcaaggggtgctctctgaccatcttgggttcagtgggttccgtcatctggaaccagggatccctcccccgccctgtgccctgaccacaaagaggatgtgtttgggtcctgagtgacctccattgtgccacccctgtgatctccagcctcagtgagaacggtttgtccctggatgccgtgttgggtttggttcggtgcttctccactctgcagtggctcttccgcttggacatcaggtgagcgtgcctctccgcccccagccctgcccctgtcccccatcccacaggtcatctgctcccacgtgggccccttgtccaccagtttcatgccaacctgtcatcctcagcaccttgggcagtaccagatctgcagagcatgtgatgggcgtccactgaatgaatgaatgatcaaatgaatgaataagtatggcctcacggatgctcaaatttctccaaattcaccattagagagttcattgactctgcctcactcgttctttggatagtccttagagatttttttttttaggattttttttttaattattatactttaagttctagggtacatgtgcacaacatacaggtttgttacatatgtatacatgtgccatgttggtatgctgcagagacttttaagaaaactgggggccaggcgcggtggctcacgcctgtaatcccagcattttgggaggccaaggtgggcggatcacgtgaggtcaggagtttgagaacagcctggccaacagggtgaaaccctgtctctgctaaaaataccaaaaaaaaaaaaaaaagtatctgggcgtggttgtgagcccttgtagtgccagccgctcaggagtcaggagaatcacttgaacccaggaggcgaaggttgcagtgagctgagatcgtgccactgcactccagcctgggcgacagagtgagactccatctcaaaaaaaaaaagaaaagaaaagaaaactgggagcttcctagttgccactggggactcagggacctgtcttaattgtgggagctgatgagaatataaaaggggaggcaccagccagccaagccaccccaggcactcagggcaccgcatccatgattttcaggggaggtctgcttccctttcccttccctaaggacccccaagaatgggaggtgccacagcagatggaccaggctcagttacttaactgctgcgagctcagagcaggtcccagagcctctccaggcctcagtttcctcatctgtaaaatggagataagaataattactggcctggcacagtggctcaagcctgtaatcccagcactttgggaggccaagacaggaggaggaggatcacctgagcctaggagtttgagaccagcctggacaacatggtgagacccccccatctctacagaaactttaaaaattagccaagcgtgatggcatgcacctacttgggaggctgaggtgggaggattgcttagactcaggagatcgaggctacagtgagttgtgatcacaccattgcactccagcctgggcaacagagcaagactctgtctcaaagaaaaaaaaatgtcaggcacaatggctcacatctgtaattccagcactttgggaggctaaggcaggaggatcgtttgagccatggagtttgagaccagcctgctcaacatggcaaaaccccatctctacaaaaaatacaaaaattagacagtcatggtggggcgttcctgtagtcccagctacttgggaggctgaggcagtaggatcagttgagcccggggaaggttgaggctgcagtgagccatgactgcaccactgcacaccagcctgggcgacagagcaagaccctttcttcgaaacaacaacaaagaagaatttcttacctcattgtttattgtgagaatcaaatgagaaatgtcgatggtgtgctttgcatgtgacttgatacatgtaattgttgcttaatctattccttgtttgctaagaaagcaggccaccccaggccctccttgccctgaccagtctgggttcttgccactgccagggaagttggtctttgaccattttcaaactgctgcttcctctctgcttccagctttgaaagccaacacatcctcctgagaggggacaagacaagcaggtgaggagggaacgctcggggtgggggagtcccctcccgctctggtccccgtctgttggaggtccccccacccccagacccatgctgaccactcagctctcagttaaaccacccaagtccggcacactaggtttaatcaccacttcagtaaccaccgccccccccataaattgtcagtaatcaactgccctgttttccccttggaaggaggcaatgcagatgggaggaagggagggatatggttgggagaggtcccagagcagggcaggtgcccgcagattgctgctgtgtgggaggagacaggagaacatttgtgcttctgcgtttcggggaattttgtagacccaccgctccatacatgtcactgccctttcacgctctgaaggcaggggccgtgggtgctctgaaaaaacattttccccgtcttcgcagtaaacaaccaatactagtttagctcttcatgatgttcccggctgccctctagtgggaccaggcctcttggcctcacttgggagcagtggcagcggacagggtgggcccatgtgcagctggctgggtggagagagtcacagctagtgtgtcaagaaaaggcactgccgtacagatgggctgtcaggagtcaggggtggctcaagcctgggtggtcttgcttcccaggataggatctctgtttctggggaacccccgggttcttgaggcccaaagaactgacgtacagggaggcagaagtcatgtgatgccaagcagtggtcagagaggctctgtcttgggtcctcctgcctgctcacctggacaggaacaagctgctggcttttctaactcaggcttcccttccctgagcctcagtttccccatctgaacaatgagggactgagctaggatctagtgactgcattgtctctgagatgccttccagccctgactttccaagtctgggagtccaatgtgggtgatctgaactttcctttctaaacgatccccctcctaggggtatatgggctgggctgggagtccgagggggtgatctgaactttcctttctaaatgatccccctcctagggatatgtgggccactggatctttgccagacttcccagctgcagccaagttcttagggttccgtcagcgctgcatccccaggagcctctggtactgtcccagcccttcttgtttgggggtaaccataatagggatgaggcgtcagagggggcagagctggcagggggctagggctggggattgggatagagggaagagagggagtttaagagaaaaggaaaagaaagaggcgtgggtgtgaggggtgctgggagttggggagctctggcccctgacgggcagctcagctggcccatgccccgcattctccttggagagaagattccacatttctgtgaagcaaacagagcagctcagccactccctgcctggggtctccatctgctctgggggacacccactttccagaaagaaaggggttggcctgtctccccactaatacactccccatctgcaagctctgccatgagaggctgtgagaccctgacttggccccacctctctctaggcctccagggaagtggaggcaagtgaggccctgggaaggacatttcaatttcactgttagccccagggcaatggggagccacgggggtaacagggagaggcctggtcagatgtgcagtgttaaaatgtgagacacttgtggggcagagagggattaaagggaggcaagagtggaagcccagagggtgttaaatggtcaaggtgagtgaggatggtggcctgggctctggagggggcggtggggaggacttggagagtcactgacaagggcagctgggaactcagggtcctgcactgtcactgtcagggcaggaggattgggggctgcaggggagactcgagagggaagcgagtgccccacaggggaaggggcctgtggcctcccacttagagtgagggatgctgggagaaggatagagcccctggggctagccagggaccctgggctttctctgattccctgccctgcccattgcccctttgcagcctcagtgagtgtcctctggagcccccaagcctcacccgcctctgtgccactctgaaggactgcccgggacccctggaactgcagtaagtaacgaggacacagccccagagggcaccatgtggggatctgcccagtgacctgggagggggcttcttggttagaagacaggtgagtctttctcgatttcttcccaccagccctgccccatgagagtcccctggcctttggtagaaacttggctgtctctcggcagcccccagccttaggcagcgcatgtctcccactgggagatgctgtgctggactggggaagccttcacctgcaccatccactcaactcagggcacctgggagccctgtccacctccaaccccacccctggagcctcaccagggcacccacttgaacctgcctgcatggctggagcgtagcacttctgaaagcccttcctcaaggcacccccactctccttggggttaccacctcactcgccccagaacatctgggtctgtaaccagagactggacctggaatcaggactcttggctcaaaagggatttaactccccgggcctcagcttcttcatctgcacagtggatggtcagcctttccttttattgtcattgtggtgattctattatagtaattaccttaaaataaagaaatccaagacaaaacctgcctcacctaaacaacctcttctctcatcaaatccatgttgtcatgtgtccacaggactgtctactccttgcctatttgcatattcagtttctacctgtttgcagtcataaactagtttcatgcactgtgttttcatagcatctgtgttttccattttgcttcagtcttttttcttgctttctagcccccatctcaaatgcccttccagcccttccaaccagataatccggtttgaccccctggagtgtggccttcccatgtccttctccaggttcaaacatataaccacaaaaccattatcagacctacactattttttttttctgagacagagttttgctcttgttgcccaggctggagtgcaatggcgtgatctcggcttgctgccacctctgcctcctgggttcaagcaattctcctgcctcagcctcctgagtagctgggattacaggcgcccgccatcatgcctggctaatttttgtatttttagtagaggcagggtttcaccatgttggccaggctggtctcgaactcctgacctcaagtgatccaccttcctcagcctcccaaagtgttgggattacaggcttgagccactgcacctggcccagacctaccctattaatggcaattccttaaagtcaaccaatggtcagtggtccctgattgtctcttacctgttttcacagagtatatactgatgccttttaatactaaattgccacagtacgggacgagctgcaagttactccaccacacccttctagagtctagatcaagggtgtccaatcttttggcttccctgggccacattggaagaagaaaaagaattgtcttgggccacacataaaatacactaacactagcgatagctgatgtgctaaaaaaaaaaaacaaaactccaaagaaaaatctcatagtgttttaagaaagtttacgaatttttgttaggccgtattcaaagccatcctaggctgcatgcagcaggccatgtggcttggacaacttggtctagattgaaatccaaactgcttctaggtgttgtgttttgttttgtgtagcactgcagtcagtgctacaaaaagcactcttacgtgatttgactgttaagtacctattgtataccatgcactgggccagatcctgggaacacaaggagactgggatgcgggctctgctggccaaggcaaatcatctgcagaggaagcttaatataaaaagcccactggcggcccggcacggtgactcacgcctataatcccagcactttgggaggccgaggtggctggatcatgaggtcaggagttcgagactagcctggccaacatagtgaaaccccatctctactaaaaatacaaaaattagccaggcatggtggtgcacccctgtaatcccagctactctggaggcaggcaggagacttgcttgaacccgggaggcagagattgtggtgagccaagactgcgccactgtcctccagcctgggcaacagagcaagactctgtctcaaataaataaataaataaataaataaataaataaataaagcccactggcagcactgggcggtctgagcacaggtgggagtttcaggtccccctccattacctgtggttggggaaagtgcaatagtgaatatgaaagcactttgtcaactgtagagtactgtgatcacttgcaggattattgctataaatagtcatcaaggtactcaatgctgaagtccagtgattccccggggttccaccggggaagccagggaagatagattgtggggctccatcccccctccctgaattcaagcactgcaggtctactttgcctgtgtacacatgggcataccatgtgggatgtggtaaagagtaaagattccattgctttaaaaaaaaaaaaaaggagggtgtaatcacctcctttgccaaccagagcccatggtgtatttgggggtctggtgggacaccatacgggatgtgtttctggaaagaccaccctcaataaaggccccagtcctgactgtgcctcaggggcccatgcccagtccctggggcagaaagggtagagttgggcctccagcctgggccctggcagaggctccaacatgaggctgctcctcccgccctaccctgccccccagctcactgagccagttgatgtagggcccctgtactccatgcctcccctccaaacagccagaggagaaagcagcagagatgggccaggcccttggaggccccggagaggggagagggcagcctgcagaggatgaaggaacagaaagagaggaagggggaggtggagaaggcagaaggagaacatagtagaggtctgcgggggttgggaagtggctccaggccccccaggaaggggctgtaggtaaaccccagggaactcagtgtcttgagttgtcctggtcctccatctagagcagagacagcaaggcaggtatctggagtttctcctaaatgcactgggttctgacgaattatctgaacaatgatgagctggttggtctggtgttaatgggcaactagagacccaagccagtccctgtctccttcgctgacctgttgtatgctgaatttccactgtcatatccactcctctgggttaaggcagcattgttttcttttcttttttatttttttgagatagagactcgctctgtcacccaggctggagtgcagtggtacgatcttggctcactgcaacctctgcctcccaggttcaagtgattcccatgcctcagcctcctgagtagctattactacaggtgtgcaccaccacgcctggctaatttttttttcgttttttgtagtagaggtggaatttcaccatgttgcccaggctggtcccagactcctgacctcagatgatccacccacctcagcctcccaaagtgctgcgattacaggcatgagccaccatgcccagctgcattcttttcttaacaaacatgttttgcggaacactaaccttcatggcccttaaaaattaattctgctagtccatttagtttggggaaaagtctgctgtagctccttggaaattcataatgcacagcagcctatcgcagcctcagagaagccctgcagcaaacaaaaccatttaatttggcttaaccccgtatttcccaaacttaaaagaccttcctcttcttccagcctcacggataacccatggacccagtgctgggagggaatgtttcaggtgaccctggttaggtcccatctccagaaggctctggctatgaggccgtgctccctgctttcctggaaggtttcccccacctcatccacctgctttgtttcacagattgtcctgtgagttcctgagtgaccagagcctggagactctactggactgcttacctcaactccctcagctgagcctgctgcagtaagacgagagtttttcctatttcccggttccttgtgctcgtgtttctaaggctcctccatggcaaagctgtacctgccctctaacccctcaaccccccgcctttaccccctccaaccccctctacccgctccattctttccttaggttgttttatcattttacctggcacaactggggactccaatctgcttccagctccaccctaatactttgtcaacctcagggggcgtcgtttgcctcctctgcgtctcagtttcctcatctgacaaatgggattaatattccccgcccattcccccagagttgggactcaaataagttattctaaaatcaccttaagaaatggaagatctgtgacaaatgagctgtccaacttctccccacccacggagggtcacccactcgtagaaaggggctgtacagatgtaggtcctgtacttatcacatgctgctttttaaaggtcaccgtcaaactcgcaaaaagggaatttaagcagaattcccccaaagtattaaaactattttctaatttcagctcagactggttagaattttaaaagtatttaggccatgtgtggtggctcatgcctgtaatcccggcactttgggaggccgaggcgggcagatcacctgaggtcaggagtttgagaccagcctggccaatgtggtgaaaccccgtctctactaaaaatacaaaaattagcccggtgtggtggtgggtgcctgtaattccagctacttgggaggctgaggcaggagaattgcttgaacttgggaggcggaggttgcagtgagccgagatcgcgccattgcactccagcttgggcgacaagagtgaaactccatctcagaaaaaaaaaaagaaaaaaagaaaaagaaagaattttagaaggatttactttaaacagtcttctagtggtgggaggcggggtgggaagcagctgcagctaagatgaaaaaatacagcaggaaagtaaatcataatgttaataacatcggtgcaaaggctggggctctctgggatgtctaagatggctcgcatcacctccaggatctcgcttatgcttgggttttatctgggagggagggaggagacgtgacaacattccaggggcaagtacagcccagctcacagcaccccatggcaccctgtaatagtcccaccctgcccggagataatgagtcagaaaggactcctttggacataaaaggtggcaggttaaaattgaacaggttggaaacctcagaccggagaggaacttctctttgcctaaatcacacagcttcacccctgactcctcgtccgcctttggagtggcgtggccagcctgaccccttgccagggtttaaactttgtagtactcaacgtgtagtgcttgtggccctactgtgggccaggcattgtgtgacgacacagcagaaaaagttgaccatgtccttatcttcttggagctcctcttacaatagtgggagctgaaaaataagtaaagtaaaatcaaataagatgaacttagccagtgataagagaattttctcgggatgtggtgaagagtggctggagaggtgatttagatgtggcagaagccatcagggaacatctctgaggagggatgctgagctgggacctaaaggaagagagagagctcgccttgtgaagagcagggaactgcattccaggcagagggaacggcatgtgtgaggccctgaggcatgattaagcttggtgggctccaggaacagcgcggaaccgagacagccagagcacagtgactggcagggacagtcctaggagaggaggaagagagagatgggctcgggttgggttgcatggggcctggcacccatggggagagtttagacttttgttcctgggaacatgaaagggagaggaataatttgggttttctttctttcttttttgtgggggagggtctcgctctgtcacacaggctggagtgcaatggcgcaatctcggctcactgcaacctccgcctcccaggttcaggcaattcttgtgcctcagcctcccaagtagctgggattacaggcgtgcaccatcatgcccagctaatttttgtatttttagtagagacagagtttaaccatgttgaccatgctggtctcaaactcccgacctcaagtgatccgcccgcctcggcttcccaaagtactgagattacaggcaggagccactgcacccgttcctcatttgggttttcaaaagttcagactgagtgctgggtagagaatggattgggagatacgagtggaaatgagagtgggaagagatgtgtgcagcagggtgaagggtgctgggggctgatcactgctggggtgggatagaagttggtagactcagggtggatcttgagagtggaatttacagacaagctgatagggggattactggatgaggcaaatggaggtgctgaggctgcctctgagggcagagtggacccatctcactttctctaaggcagtggtttccaactgggggtgattttcacccttgggagtcatttggaaatatctggagatatttttggtggtcatgactgcgggtgaggggtgctgctactggcatcgaatgaatagagatctgggatgctgctgaacatcctatagggcacaggagagcccacaacaaagaattattggacctcacatctcaatagtgctaaggtttaaaaactgtgtctgaagggcctgaagcttcccactctctgtgagcaaggactcgcctgtgaaatctgtgcttgcaggtaaaaacaatagtaataataacagcaagcacaggtcccatgcccggcagtgcacctgcatgatgtaattaaatcctcatatacctcgagagtcatacatgacgagtcttgatttccagataaggaaactgaagctcagagaggtgaagtcacttctccaaggtcacacagccaataagcagaactgggactcaaatccaaatctgcctgtccctcagccctatttgtgcctcttgatcccctgcctgcttccctattgccttgctgagctgctagccctccccaccctccctttccttaccctccaggctagccaggttccttgtccactcatcttgccggatctaccccctttccttttcaggctgagccagacgggactgtccccgaaaagccccttcctgctggccaacaccttaagcctgtgtccacgggttaaaaaggtggatctcaggtgggcattcccctgggacagccaggactcgtcctgaagggttgtgcctggagtctggtgggtatgagggggtaggatgaagacagtaggacccaactagaggctgggcttccggaggaggggtgctggccccgtgggggcatcctgaggctgtggccacagctgtctgacccaggtcctgtctgatccaggtccctgcaccatgcaactttgcacttcagatccaacgaggaggaggaaggcgtgtgctgtgggtaagcccccttgaaccatgcctaggcagctagttgatgttggggaccagtagatctgcctcctgggtggccagagcagtatgcagactgcctaccacaaaacattcccctggaacaaccctgcagagggacttgtttcacccagcatgaagaaacacaggtccgggtgggatctactgtgggggtgggagcagtggattctggacacttccagagggtccaagcttgagtggagacccacctggagcccagaggctgtgccctgggctagccaggccggagggggtctcagtggccaaacgccccatcccctgcttgtcccctttacctccgtccagcaggttcacaggctgcagcctcagccaggagcacgtagagtcactctgctggttgctgagcaagtgtaaagacctcagccaggtggagtaagttgagggaggaggaggaaggagaggagcatggacgcatgcctgaggggcactgaagggggtatgagggtccgtgtgtgcacatacactcatgtgtgcctgcctacacctctcaggaccagctgtcagggatgcctgggtcacatacccaaagcttccctgaatcaattttctctctcccgcccccactctcgccatggtggagctagttccatggtgtgccctctgacttgggcagccctcagcctcaagtatgtgcaagctctgctggcagatgggggctaaaacgcaggattcattgttggcccagcaggtggttaaaagtaccggatgactctgcctgaggagggacgcagagccagccagggtggggtcttgcagtctcttgtattgttgagatgtggtatctgcgtggcctgtcttggatattcaaatagtcagcccctgcatgggtggaataataatagctaacagctactgagcactttctccactgttctaagtgcttgacatgttctttttatgtttcccatatccctggatactagtattgttctcattttacagatgagggaactgagacacagagggtgtaagaacttgcccaaggtcacacagctagtaaaatgcagagtccctgctcagacgcattgggaatccagcctaggaccagtgggaaatagagagagcagtccgccaaaaatgccacacaattttcatttctgttgtgatgtggcagagaagaaaaatgtgactgataaaatcatggatttcttttttttttaagacctggggtctcactctgttgcccaggctggagtgcagtggtgcaatgataggtcactgcagcctccaactcctgggctcaagcgatcctcccacctcagcctctggagtagctgggactacaggcacacaccaacatgcctggctaatagtttagttttgtaagagatgaagtctcaccatgttccccaggttggtctcaaacttctgagctcaggtgatcctcagcctcccaggttgctgagattacaggcatgagccgctgtgcttggaatgtattttaaacagatatgaataagaaatatgtctttgagttttttgtttttcattatagagggaaatttttcttttctttctttctttttttttagatggagtctttctctgctgcccaggctggaatgcagtggcgcaatttcggctcactgcaacttccgcctcccaggttcaagcaattctcctgcctcagcctcccaaggagctgagattacaggcatgagccaccatgcctggctaattttggtatttttagtagagacggggtttcaccatgttggccaggctggtcttgaactcctgacctcaggcgatccgcctgcctcgccctcccaaagtgctgggattacagccttgagccaccgcacccagccaatttttcttattttaaagactattttattaagtggcttcataagacagaccaatttttaaatgacgtttctcaggaaaagatgaaattaacaaacatcaaaaatgtcacagacctaggaggaaaatcagatgttccgggacacactggttatattatttctgaaactgtagttaaaactagctgggcgtggtggctcacgcctgtaatcccagcactttgggaggccaaagcgggtggatcacctgaggtcaggagtttgagaccagcctgatcaacatggtgaaaacccgtctctactaaaaatacaaaaataattagccaggcatagtggcacatgcctgtaatcccagctacttgggaggctgaggcaggagaatctcttgaacctgggagacagaggtcgcagtgagccaagatcgtgccattgcactccagcctgggcaacagagcaagactccatctcaaaataaataaataaataaaaccacagaatgctgcaatgaagggaagtaagaaacttcaggtgaggtttccaatattgatattgcattcccagattaaaagaagaaatctatgggtttaatgcatcctgcaaacatttttttttcctgaatttcctctcattcaaaaactgtggatcccaaatgatgccggccaagggcgtggtgaaggcaaattggtttttctttaacccttgaaagcctgctggaggcacctgagctatgagtggtcacccgatatggaagaggaccaagaggatgggtttactgtggtgctggggaggggatagtagcagagaacgtaggagttgctggtcattctagtggtgatggaagggatggtgatggtggtactgggcttggtggtgtagaattgtggtgataatgaaagtggtggtggtgatggtggtaatactggtggtggtgacattggtggtggtggtgatggtggtgatactggtgatggtggtgatggtggtggcgctggtgaccctgacatggggtccagtagcagtgacagtggatgcaggctcctggtgactgaggagcatctcaggctgaggaggcacctctgatccccgccactgctccttaccccctacagtctctcagcaaacctgctgggcgacagcggactcagatgccttctggaatgtctgccgcaggtgcccatctccggtttgcttgagtaagtggaaagcagcataaaggacagatagcaaggaggaaggctcccctaggccaaaagcatgatgggggctccttctgagggcatcccccagagcaccagaggacaaggactgtggagggcaaggggcaattcttcccttgccttcactcccctggccttgggtcctttcctctgtccctcacacccaccatgggcagatcctccaccaaacacccaagagaggctgtgattcgtggcagggtgacacacccctacagccaaactgacctggggacagggaagcaacattccatccccaaccagctgatgcgggattgcagctgcctggctcctggtccatcccgtccctgaaattcttctgacccaatctgtggaacataaatgtggagatgtccctgtggcaggcaaggggccttaggaagtcatccacatggttgccccatctctcccgtgacctgctggagtgacagccagctccaggacaccacttgttgctaggcaactgagcttcgtgctcgggagtccttgacccatgcggggctagagctgccagcctggccttgccagtgcccagaccccagaccacaggggcagcgggcagggtgagtgcagcgctcaaggactcagggtctggtgccagttctgcctgtgtggggatggtatccttctgggcctcagtgtgtccatctggagaatagatgcttagacatggaggcttctcttcttggaaatgacagctggaagggagatggagggggctgggcagggctccaaggaggtcctgccctcactcccattctcatctccatttcccttctagtctgagtcacaacagcatttctcaggaaagtgccctgtacctgctggagacactgccctcctgcccacgtgtccgggaggcctcagtgaagtaaggggatgttggtccccgaaaagcccctttctgctggccaacaggtgcccctggctgatgatgggagaagcaaggcacccacactttgtggccttccatctgggtggcttggagcaacctctgcctttctctgaatctcagggtttcctgggcatgggatcataatttctatcccctgatgcccgggtgccatggggaccatggaggccatggggtgggaaggccaggtattgccatgctcacagaatgagtttgggggtctcctctggttctgaggcctccatcctcccttgtccttgtgggtgcagccccgcttccctctctgtgccctgtgggtgccctaggtgcctaggaagctggcatgtctgggcaccgtgcttccccaggcccttctctctgcagcctgggctctgagcagagcttccggattcacttctccagagaggaccaggctgggaagacactcaggtaatccctgcagggtgatgggacaggggacagagaggggagaggaggctgaccctatggcggcctccatggccccctcttccctgggccctctcctcctttagagagcagcttcaagctcactgcctgggtctgttcctccagatctgcccccgatgccctggtaactccagtctcagccagggccttggcattgaacttgtgcctcttagcccaccatcctaagcccaactcagcccaacattctcttccttgccatgtcctgactacaggccttgaggcttctgagtgtcacggttaaagattttgaagccaactgaaaataaatccctgatctgccacttaccagctatgtggccctggacaagtaaaatggggataataacacaacctaccccttagggttattgtgaggattaaatgagttaataagtataaagtgccaggaaaaggtctggctcatgggagtgctgtcagcagttattgtaactgttattattattattattattattattattattatcattatcattacccctggtagccctgactcactgccacggccagttcctttacatgtcttacttcagctgtgaacagggcctccaaactgatccctgcatcttatcaggcctcctcccctccattcactccacagcccccagagggatcttcacaacacacatctgacagtgcccctctgctactctgtgcccctcagtggctccccattaaccccagggtgaagttcaaagtccctagcatcttctccctcacagtctgatccaactgtcaccttccaccatgttccttcccacctcccccacaccacacacacgccctacacaccaacccatataccacagatacaccaagcacacccaaacacaccacacagcacgcagcacacacaacacacgcacaccacacagcacacacaacacacaaacgcaccacataccatacacataccacatacacacacatacaccacacacaccacacaatacacacaccccacaaaaacaaaccccccacatacatacctggcacattacaaatacagcacacacaccacataatacctacaaataccacatacacaacacacacacacacacacagttcagccataaccttcactatttgctcctagatcaagccctgcctgaagattctctgcctctgctcacaccgcactcagctcaacattctcttccttgccttttctgagataaaattctcccaatcctttaacacccagctcaaacatcagcccctcctggaagtatcccagcagccctgcctcatcagagtgaactgccccgaggttcactgggccctttcacttggctgggcccgtctgctggccacccagggctgagatgcctggacagcagagccccacggagaatcccaggcacacctccctccccagggagctcagccagtgctggtccgggagagtaaggcagtggttaagagcttggggtctgcagtcagactgacctggatggaaaccagattctgcccttctttcttatctgctgtgtgtccttgggttagtcagtttccccacctctaattggtgctatgagaattaaaggagaccctgcgggtaaggcaggaagtcccatgcacccagaggctggcacagtgcctgacctagagtcagcctccctaaataacttactcctaatactttcttacagggggtgtgggaggttcctccccaaagagacaggaagctcccagagcaggagctgcatatttggcctctcaggccctgctccaggcctttgccctcagaggtgggatgctcccccaataggccctcagggaggctgagatgaagctgagcagcagtgcccacaggcctcacccaggctctgccctggctttctgccctcaggctaagtgagtgcagcttccggccagagcacgtgtccaggctggccaccggcttgagcaagtccctgcagctgacggagctcacgtgagtgacccacccagcccgtgaggacagcagaggggtgggggcaccctgccagagccacctcagtgactgacctctgtctccaggctgacccagtgctgcctgggccagaagcagctggccatcctcctgagcttggtggggcgacccgcagggctgttcagcctcaggtacctcctcccccgctgcctccgggaggggccatggcatgaatgggagcaggggtgggcactggagtaagaggcccccaggatcatggccccagtcatttcctgtacccacaaccctgccatctggaccctgagcaaaccctgtccatctgtcccagagactccacaaggcacacagagaaactgtccttccccacactggaggcctgtgctttgggatttaagaaaaaaagaaagaaagaaagaaagaaggtttcagaggatactgaactgaggacaaaaataaactgaaacgaagttcttgtctgtctgttcactatgatcattttaaaacactcagaaaaagaagataccgaagtagaaagaataattttttaaaactcctattcccagaacctaggtttgacagttgttcatactttttttatatttgcttctatttttatttttatttcagctgaagcggtttcaagtaagttatagacctcataatccatcactcctaaatatttcaccgtgaagctccaaaaaataaggacatttttttcagtaatcacagttccatcaggacacctaagaaactcagttagcgattccttagtgtcgggtactacctagtctaatctaaaatgtccccattgtcccccagataagacagctggcttttgggatccaggatctgtcacatctggtctgcatttgcacgggatggcgatggtcttctgactcttctaacctgcggcatcactgcccccatcccctcaccacagctttctgtttcatgtcagtgtctgttgacaaaatcagcaactgtgtgtactgcagactgtcctgctcctgactctggtggctttctcatgatgtcatggcacgtgttcctctaaccccgactttcctggaaactggacgttagatcaaaaggctccatgacattcagtttcatgtttgtgcccaaaaaacttacgtcaccgacagagctgtgcacttctcattgcagcctgtgacaaggcacctaagaactgactgttccccaaaataacctgtaaaaattattataaaatacacataacaaaatttgccatcttaatcatttctaagtgtaccattcaggagtgttaagtacatccacttttttgtacggccaatctccggaactcttttcctcttgcaaaactgaatctctatccccattaaacaacaccccatttcccccctaccccagcccctggcaaccaccattctgctttctgtctctatgaattggactgctctaaatagtttatatgagtggagtcatttgtatttgtctgtatttgtctttttgtgactggctcatttcattgggcataatgtcctctggttcattcatgttgcagcgtgtgtcactgtgtcagactttccttcctttttttttttttttttttttttgagacagagtctcactcttgtcacctgggctggagtgcactggctcgatctcagctcactgcaccctccacctcttgggttcaagcgattctcctgcctcagcctccggagtagctgggattacaggcgcccgccaccacacccagctaatttttttttgtatttttgtagagacagggtttcaccatgttggcgaggctggtctcgaactcctgacctcagatgatctgcccgtttcggccttccaaagtgctgggattacaggcatgagccaccacacccagccctttccttttttaaggctgcataatattccattgtgtggatggaccacattttgtgtatccacttatccatcaattgacacttgggttgtccattcaagtgcccaattgacagtccctgctttctttttttaaatattattttatttcaaaaacaatagagatgaggtctcactgttttgcccaggatgatcttgatctcctgagctcaagtgatcctcccacctcagcctcccaaagtgctaggcgtgagccaccatgcccagccagaaagtcccagctttcaattattttggttatatatccagaattgctagagcacccaaaataactttttttttttgagacggagtctcgctctgttgcccaggttggagtgcagtggtgcgatctcggctcactgcaagctccgcctcctgggttcacgccattctcctgcctcagcctccagagtagctgggactacaggtgcccgccaccacgcctgactaatgttttgtatttttagtagagacggggtttcaccatgttagccaggatggtctcgatctcctgacctcgtgatccccccacctcagcctcccaaagtgctgggattacaggtgtgagccactgcacccagccaaaataacattttcaaataaaacttttcttagtctaaaaataatattggttgggggaagtggcacacgcctgtaatcccaacactttgggaggctgaggtgggcagattgtttgagctcaggcgttcaagaccagcctggacaacatggcaaaaccccatatctacaaaaaataaaaataaaaaaataatatttaatcattgttgaaatgtgcagaaaatccagaaatacataaagaaaatagtgctttaaaaattcagcataactttaaagcagtaatatttgacttaattctcttttttcctactttcaaattaatgcacatgcattgtagaaagtttagaaaatatagaaaattaaagaagacataaaataaaaatcactcatgagaattctatcatcttaaacaaccaccatgaacatttaatatattttcctatgttttccacacatctctctccctgtttctttccacactttttttctccaaatactttcctttttttgaaatgcaaaattgggatcatgttttatatacagtttggtttccttacctttgtgatgtaacattatgtgaatcttttcttaaatctaaaaatatcagtggcccagtgcagtggctcacgcctgtaatcccagcactttgggaggccgaggcaggtggatcacttgaggtcaggagttcaagaccagcctgaccaacatggtgaaaccccatctctactaaaaatacaaaaattagccaggcgtggtggcgcatgcctgtaatcccagctacttgggaggctgaggcaggagaatcgcttgaacccaggaggcagaggttgcagtgatctgagatcatgccattgcactccagtctgggcaacaagagcaaaactctgtctcaaaaataaaataagataagataaaaaaataaaatataaaaatatcatttaaaaaataatattttctgtttggattgtcacaacaatagttgttggaataagggtgatgttaatttccttttttagattgatgcctacttgtataattttatagttttaaaatgagcaaaaaaaactcaaaaagcctctaggtcccccccttgacactcctcccccggccccgtcatgtgtgctgattgtctgctgctcaccttgggggggccttatctgtgtccccttctgtgacagggtgcaggagccgtgggcggacagagccagggttctctccctgttagaagtctgcgcccaggcctcaggcagtgtcactgaaatcaggtgagtccagagaagaggcccctttggaattcttcatctttcataagcattgggacttttccttgaccttccctcatcctgtggggtaatagctgtgtcaccagctagttttccatgtccccagggtagcaggagctcctggggcatatgtgaggggctacacatttgttgggactagtgcagtagtcaagccacagtgtcagaggaagacatccccagaatcaaaacaaagggctattggatccaggcagacatggctgggagtccacgctggttgcttggaagtggccccccagatgcagtaacacacattatggctcttcaaccagaaataacacaatgacacacagagtagcttatagcaaaggttttagcatcccactcagctatgttcagatcccaactcagtcacttactggttggagcccattactgtgtctctctgacctcaacctcctgctcttaaaagagtctaattacggccctttgcagggctgggaggattacaagaactggagcctgtaaagatgtctgctgtactgtcaccagccacacagcctgccctgcttcttccttctctcctccaggagtgagcaaggggatgctctggggactttataatctcccatagccctctccccataagcaccccatgaacataacattcaagtgaaggcagtgagcttagagcgcaaatgcagactccagacacatcccctaccccacccttccaccacactgtggtccttgtgcccctccctcagaaaattctggaactgcccttggatccctctaatggctttctgtcatggtctgaaaaggcttatcaacttattaactttaaattgttgaaaagggccaggcgcggtggctcacgcctgtaaccccagcactttgggaggccgaggcaggaggatcactgaagcccagagttcaaggctgcagtgagctatgatcgtgcccaccactgcacttcagcctgggctacagagcaagaccctgtctctttaaaaaaaaaaaaaaagaaagagaaaaattgttgaaaaggcactacttggggtattgtgtgtgactcacggaagcacctactttccagtcctaagctggtccctggcaggggagaaggggacccaggcaaagtgagagttcagagttggagccgggcagcccaggtgccagctaggccctccggggaaggctgcccgacctcacgttggttactgctcactcctcagcatctccgagacccagcagcagctctgtgtccagctggaatttcctcgccaggaagagaatccagaagctgtggcactcaggtgggacccagcaccagggaccccaaggcaggggctggtgttggggagggggcagggctgcttctgaccaatattcaccaccctgcccagagaccttaggggttcgaagtctttacacaggctacagaggtctgaccaacccacttctgaggcgtttcagccccactccaggccccagtctcagctccagtcacccccatgaactttcagttccccgaacaccatcttgcttagaccttagggcatttgcacaggctgtgctctctgcccagaatgttctcttcacgcctacctgcttcacctgcctaactcctcctcatccctcaggtctcagcttaaatgccaccacctcagggaggccccctggaccccaaggcttagtcaaacacttccattatccactcttatagatccctggattcacagcacctctaaatccatatggcacagtttgggaaattaaaatgtcacccttttgagtggatgcagccctgcatgtgtacattctgggaaatagagcatggtaggatctcagcctcacctcacctcctcggctgtgtgtccttgtgcggtgaacaacctgcacaaccataccagctgccccatctggactcctgcttcctagcacttctcataagtgaatagcaaactgtaggacttcatttgatcagcatttatttacccctacaccataagctccttgcaggcagatactgaatcccacatactggactagatgttccaaaactgtcgtctccctgtctgtgtccaggttggctcactgtgaccttggagcccaccacagccttcttgtcgggcagctgatggagacatgtgccaggctgcagcagctcaggtcagcgcctggaaactctgtgtggggccctgagttctctggttgaccctggtacctactccaggccatgtgtgaccctggcattctcacttccttgtgcaggagaaaatcacacttggccagtggaggggagggagagccccagggtggctcaggggagctcttgggtggccccttctcctctcttggcacccccttctggatgtgatgacctctgaggtgtgtccagcctgaaatcctctagaatatccttggaccttttcagcttgtctcaggttaacctctgtgaggacgatgatgccagttccctgctgctgcagagcctcctgctgtccctctctgagctgaagacatttcggtatgtagacaagacattcactcagtcccctttgcagctctgccctgccctgacacctcccgttattcccagccctgggctcagaggactcttactctgtgtcttactctgtggacacaaaccacaggtggccctggagatgatttttaggggtacctagtcgtaaacatgaccttaggaacattgagccacatggcaagaaagttgttccctttttaacactctttcattgtttttcttttaaaataactgcgaactaacacaaagtttcaagaagactgagaactgctgtgtgccatttacccaaattcacccttagagctgggcgtggtggctcatgtctgtaatcctagcactttgggaggccgaggcaggtggattgcctgagctcaggaattcgagaccaccctggacaacacggtgaaaccccgtctctactaaaatacaaaaaaattagctgggcatggtggtgcatgcctgtaatcccagctaattgggaggctgaggcacaagaattgcttgaacccgggaggctgaggttacagtgagccaagattgtgccactgcactctagcctaggtgacagagcgaggctcggtttccgaaaaaaaaaaaaaagaacaaattcaccctttgccaatctttttccacatttgctcatttcttccctccctccttctttcccacctcccttttctttcactctctccctctctccttttctgaaccatttagaagtaagttgtaatcatgtccctttacccgttaacatttcagcgaatttgctagaaataaggacattctcttccataatccagtaaaattataaaatccaggaaatgtgacattgatacactactattatctcaactacagtttatactccaatctcaccagttctcccaataatgttgcttattgcatttttttcccagttgtggatccaatccaggatcacacgtctcatttagtgtcatctctttagtgtctccttcaatctggaacacgtccttggcccttctttgtctttcatagcattgtctctgacatttacaggccagttattttatagaatgtccttccacttgggtttgtccaatgtttcctcatgtttagagttagagtctgccctttgggcaggaatatcacacaggtgatgctgtgttatcgtgccttccatcggggcacatgatgtgtcagagtcctcgggctagtgatgttaactgtgatcacctgtgacagtggtgtctgccaggtctctccacttgcaaatttactaactttccctttgtaatcaacatagattatgtggggagatactttaagattatgtattaagtcttcctcaaactctcattggcaaattttagcagccgttaataaatcttacttaaatcgatgaatcagcatgacagttgcaaaatgtagctttcctaactttacattttatttccatctaactgattacaccaagaagaaactcttgggctgggaacagtggctcaagcttgtaatcccagcactctgggaggccgaggaggaaaaatcgcttgagcccgggagttcgacaccagcctgagcaacatagcgagaccacccccatctctacaaaaaataaataaataaaataaatgtttaaaaaggaagaaactctttaggacagagagatctttgacacttcttcagtatttgctttaaagatgcagagtttgtaataaacaacagtaactagctaaactacagtgatacctaatcctggcttaagttgtgaagttgctacctgaatgactgcggtttaggaaatactgaactagtccatgcttctgcttccaagctctgtggtggcttaatgagttcatggtggaagagatttacgaagggaaggaggtctcctcacattgcccgccacatccctaccccacatccttgccctctgccaccagcattcagagctcccaagacccagggcggctcctgcctgacctgttgccctttgacccccaccaggctgacctccagctgtgtgagcaccgagggcctcgcccacctggcatctggtctgggccactgccaccacttggaggagctggagtgagttgcagagtggagggattggggacaagtggcccagctgagggtgaggggtggagaagagagcagggcgtttgggagggcaggcaatgagacttcaaccaatgacccttcccctgatgaagtgcagcagttctgggtgtggcctggggaaggaagagcaccacagttttggtctgaatttcgccactgactcacagaggggctgtgggcatggctgttccactctgggctttgattgccttatctatgaaaatggggctcatgagccttgctctgctgggctggctgtgggagtcaggctacggagagggctgaagaacaagagggtgtgtgtgtgtgtgtgtgtccctagtcccccagcttcctctctgcagccttcatccagggcatagtttctcagctgggccagctgtgactatcatgcctacccagagcctgagccctggagctagggatacccatggggaacctggacagcgagggtggcccagggcatgcagatgcagagttggcctcccaggggacagagcaggagaggggagctgacaggacagctcagctccagggctgggcaggctgcgctaacccttgcctctgcctggtcttctgcagcttgtctaacaatcaatttgatgaggagggcaccaaggcgctgatgagggcccttgaggggaaatggatgctaaagaggctggagtaagtagtgatggtggttgtgggtgagtgagtggtgggggtggttaatggatggtggaagtgggtgagtggtggggttggttaatggatggtggaagtgggtgagtggtggggttggttaatggggaatggggtgagtgagtggtgggagtggttaatggggaatgggctgagtgagtggtgggagtggttaatggggaatggggtgagtgagtggtgatggtggttaatggggaagggtgtgagagtggtgatggtggttaatggggaagggggtgagtgagtggtgatggtggttaatggggaagtgttgtgagtgagttgtgttggtggttaatggggaaggagatgagtgagtggtgttggtggttaatggggaagggttgtgagtgagtggtggcgttggttaatggggaagggggtgagtgagtggtgatggtggttaatggggaagagttgtgagtgagtggtgttggtggttaatggggaagggggtgagtgagtggtggggttggttaatggggaagtgttgtgagtgagtggtgatggtgattaatggggaagggttgtgagtgagtggcgttggtggttaatggggaagggagggagtgagtgatgatggtggttaatggggaagggttgtgagtgagttgtggggttggttaatggggaagcgttgtgagtgagtggtgatggttggttaatggggaagggttgtgagtgagtggtgatggtggttaatggggaagggggtgagtgagtggtgttggtggttaatggggaagtgttgtgagtgagtggtgatggtggttaatggggaagggttgtgagtgagtggtgttggtggttaatggggaagggggtgagtgagcgatgatggtggttaatggggaagggttgtgagtgagtggtggggttggttaacggggaagggggtgagtgagtggtggtggtggttaatggggaagggggtgagtgagtggtgttggtggttaatggggaagggggtgggtgagtggtgatggtggttaatgggaagggagtgagtggtgatggtggttaatggggaagggttgtgagtgagtggtgatggtggttaatggggaagggggtgagtaaggggtgggggtggttaatagggaagagttgtgagtgagtggtggggttggttaatggggaagggggtgagtgagggatgacagtggttaatggggaaaggagtgagtgaggggtgatggtgcttagtgctgcatggtcagtgagtagcatgcctaggaacctttgcatgttttgtgaacacaaaccgccatgtttctggatggacccaggtgagctgaatgcccttacatgaccttttactttctattctggatctcagtgccagcaagaaccttggtcataggaaacagaatacacaactcaaagcaatccaagacagaaatatattggcttatgtcatggaaaattacgaggccaatgacttcaggcacagctggatccaggggttctatatttgtcaggcttctctctcacacacttcactctggcccttactctttctctgtccaccttggcttccttctcaggcaggccatccctgcacctgcaggcttactttctctcagcttagtggaaagggagtaccattctctctgtggttacaacaaaaggtcctagactgagtctcactggactagcttgagtcacctgccccaccctaaagcaatcactgtggctgtgagcacaaaatattctcctcactggccagacctgggcgcatgcacaccctatcttctggacttagaggggtggtatttcaggatgtgagtaacagaagaggaaagaaactctgggcagaaaaaaatctacagatgtccactacatttgtctacagttgtttccttggtaactggcagcttttactactctcccccataatttgaagtcatcaaattcttagaaatgccagaaacagcctcagtctaaaagacaggtccccgtcctgcacagattcctgtttagacagtatctggacagaaaatttaacagaatatcttctgcttttcatctcttaactttttctgatgaccaaaaaagttccatctttctagaaatatgtaacaaataacatgaaatgccccggggatgacaccccctgagaaaacttctgttgaacggtttgtgaatttttctccagatttttttttctacatatgttttgaattcagcttgaaagtagccttttgactttttgccccttaacattgaaattcttccgcttgtccctctttgcttgtcctggggagaggatcaggtaaaaggagaagagggattacagagacctttgaccacagggccctcctgtcgtctcactggtctgtttctttgcccactgtccatgtacctgcatctcggctcagccttctggaagcttttatttaggggattggaggcccagtgaggtcattcattggctcattcatgcattcgacaaatatgtactgagctgggcacctgggccggggacaggacagattcatccatgcccctgggggcctttttcttcctcctgatttcccaggcaccatgtgctgctccttacctcctgctgccttagttgccctatctgtaaactgggcataatatcttccctgtccgaaggaaggggatggatcgtcagtgcccggaggtctcttcccatctcagatctgtcatttccaagtgtaactccccacaggcagttaccctcaaatccagtcagcttcttccagctgtatacctgtgatggagtgggtaggagcatggaccctagttaggagcctcactgcctgggttcaactctgggtggggtaactgacacttccagtttgcttggagctttccccattttggcacccaaagtcccacatccaggaaaaactcttctgttctgagccaaccaagacagttgaccatcttttgcttctgcctcttattttattatttatttatttgagacccagtctctctccgttgcccaggctggagtgcagtggcacagtcttggctcactgcaacctccgcctcccgggttcaagcaaccctcctgcctcagcctcccaagtagctggcattacaggcacatgccaccaggcccagctaatttttctatttttagtggagatggggtttcactttgttggccaggctggtctcgaactcctgacctcaggtgattcacccgccttggcctcacaaagtcctgggattacaggcatgagccattgcgcccagccagttctgtttcttaatgtgtgaactcgtgccagtccctcagcctctctgttctttggcctcctcatcttaactttgaggataagagcaatctcccctgctacggttgttgtgagtattaaatgagataatatgtgttacagtcttagagtctggtcagagttcacactctacaagtgctagctattgttattctcctctcctgcctaggctgggggcctctagaagtacaatcgcctgggtcacatatggttggggctcaggaatgggagttctatagtttttggttctgttcctgaagcagccactttgtgtatgaccttaagcaagttctctaactctctgaaccttggtgttcctcacctgtaaaatggggacgataataaacccacctttccagatggccccaagccctgagtttggcccacattttatgatcaatgtgtgaccgccattattacggatcattagtcttggtccatgtggttcagaacatagaactgctgcctgcctgacctcagtaattcatgcagagaaacagcatttggacctcccagtacagttcattttgtagaatttttacactgtgtggatataagtggctgtcttggaggtccctaggcttgctaagcacagaggcctcagacccccagactggacagtgccccacccccagatgtcaagttcacctggcctcctcttctccagcctcagtcaccttctgctgaacagctccaccttggccttgcttactcacagactaagccagatgacctgcctgcagagcctcaggtgagtgaccgagcggccccatgggaatgagtgggaagaaacacttcccactcagttgggaccacatccagggaagcactgaggccacctcccaggggatcctttgcggatccctcccaggcccatccctgtgccctcccaggtgggtgcccactgctcttgccttctaatgccatcagcttcctcctggttacaaaagtggcctaaagggcttaggcccacgtcgtagaacaacccttgaggcacacacacagttcaccctgggctcttgttaaaatgctcattctgattccccaggtctggaattctgcctagactgtgcttttttttttttttttttttttttttttttttttttttttttgagttggggcctcactgtgtggcccaggctggagtgcagtggcaatgcacaggtgcaatcgtgttgcactgcagcctcaaactcctgggcgaacgtgatcctcctgcctcaccctcctaagcagctgggactacaggcctaaggcgttgcacccaaacttagcatttctttttttgtttgtttgtttttgagacagagtttcgctcttgttgcccaggctggagtgcaatggcacaatctcagctcactgcaacctccgcctcccgggttcaagcgattctcctgcctcagcctcccgagtagccgggattataggcatgtgccaccacgcccggctaatttttgtatttttggtagagacagtgtttctccatgttggtcaggctggtcttgaacgtccaacctcaggtgatctgcccacctcggcctcccaaagtgctgggattacaggcgtgagccaccacgcctggcttcagactctgcattttctaacaagcttccgggtggtatcaattctgggggccacggtcagcactttgagtagtgtgggtctagactcagatggggtggccttcctacactccctttgtgatttcactccctgctgctaggataaataaacatgacacttactttcaatgtgatttttcaaaacatgaaatcttgtgactaaaaacaaatccaagcagtgacacaaagcattgctttgtttatatccaagtacacctcctaccccctacctcgggcagagcagagtaggtaggaaatgaggttagagagttccaggaggttatatcatattggaccatttcacccaaaattaatttactgaaaggtgatccattaaagtgtatttatttatttctattttatttttattttttgagacacagtctcactctgtcgcccaggctggagtgcagtggcatgatctcacttcactgcaacctctgcctcctgggttcaagcgattctggtgcctcagccgcccaagtagctgggattacaggtatgcaccaccacgcccagataatttttgtatatttttagtacaaatggggtttcaccatgttggccgggctggtctcgaacccctgacctcaaatgatccacctgcctagactccgaaagtgctgggaatacaggtgtgaaccactgctcccagccccattaaaatttaatttgcaaaataaaagaaagtaaaaacaacatgcaaacaaatacttcccaaggggctaagaccatttgcctcagctatttattgttttttcctacccaggcagagcaaggtcagggctcagtaaagacaataccctgggtttaaggaaaaacctaccatttgcatggatgagaacacatatgcccctgagaactgatctgcgtgaatcagagaatcccacgtgaaagtggcattcagccgggccagcccggagatccctgacacagaggctgaggtgaagcttggcaaagaaatgtagagactcctcctgggccaggggctctggatttgtttccacccagcctgcaagtccctaagtctctggccagtcacagctcactgctggctctcaagttttctcacctggacactggggacaataattcccaccttgctcaccactccccacctgccatgacccccagaagttttgctaccagcatatgaattcctgggcgtgtaaggctttgcaaactgtagagttcttagcacagcacctgcaaaggcctttaagctcctgaaagcctcttggtctattccctgcttttccagactgaacaggaacagtatcggtgatgtcggttgctgccacctttctgaggctctcagggctgccaccagcctagaggagctggagtgagttgcccattctgcccccagacccaggacaattttggccgggaaagatgacaagggcaaggggctacctgagcacgccctttgcttcttcatctcatctccttcacccacttctacactgtgtaaacaacctggggcctagaagcttgggggacccaaagacaggatgtaagagtgtcaattgtagcaagagggatttaggtcagacaatggggagaacatcctaaacagaagccaagggttaggagctgtcactcaacatggggtgatggggctctctgtgtgagtcgaggcccttcctgggacttcagcctccccttctttttctgggagtggggtgtggacaagatgagacggcagaaggctgatgaagctgttttctcccccaagcttgagccacaaccagattggagacgctggtgtccagcacttagctaccatcctgcctgggctgccagagctcaggaagatagagtgagtagccagccctacagaggagggccacaggggtcacacgatggtcctaggagatactggcccctagctgaggccagcatggtaaaatctcccctgcgccaacctcagtgtccaggcagtggggctcggtgacctcctggccctcactgcgggaccttaagccaccccagcccctgctcttctctgggcctttctgcctcattgtctgggtaggtgtgtggtgtcggggggttgtctcttaggccccctgaagcaggggtggcagacccagcagatgtgctggggtgtcggggagagggggcatcagaggacctgatggctgcccccctcccacagcctctcagggaatagcatcagctcagccgggggagtgcagttggcagagtctctcgttctttgcaggcgcctggaggagttgatgtgagtgtctgcccaggtggcctctgccctctgtgccccccaggtccacctggcctcctctcccgcagtgggcacagggcagggcgggggtcccgagtgggcaggcccagtactcaatgctcattcctctcctcttccaggcttggctgcaatgccctgggggatcccacagccctggggctggctcaggagctgccccagcacctgagggtcctacagtgagtggccccctgcccataccatgcagggctggtggggaggagggtcctcgggagcagtgggggggtccaggcccccatcagttgagctgccctgccccaagtcaagcttggcatatacccactctcctgcctgttccttccctgcctctgatgtctgcagcaagaaaatcaggaggcccagcctagtcctggctctgccactggcccctgcctgaccttggccaaacccctgccccttctcagcctcagtttcttcacatgcaaaagaagtacaatgatcccagttcattgtgccctgtgagcgggtccctgagggcgaatgagaaatcctggcagagggcttcgcaggagcacggtgccaatcaacgtggcctcagcacttcacaaatgacctcattgcagccccatggcagcccccagagtcccagagtgctgggaccttgttttttttttttttttttttttttagatggagtctctctctgtcacccaggctggagtgcagtggtgcaacctcggctcactgcaacctccacctcccgggttcaagcaattcttgtgcctcagctaccagagtagctgggattacgagcatgcccaccatgcccagctaatttttgtatttttagtagagacggcatttcaccatattgcccaggctggtcttggactcctggcctcaagtgatccacccacctcagcctccaaaagtgctgggattacaggcgtgagccaccatggctggctggtgctgggacttttatgtgctcccttttccaggcaagggaatgaaggccaggagaggtgtggagaattttccttactcatacacgaaggacccaggtgttgaatttgggatctcagaccccaaagccagggtccttgatacctacccaggtcctgtgtggatggggaattagccagagactgtctacgggctggcactgcagcctgagacaaggctgagggtggggctctggaaacgccagtccctcaggctcctctcaccctctcctctttccccagcctaccattcagccatctgggcccaggtggggccctgagcctggcccaggccctggatggatccccccatttggaagagatcaggtaagtaggggctgcccagcccaggcacggggacagtcctgggcgggtctgggggttcctctcacaggtatctcccctaccctgcagcttggcggaaaacaacctggctggaggggtcctgcgtttctgtatggagctcccgctgctcagacagatagagtaagtagcctcccctgcctgcctaggggaccagtggcaggctgagggcagcccttctctgactgagcctaacacctggggaggcctttgaagtgatagaagccccagggatggtgggggcctggctcaagaaaggaagtctttcctaaaacgcctagcttaccccagaccctggtggctctggaggcaggacctgctagatcccctgactcaaacaacccccatcccatcccatgcccttctccatccccagcctggtttcctgtaagattgacaaccagactgccaagctcctcacctccagcttcacgagctgccctgccctggaagtaatcttgtgagtgattggaagagccctgagctggctgggaaaaggaaaagtcgggaggggtcgggggagttggctccagcctgctgtgtggcctggagctgctcccatcctctctggccagtcctcccatttgtaaatggggaagatcatccttactcagacatcctctcaaagacattttaacacttgagctgcaggtaatgttgggtaaaacagtttaccttcttctgcctttttccccatttgtagattggtgggaggggaggtggaccagatggtctttaaaggtttttggtccaaccttccttttgggaggcaactggatagaccaccttgcctgcttgatgaaacctccatttatgaaccacagttggtagaaacagtggctaaagccaggagaaagccacccccagacctgctggctggccgtgcttggctgtctcttagcaatcagaatcccccagaccttggggctttgcagtgctgcctcatgagtaaactagaattctaggactagcctgggaccctaaccatggtatggaggacaaagctgtttcctaaagaacaggacacaagtgattacgagaagattttagtttgcatcctaaaggtcttaacccttctcattacaccaaagcgaaagtctcagatcagtggtaattcatctttaacacctaacactggattctccctttttaaccaaaagggttaaaaacccaacatcttaggaagggcatatgttccaactagaagttaataccattgtttgtactatatttatttttgtaactaccttctatatggagtctgtaacacaagttttccattgatagtagcaataaaagtttcctttcaagatttttttttttttttttttttgagatggagtctccctctgttacccaggctggagtgcagtggtgcaatctcggctcactgcaacctccacctgccgggttcaagagattctcctgcctcagcctcctgagtagctgggattacaagtgcccaccaccacacccagctaatttttgtatttttagtagagacaggatttcaccatgttggttaggctcgtctcaaacacctgaccttggcctcccaaagtgctgggattacaggcgtgagcaaccacgcccagccaagattaattttttaaagtaagaaaaaagagggggccaatttaaagaaaaatatgatgcatcttaaatacaggaggtacatgtatgtggcaaaaatggcaacatcttgtgaacaacgtcatgattcaaacttgacggggaggggagcagggaggaaggtaacctgcaccctgacgtcttcaggggaggacacacaagcaccctatcaggtggcctctcttgaaaacccttgcccccacgactggcaccctgctttccccattcactgccttgtctccacccctcgacctccttgctctcctgccgctgactttgggacccctaccctgcaggctgtcctggaatctcctcggggatgaggcagctgccgagctggcccaggtgctgccgcagatgggccggctgaagagagtggagtatgaggggccgggggaggaatgggacgggctaaagggggacctacatcccgggaacaccaagaggccactgggtcagtcccctgcctcccagaaagcccttccttgagttgcacactctggcctgttccaagcccctgccaggcttagttccccctgggttctagccttcagccttcctgctgcacctgccaccagtcccctgttgtcttttgggttccctgagaaggtagtgtgggagactgtgtcccctgaccttggcctgaggaagggacctaggaaactctcacacccattctcatggccgtgtttctctttcccctcccctcactgtccactgagaagcctggagaagaatcagatcacagctttgggggcctggctcctggctgaaggactggcccaggggtctagcatccaagtcatccggtaacagaggcctgcaggggcagggatggtgggtgggaggctacaccaacccccagatctaatgggactccctggaggaggcggcagggcctgggctggggattatcaaaggagacttggaccactccaccaagaatttggcagcaagcagacttggatcaaaccccagctctgccacttgccaactgtgtaactttgtagccataactcaacctctctgaaccccaattttctcatctgtgaaatggggatactgatagtatctacctcagagagttgtgaagactaaatgagcatataaagcactgaacccaatgcctggcacatagtaagcacttaaaatggcagctataatcagagccatcacatacagttgtataggttgtgcactgcacaagggcattaaacctaaggggcaccattcacattgtcaacctgctagatttctagcagatgagagtaaagtaccttgttctaccaaaatcatatattatgacaatttcagacagatggaagtaaaacatcttgaagaaagagggtcttttccttatttgcacaaatgtgtcatatgagtgtggccttagctggcatcactatctcccagggaggaaggttgagttggaggactcaggaggcaggtgtggggtacaccctctccctaggtcagctatgctggtctaacacctgcctctgccaggtaactctaggcacagctctacctttttgggcctcagcctcccaatctgcagatacgacagatggcaaagatgggaggatgaatgagtgcctatatctgtgccccacagcctctggaataaccccattccctgcgacatggcccagcacctgaagagccaggagcccaggctggactttgccttctttgacaaccagccccaggccccttggggtacttgatggccccctcaagacctttggaatccagccaagtgatgcacccaaatgatccacctttcgcccactgggataattgactcaggaaagaagagcctcggcagggcgctctgcactccacccaggaggaaggatacgtgtgtcctgctgcagtcctcagggagaacttttttgggaaccaggagctgggtctggacaaaggagtaccctgcattacgtgggatatgtgtgatcaattggggacatgcgacacacaatgagggtgtcatgacaatgcatgacacgtacggttatatgtggcagtgtgaccccttgacatgtggcgttacatgaaagtcagtgtggcacgtgttctgtggcatgggtgctggcatcccaagtagcaggatacatgattgttggtctatatatgacacatgacaaatgtccatgtcacaggactcatggctggccagatgacctcaggctggcccaagatctaatttattaatttttaaagcaaatacatatttatagattgtgtgtatggagcagctaagtcaggaaaagtcttccgcccgagctgggaggggagagtgtccatgcactgaccagtccaggggctcaagggccagggctctggaacaagccagggactcagccattaagtcccctcctgcctcaatcctcagcctacccatctataaacttgatgactcctcccttacttacatactagcttccaaggacaggtggaggtagggccagcctggcgggagtggagaagcccagtctgtcctatgtaagggacaaagccaggtctaatggtactgggtagggggcactgccaagacaataagctaggctactgggtccagctactactttggtgggattcaggtgagtctccatgcacttcacatgttacccagtgttcttgttacttccaaggagaaccaagaatggctctgtcacactcgaagccaggcttgatcaataaacacaatggtattccacgtctagcgtg

SEQ ID NO: 15690 - DNA, 36317 bp, Homo sapiens
ccatctgaactgtttccaggccctgttcctttttgaattccgccagctcaacttgatcacgaggttcctgacaccgtccgagctcctttttgatctgtacctgagccctgaatcggaccacgacactgtcttccagtacctggagaagaacgctgaccaagtcctgctgatctttgatgggctagatgaggccctccagcctatgggtcctgatggcccaggcccagtcctcacccttttctcccatctctgcaatgggaccctcctgcctggctgccgggtgatggctacctcccgtccagggaagctgcctgcctgcctgcctgcagaggcagccatggtccacatgttgggctttgatgggccacgggtggaagaatatgtgaatcacttcttcagcgcccagccatcgcgggagggggccctggtggagttacagacaaatggacgtctccgaagcctgtgtgcggtgcccgcactgtgccaagtcgcctgtctctgcctccaccatctgcttcctgaccacgccccaggccagtctgtggccctcctgcccaacatgactcagctctatatgcagatggtgctcgccctcagcccccctgggcacttgcccacctcgtccctactggacctgggggaggtggccctgaggggcctggagacagggaaggttatcttctatgcaaaagatattgctccacccttgatagcttttggggccactcacagcctgctgacttccttctgcgtctgcacaggccctgggcaccagcagacaggctatgctttcacccacctcagcctgcaggagtttcttgctgccctgcacctgatggccagccccaaggtgaacaaagacacacttacccagtatgttaccctccattcccgctgggtacagcggaccaaagctagactgggcctctcagaccacctccccaccttcctggcgggcctggcatcctgcacctgccgccccttccttagccacctggcgcagggcaatgaggactgtgtgggtgccaagcaggctgctgtagtgcaggtgttgaagaagttggccacccgcaagctcacagggccaaaggttgtagagctgtgtcactgtgtggatgagacacaggagcctgagctggccagtctcaccgcacaaagcctcccctatcaactgcccttccacaatttcccactgacctgcaccgacctggccaccctgaccaacatcctagagcacagggaggcccccatccacctggattttgatggctgtcccctggagccccactgccctgaggctctggtaggctgtgggcagatagagaatctcaggtgagtaagagtggaggaggaccggggaggggattgggcttttgggggagcagaggccaaccagtctagcaaacctctgccaagaggactggataagaatcttgaatatcagaacataatggcctgcaatgcaagagaggaagctccataccttgacaggacctctggagtccaaatggatcctcctcttgtctgtggtttctggactctcagtctctctgtcaatcatgggctgaaaccacagatccaggctgtctatagaggctggtggactttgggcaagtatatggagcacacacatgcacactgtctaggccagagtttcttcgttcctaaaacgaatctgtaacaatagccaactcatatggtcattgcaagaatgagatgggatggtgcatgaaaaacattttgtagcacagtgcctagcacagagcaaaggctcagtgtgcatattagctagagaaaaggctaggctgcagtaacagagaaacctcctccccaaatacagtaggttaaataatgtagaattttatttctctctcatggaagagtcagaggtaggtggtccaggtcagtggaatggctcagctccacgcagtcatgcaggtacccaggtccctcccattttgctccattatccccttgggaatcctatctgcacagtcaaagctacgtcatgggtatatctgtgctctggcttgggaacaaggaaagagcatggaggaacatgtcaatgcattaaagttcagtcctgaaactaggatacatcccttccactcacattccattggtgagaacatagtcacctggccacactgagctgcaagggaggctgggaaatgtgatctctggctgggaaaccatgttcctcatgatagctctattgctgtagatgaagtggagaatgggctttggtggacgattagaagtctcggccataatatgtatttgttagtactactgtattaagccccatctctctgaggggatggcgatgacttctcagctctgcccagcactgatcctctgacacttcgcttcttcttatggcagctttaagagcaggaagtgtggggatgcctttgcagaagccctctccaggagcttgccgacaatggggaggctgcagatgctggggtgagccaggccttggagctgagaagggtcttcagctggggatgcctggtactctcctccctctccttaatcctacacaaggcagattcctggccccgcccttttcccctcctcgttcctccccaccatctttgcttactctgtaggttagcaggaagtaaaatcactgcccgaggcatcagccacctggtgaaagctttgcctctctgtccacagctgaaagaagtcaggtgagtgatctccaggagggctcactgactggggagatgagccactgcccaggtcccagagtccccctggggcctgcatgttcctccaagtctgaccagtagtttttcagtgagacccagagagggaaggcatcagtccaagtactcagtagggctgagtccaaacccaaggctcccagagtccccagagcaaggcttccttcatctaatattttagactgtcttggaggagcatgagtgttaaggctccctccctctttctgaaatcccaggagaagggatagcagtgcgtaggcaggaatcaggcactgtgggtacacataactacatgaagcaccacacaccttcacatttgttcacacatgtctacacttgcacagaagtacacaggcatatgcaagaatatgcacccacacatgcccactcataggtgtgcacatgtatgcagcgcacacatgcacctttaactacatgtacacattttgatgccagcacactctaactaactaagcttgtatgcacaaatatactcctgccctgtgtctgggactcagtaccatggggaggagtgggaccagtgaccctcctccctggcagaacgctgctagtttatatggcacctttatgacatttagagaaggcaccacttcatccacacagatgcagcctgtcactaaggttcagcacttgttgagtgaaaataataagttggaccacagtccctattgtcgtctcggctgggcatctgtgaaccgtgattaagccaaggttcagaagtactgaacttgttgacatttttcttccctggctattgaaagtgactttaattttgtctttcatcacccaccattgttcttaatcaccctcactcccctcaactcatctgtctccccagctaggaacccaggcaaggctggcttgtgaacaggtggggaaagtgaggtcagagaggaatgcgcttggctcagggctctgggtgagtcagggccacagccgaggctggaagcgatgtctgcagcgtcccagtctagactttactcattgcctggggggcctatcccaggcacatcccaggcataagccctgggagcagggtgctaggtctcctcattgtgcctcatgaagaggccgtcagtctgtcttctagatcccttgagccgccaggcaaaaacttccccataggaacagaatagacccagaattgaggccagcagagggtctttcctcctagccgtgcctgctggaatccggcgagcaggccatcagctctttctgggcccctgtcttatgtctcccacatgagggtggccatcctgtcacttgctaactggggcttgcaagtgccccaaccccagggcaaagggactgggccttggtctcctcgcagttttcgggacaaccagctcagtgaccaggtggtgctgaacattgtggaggttctccctcacctaccacggctccggaagcttgagtaagtgatctttccactgcctctgcagcccagtccctctctatacctgattcaccccactcccttgcaaggcaaggaaggtctggggcccctggggtaggggattccactcctgacacctttgccacaatcttgcagcctgagcagcaacagcatctgcgtgtcaaccctactctgcttggcaagggtggcagtcacgtgtcctaccgtcaggatgcttcaggccaggtgagcagaaggaaagggatcttggccttatgggccttgagaaaagaggaggggaaagtgggatgggaaatggaggaggcccctcgtctgcaggataaatctgtgcataccctactgttttactcacagctttaccttcagaacctagctcaggcttggcacctggtacttggtatatattgaattaatggatggatgaaaagatggatgtatggatggatggctgaaaagatggatgggtggatgaaaagatggatggatgaatggatggctgaaaagatggatgggtggatgaaaagatggatggatggatggatggatggatggctgaaaagatggatgggtggatgaaaagatggatggatggatggatggatggatgaaaagatggatgggtggatgaaaagatggatggatggatggatggatggaaagattgatgggtggatgaaaagatgaatggatggatggatagatgaatggatggatggatagatggctagctgaaaagatggataggtgtgtgaaaagatggatggatggatggatggatggatggatggatggatggatggatggatgaaggaatgagtcaacaagtctacgaagcacaggcatagccaaaggaataattagctgtgtgttgccctccatggtgctgaaccaatatagccagttttgatcatggggtaggttaggtgtcatttttcttactcataaaaatttctattaaaaaaaattcagccgggctcagtggctcatgcctgtaattccaacactttggaaggccaaggcaagaggattacttgagctcaggagttcgagaccaacctgggcaacatagtctctacaaaaaatgaacaaaattaatggggcatggtggtgcatgcctgtggttccagctatttgggaggctgaggtgggaagattgcttgagccgtggaggttgaggctgcagtgaggtgtgaacacaccactgcactccagcctgagtagcagagtgagatctccatctcaaatttaaaaagaaaggaaaaaaaaaaactcacaacattcttaatttttattatatttcttgtgaaaattgtttttctgactttttaaaacactcttgcaggattcatcaagcaaagacataatcagtatttcacatgcctgatttaaaacacttttgctagttccgttatgtttccctgtcaattgcaaaatcagctttatctggatgtttgaacatttggggcagaaaagggtgtgcctgtggtgggtgatgtgctggtttccagtctctgggtttcatggcttggtatctgatcctgcagggaggcggacctcatcttccttctttccccgcccacagagacaactgcagagctacaaaggtaagaagccaagaggcggtgggcctggggccatccttagaagcaacttgggctcaggcagttgaggggaaaggtgaccaagagactaggaagagctggggtatgggaattcttcctgctactgctgcactgaggaatgaattactgcttaggttggcaaaggattttaacttcctctagcgtgtccagaccacatctggtccctgtggaaggaagcatccccagaagactcagaggaaggcaaacccttggggagaacataaagatactgttagactggcattactagatggtgaaaactctggaaaagcccttacaactgaaaaaagacagggagggcaattatggtacctacatcttagggttgttctgagaattaaatgagttactacacttaaggagtttagagcactgttggcatgcagtgggcagtcaaatgctggctattccagctgtgcatggattccagcttggccagtcttggatgggctgagaaaagggagctgcttttccctaaaagaccatcccaactgtgctctaccacactttgctctcctggctaagactcagagacagatgtatgtatgcccctgagcaatctctttcccttctctggatctcgattccttgcttgtataatgacctggtagtgtaggaccaatgttgctgggtgcggtggctcatgcctgtaatcctagcactttggaacgccaagcacgagaatctcttgattccaggtgttcaagaccagcctgggcaacatagcaagaccccatctctaaaaaaaaaaggcaggcgtggtggtgcacacctgtagtcccagctactcaagatgctgacgttgggaggatcgcttgagcctgggagcttgagccatgatcacaccactgtactccagcctgggtgacagagagggactctgtctcaaaaaatgacccactaggaccagtgtcactttcttttccctctaactgcttaaagctgtgatgctcagtaggatagccactagccccatatggctatttcaatttaaataaattaaaattttaatgctatttcaatttaaataaattaaaattttaatgctattttaatttaaataaattaaaattaagtaaaatgaaattttcagttcattagtcacattagctatatttcaactgctcagtggccataggtggctagtggctcccatagcaagtggtacagatgccaggacatttccatcattgcagaaagttctattaaacaggctggcatggtggctcatgtctgtaaccccagcactttgagaggctgagggggcaggatcgcttgaagctaggagttcaagaccagcctgggcaacaaagtgagacccccatctctacaaaaaaaaaaaaaaaatagctgggcatggtgattcactcctatagtaccagttactcaggaagccaaggtgggaggatcacttgagcccaggagtttgaggctgcagtgaactgggatagagccactgcactccagcttggggactgagtgggaccctgtctctaaaaaaaaaaaaatggttagcaccaatccaaaaagtctgtgaaacctggctcatgatgtcctagcttccctgcatcccctaacgctccctcagcccagtgggagagagtctgtggtttaccatagcctggactcactgcatacagctcatgctcctcgccttctgaaccacagacagcacatccacaaatggagaccatcacatcatcgacaatagcagcttctgtttactaaccttcgattttacacctatgctgggtacttggacatacattgtctcattcaatccttcaggtacctatgtgctagatgttgtcatccgttttagaaaagagaaaagggagccgactgcagtgatttgcccaaggccacatggctatacatggcagagccaaaatttgaataaaggttccatttgacctcaaacctgttgcccctcctgctctgctgaatcacatcttgagcatctgcaagcagtctcctttgttaccgactcactttgggttgtgcttcagggtcttcagcctctagaagccaaggaaagaggcttgatccaccaggccctagatgcctgagcccaggccaatgcttgatttgttcttgccagagctccagacctgcaggaaagtgacggccagaggaaaggggctcagagcagaagcttgacgctcaggtaccttggagggatctattgccttaggagagggatatgatatgggggaaagtccgaggcaagggagagcaggggcagggaggataaagggaaaagcagatgagggacagggaaaggattagccgggtgtggtgcccatcctggatagcccatcctggcttgaataaggagcatctgtcataataacaatagctgcaacttaatggaaccggctatctatatgccgggcattgcactagatgttttacatccattacctcactgtaattcctttagaatctctgtgaagtacacattattattcccctttgagggaggaggaaactgagtctcagacaggttaagtcccttgctcaagatcacccagctactaagaggtgtggctaggattagacccaggtctgtgggccccctgactcccccagcattggaagctggaggggccatggagtaggggctgtttgccctgagcccttctgtcccccactcctacccaaggctgcagaagtgtcagctccaggtccacgatgcggaggccctcatagccctgctccaggaaggccctcacctggaggaagtggagtgagtatcacgggaagccctggcgtaggagccaggaaaggaggttggagagggtgggcagggcctcgcctttgggtgggtggtgtgggggaggggcatgctgcctcatgaagaatttgggggaatcagatcattgtaacagctgctactattcagcacttgtcccgggtcaggtgctgtgctagggactgtacatgcctcctcgcattcactcctcacatctctgtgatgtaagcactgttactgtcctcattttatagaggaggaagttaagctgcagaaagataaacttgctcaaggccacacaggtaggaagagtctaggctagggttcaagcccagacagtctggctcgcagcctcatcctcataaccactgctacctctcttgctgagatctgccaagtagaaaccccaccacacctgggtctgccttccaaaccacagtccctcagggctccccccacccccttcatccttctcccagagtagagtgggataaccttctcttttcgggatggagaaattcccatggcgtccagcccctggctgaagccaataagagtagtgcttggggatggacggaggctctgtcacgaccctaggaggggcgcccctccaggaaacctccaagtgaacatgaaggcagatgatggaacgccaggatgtgttctgggtcgagtggccccacctcagggtaagacggataggggtgagggttgtcgtggtgatcacctcttgatcctggacctcgtcccattgggagaaccaggacagaattagaaggtggttttttaacaagctcacacacttctacctgcctcaccagcactgagcatgcccctccccgagtgccatcacctgcagaagcagccccatcacccgcctggttacgcagccacctcctagcccccttgcccttctcccacatttagtccctccagatggacctactggtagcgctcaaaactatcctcttttcctccacctttctagtccaacccaccctcatctcttacctggatgaccccctcgccttgccttccttgctggcttccctgctttcaccctggccacttccacctggcagagagtagatcacttttcactgatgcctgcccccttcactccttcccactgctcaggataaaacccacattctaaactcccaggtggtccagaaccctgcccccagcctcctaaaccccatctgaccccatccttccactcaatctccaatccagacacactggctctctttcaggtcctcatatgtgttatgccacagggcctttgaatgtactgcttctaccaccaggaacacccttcctccatctctcccccaaccttttacctactgaactcccagttatttcagcaagtagcttaagcaacaaataagccatccccgactcccagactaggtcagatgcccccataatcatgaagtttatcacaaaaagcaattatgtaacttgcagcataaaggaagagttgagggtggggccttgaaggcaggctgcctgggttcaaatccaggttctccctcgagcaagtgccttaactttactctgcacttaaccactctgcacttgagtttactcatcagtaaggtgaggataattacagtgcccacgtcatcggcactatgaggatgaaataggccaatagtcatagaagaacctaggatgttgccaggcatgtggtatggagtctgtcgatttcagttattatcaaggttcattcctgagagtgacactttgactaaagttagcaaaggaggagtaagtgatggggattgagggaggactccagccccacaatacagtgcattgggccccccgtctcagcctctcagggaaccagctggaagatgaaggctgtcggctgatggcagaggctgcatcccagctgcacatcgccaggaagctggagtgagttgtccaccccaccgctgggtaccagggaaggccctgtagagccccaggaggtccccgtgttcgtaatcagcagtaagggtgctgatccactgccacccctgcttcctcccaactccagcaaagtcaagatggtttgaccatgccttgccttcacctccggcatgagccactgtcttagtccaatcatctagcacccttacatgtgtaaaatgcgttcattatacatcagtggcttgcattccaattcatctttgtagctgccctggagcacggtggggtggggtgttgcactggggaggtgtcagggtgggtgggatgttgcactgtggaggtgtcatgctggggtgctagggtagggagtggtgtgttcctgtggggatacactgttggggtgaggggtggtgagatggaaaggtaggctattaggctgctgggtgtgctgtggtgttgcatggggtgagggtgatgtttgggtgggggtgtcttgggggtcttaggatcaagtgtgggtcgggtttggggagtgttgagattgggtagcagtggtttggggcctcagctttggatttcaatcttcgctctgtcacttagtagcattgtgaacctgggaaagtaattgaatgtctctgggcctcggtttcccctctgtaaaatgggatcacatgaaaccatatatgtacaaagccttttgtacagagtctggtatagtcagggctcagaaaatggtggttattttacagatgagaaaactgggggtcagagaggtgaaaacactgagttcttgctgtcaagctggacaactttattttccaaatgggatgggggtgtcatgcattttttggcttactcacacgcaccagaatcctttgagatcccctggcaagggacctaggacatccaggagtgacagccagcaagctgctgagccacagggaggggctagagctggctggggctgggtacctcagccacatgccaacggctgccttctcctgctctccacagcctcagtaacaacgggctttctgtggccggggtgcattgtgtgctgagggccgtgagtgcgtgctggaccctggcagagctgcacatcaggtgggagctccctcagaccacggtacccatccccccccccatcatgctctctctgaagcccttggaattccttctgggcccaggccttgggacgggcagaagatgctgctgctgtcccacccagaccccgttacagccggcacccctcttcctagctgctgtggatataggctgctcatggtttatacctctggagaactacccttggctgataagaaccagagacgcctggcagggtacaacccccactttcccctaacctagagtggccaatgacagaggcagagggcacaactctccagcccaaactctccagtgggacaaagctccctgggagactaggccaaggacttgctccgtttggcttccctcagtcccttactgtttctcctgagagcagaccgtcagttcatgatgtgcgcaactgacaagtgacatgcgaccccctaccccactcacagacccaggctctgccactagggaacccaatcctatttctgtaagtctcgccgttgagtatggggaggtgaggacagatgatgattaatgtcaactcagttcccactcggaggaaagcctcattctcaacccagtagggtggtccctgctttaaacacccctcaagggaggagagggaaaccgattcacccaaaaggtagattaggggaccttggttcactgtatatgatgattcaataaagggtccctagtgcattccaagcgatgccctgttcacttccaggaacttatactaaataaattatcacgattgtgcaaacacatttagctgtagggatgttcacctcagtattggttataataggaaaaaaaaagaaaatagctggaatgtttaaccgagggatattagttagactaagttacttccagagagaactcagtggaaccatagaaaaaaaaatgataatataggtgcagtttcaatatggaggggtgacggggagttattaagtaaacataaagaaatttctttagagacaggatcttgctctgttaccaaggctggagtacagtgacacaatcacagctcactgtaacctccaaatcctgggctcagcaatccatctctcttagtctcccaaagtgctgggattacagtcatgagtcactatgcctggcaattttttttatttttagtagagagagggtcttgctatattgaccaggctgttctcaaactcccgagctcatgtgatcctcctgccctggcctcccaaagagcaaggattataggtatgaaccactgcaccaggccaaacataaaaattttaactcattatcttaaaagattataaaagattataataaagcttttcaagatatgcaatggcagaaagaatggtataatctgggccaggtgctgtggctcatgctgtaaacccagcactttgggaggctgaggcagggggatcacctgaggtcaggagttcaagaccagcctggccaataggatgaaaccccgtctctactaaaaatacaaaaactagctgggcatggtggcgtgcacctgtaattccagctactcaggaggctgaggcaggagaatcgctggaacctgggaggcggaggttgcagtgagccgagatcatgccactgcactccagcctgggagacagagcaagactctgtctcaaattaaaaaaaaaaaaaaaaaaagagagagcatggtatatataatctgttcccatcaataatgatcaagtattaataattatttgtcatccctgcttctagcccttaaaaaactaatgtttaaaaagagaatctatagtttaatcccatgtttgtaaaacaaaaattattgcactagaaaatggaaggtttgaaggactcactccaaaggttaccaggggtaatccacacatactttgagcacagacagaacactgactagcagagagaggggtttcagtctggggctaaaagagagaacacagaatttgttttcttttaagacttgccaggaaatggggcttacttaggcaatagatacatttgtgaaatatctgtggtagaaagatttcagccctccaaaagctcagaggaagtcagaggggagtcagaggaagtggctgcagctggaggcagggggatggaacttgagaggtcctcccgggccaggggtaaaaagtgacaggccgggcacggtggctcacacctatcatcccagcactttgggaagcaaaggtgggaggatcacctgagcccagaagttcgagaccagagtagacaacatagactgtctctacatacttttttttttaattagctgggcctgatggcacaagcctgtaatcccagctactcaggaggctgaagtgggaggattgcttgagcccaggaggtggaggcttcagtgagccatgattgcaccactgcacaccagcttgggcaacagactgagaccttctctcaaaaagaaatagtaacagggagccaataacctctcgcttcctcacccctcttttgtcttcacagcctgcagcacaaaactgtgatcttcatgtttgcccaggagccagaggagcagaaggggccccaggagaggtagggcccgatttcaccccaactccatgctcagtcagggacattcccctctctaccctccacagctgggcagtgccagtcagtcaactgccagggtgacctggacaaattcacggaagagcgggaagtgagcaggcttggcaaaggatgcagccccaaagggggagggtccaaatccagaccacctccgcctctcatggtgcctgaaaggagccccagtgtgtaggatatagacagcaggccagggcaggagttgggtagccagagggggattccgggagactagagccctccagcttaaacccaggggattgcctggcctgtagctctggtcctggtcggaacttctgtatccctttcacacaaggacccattagggtcctggattgccccagcctagcgcatgggtagagactcagctctttgctcccggagcccacccacaatctcttctgtagagtctggactactgaaggctcgattccagctggggctgacatctctgaagcacagatgaggaggaggatgagattaatgataatagcagtcaaggtcaattgagtacttgccatgtatgcaccaagcaccaaactaaggcagttcacatacagtctcccattgagaggctgtgatttgtccagggtcacacaaccaggaagtggagaagccaaattggcaccaaggtctgattgactctaggtggaggatagggctcgatggtggaaggccaggctgaggatggattctggagatggcggacatggcctttgctcagcctggccttggtgatgtccctccagggctgcatttcttgacagcctcatgctccagatgccctctgagctgcctctgagctcccgaaggatgaggtacagtgatggcctccagccctgtgtgtgattccagccccctcccttcccctgctcagagcctgctcccaaacctgtgcccaggccccacatgctccctgaaggacacctgacctgctgtgtccaggggtcatggcctggcttccctacctcctacctcccctgcccagcccaccccagacagggctcacaaggcagccccgtcaaccaccttcccaagcccaggagaccccactccccttagctccctgacccccagcagctgaggggttgtggagactctgaaaagaggtgaaggggagcactgggctccttctgtcatgatcctggtgcctgggcctgggggctcccatcagcactcttccccccttctctcttggtctttgtctgtcctaatctccctctgtccctctgcctgtttctctcatttcttccctctctcatcgtgtatttctgttttatcagtttatttaactgttatttcagtcttatctgtcttcctctgatctgctctctctctctgaggtctctgtgccttggtttccttccatctgtgtctctgcccaccctctgcctatatgtgacatcctgtgggtgtcgtgtgtgttggtccctctttgtccgtctgtctaggtgccagatacatcccagtccctcctctcctgcaagcctcattctctgcctctgtgtctggggggtgggaaagcggctccttcccgcctctgttcagtggggcatgcagcactgtgtttttgtccctgggcaggctgacacattgtggcctccaagaaaagcacctagagcagctctgcaaggctctgggaggaagctgccacctcggtcacctccacctcgagtgagtggtttgtgtgttggaaggtgggtgggtggggccaattacagtgagttagtgttggtgtttgggtttggtttttaagatttagatcaactgttctttccctgctgaagtcagaaaccccttggagaatctggtgaaagttgtgactcttcctcccaagatacagatcccccatgtctgacacgctcggaggctcacccctggtccctcagaggtccacgaacctcagaataagaacctgggggagaccccagctgcccgtgccagatctgctgagatctggcctggcagcccagggctgtgtccagtttcaggaagttgagtaactggaatgcagggaccatgctgccagcaacccactccccacctgctaatgttctcccctcccttctccccacccccagcttctcaggcaatgctctgggggatgaaggtgcagcccggctggctcagctgctcccagggctgggagctctgcagtccttgaagtgagtagcccgctaggcagagcctctgaggctggggcagggggggagcattctctgtcccatccccctctttcctggggttattgtaaagattaaatcggaaaatgcatgaaaattgcccctaatacaatgtaagttctcggtgaaggctagctaatagatgattcttactcagagagtctgtgactcaataatcccacttctgattcaaggtttcacttctggaacctgtctccgcatctctgaacaggcttctgaggccaccctggggagggcaggtgtgggtgcgaagtatgactaacggctggcagttgttattctggccctggggtgccgggaggggctggggctgttagctggggtatggtcagggtagacagggagggtttgtaccagagaggacactcaagcagggtgcccagggctgccaaggatccctgagtacctggcagagagtgtgtaggaggaatccccaaagtttgcctgcaatggaccagagttcttgatccctaaatgcccttggtgcttttggctcacaaagcaccccctcctcccaggcacttctgggccaaagccagaggagcccaggggagaggtcacaggtcctatattccaggctgtctctgtgaacacgctttgctgtgtgattctgggcaagttacatcccctctccgagtccctggttcccagtcggtaaatacataaattgcaggcgtggcctctgttggtggctacgatctctgaaatgagtgctggggcctaaggaccccctgctcacaccctgtttttgtgcaatgctgggaaggaagggagttgccttggttcctgttcagggcctgcacctgggaaggaaggaaggtctaaccattgcaggcaaattacatgaagactggaggttttagtatgtcctcatgtgaccttcttattagtgtggactcgtgacctggtgctgtgagggtccacactcgccctaccagtgtccccgtgggaggggagtgtagcattaaatagtaaatagaaaacaataacaagttgacaggagaccctgaaagaaaggagacactttgttcctgctttctgcacaagagaccctgcattttcattttgtcctgggtaccacccctcccttatcaggtggagaaaaggaggcccagctccagccagaaagcactcctcagatccatcacagaccgagggacccactgggtgcccatctcagctctgtcaccaacatgtctcataaccttgggctagaccttgattctctctaggactctgtttccccatctccaccatgaggacttgcaaggggtgctctctgaccatcttgggttcagtgggttccgtcatctggaaccagggatccctcccccgccctgtgccctgaccacaaagaggatgtgtttgggtcctgagtgacctccattgtgccacccctgtgatctccagcctcagtgagaacggtttgtccctggatgccgtgttgggtttggttcggtgcttctccactctgcagtggctcttccgcttggacatcaggtgagcgtgcctctccgcccccagccctgcccctgtcccccatcccacaggtcatctgctcccacgtgggccccttgtccaccagtttcatgccaacctgtcatcctcagcaccttgggcagtaccagatctgcagagcatgtgatgggcgtccactgaatgaatgaatgatcaaatgaatgaataagtatggcctcacggatgctcaaatttctccaaattcaccattagagagttcattgactctgcctcactcgttctttggatagtccttagagatttttttttttaggattttttttttaattattatactttaagttctagggtacatgtgcacaacatacaggtttgttacatatgtatacatgtgccatgttggtatgctgcagagacttttaagaaaactgggggccaggcgcggtggctcacgcctgtaatcccagcattttgggaggccaaggtgggcggatcacgtgaggtcaggagtttgagaacagcctggccaacagggtgaaaccctgtctctgctaaaaataccaaaaaaaaaaaaaaaagtatctgggcgtggttgtgagcccttgtagtgccagccgctcaggagtcaggagaatcacttgaacccaggaggcgaaggttgcagtgagctgagatcgtgccactgcactccagcctgggcgacagagtgagactccatctcaaaaaaaaaaagaaaagaaaagaaaactgggagcttcctagttgccactggggactcagggacctgtcttaattgtgggagctgatgagaatataaaaggggaggcaccagccagccaagccaccccaggcactcagggcaccgcatccatgattttcaggggaggtctgcttccctttcccttccctaaggacccccaagaatgggaggtgccacagcagatggaccaggctcagttacttaactgctgcgagctcagagcaggtcccagagcctctccaggcctcagtttcctcatctgtaaaatggagataagaataattactggcctggcacagtggctcaagcctgtaatcccagcactttgggaggccaagacaggaggaggaggatcacctgagcctaggagtttgagaccagcctggacaacatggtgagacccccccatctctacagaaactttaaaaattagccaagcgtgatggcatgcacctacttgggaggctgaggtgggaggattgcttagactcaggagatcgaggctacagtgagttgtgatcacaccattgcactccagcctgggcaacagagcaagactctgtctcaaagaaaaaaaaatgtcaggcacaatggctcacatctgtaattccagcactttgggaggctaaggcaggaggatcgtttgagccatggagtttgagaccagcctgctcaacatggcaaaaccccatctctacaaaaaatacaaaaattagacagtcatggtggggcgttcctgtagtcccagctacttgggaggctgaggcagtaggatcagttgagcccggggaaggttgaggctgcagtgagccatgactgcaccactgcacaccagcctgggcgacagagcaagaccctttcttcgaaacaacaacaaagaagaatttcttacctcattgtttattgtgagaatcaaatgagaaatgtcgatggtgtgctttgcatgtgacttgatacatgtaattgttgcttaatctattccttgtttgctaagaaagcaggccaccccaggccctccttgccctgaccagtctgggttcttgccactgccagggaagttggtctttgaccattttcaaactgctgcttcctctctgcttccagctttgaaagccaacacatcctcctgagaggggacaagacaagcaggtgaggagggaacgctcggggtgggggagtcccctcccgctctggtccccgtctgttggaggtccccccacccccagacccatgctgaccactcagctctcagttaaaccacccaagtccggcacactaggtttaatcaccacttcagtaaccaccgccccccccataaattgtcagtaatcaactgccctgttttccccttggaaggaggcaatgcagatgggaggaagggagggatatggttgggagaggtcccagagcagggcaggtgcccgcagattgctgctgtgtgggaggagacaggagaacatttgtgcttctgcgtttcggggaattttgtagacccaccgctccatacatgtcactgccctttcacgctctgaaggcaggggccgtgggtgctctgaaaaaacattttccccgtcttcgcagtaaacaaccaatactagtttagctcttcatgatgttcccggctgccctctagtgggaccaggcctcttggcctcacttgggagcagtggcagcggacagggtgggcccatgtgcagctggctgggtggagagagtcacagctagtgtgtcaagaaaaggcactgccgtacagatgggctgtcaggagtcaggggtggctcaagcctgggtggtcttgcttcccaggataggatctctgtttctggggaacccccgggttcttgaggcccaaagaactgacgtacagggaggcagaagtcatgtgatgccaagcagtggtcagagaggctctgtcttgggtcctcctgcctgctcacctggacaggaacaagctgctggcttttctaactcaggcttcccttccctgagcctcagtttccccatctgaacaatgagggactgagctaggatctagtgactgcattgtctctgagatgccttccagccctgactttccaagtctgggagtccaatgtgggtgatctgaactttcctttctaaacgatccccctcctaggggtatatgggctgggctgggagtccgagggggtgatctgaactttcctttctaaatgatccccctcctagggatatgtgggccactggatctttgccagacttcccagctgcagccaagttcttagggttccgtcagcgctgcatccccaggagcctctggtactgtcccagcccttcttgtttgggggtaaccataatagggatgaggcgtcagagggggcagagctggcagggggctagggctggggattgggatagagggaagagagggagtttaagagaaaaggaaaagaaagaggcgtgggtgtgaggggtgctgggagttggggagctctggcccctgacgggcagctcagctggcccatgccccgcattctccttggagagaagattccacatttctgtgaagcaaacagagcagctcagccactccctgcctggggtctccatctgctctgggggacacccactttccagaaagaaaggggttggcctgtctccccactaatacactccccatctgcaagctctgccatgagaggctgtgagaccctgacttggccccacctctctctaggcctccagggaagtggaggcaagtgaggccctgggaaggacatttcaatttcactgttagccccagggcaatggggagccacgggggtaacagggagaggcctggtcagatgtgcagtgttaaaatgtgagacacttgtggggcagagagggattaaagggaggcaagagtggaagcccagagggtgttaaatggtcaaggtgagtgaggatggtggcctgggctctggagggggcggtggggaggacttggagagtcactgacaagggcagctgggaactcagggtcctgcactgtcactgtcagggcaggaggattgggggctgcaggggagactcgagagggaagcgagtgccccacaggggaaggggcctgtggcctcccacttagagtgagggatgctgggagaaggatagagcccctggggctagccagggaccctgggctttctctgattccctgccctgcccattgcccctttgcagcctcagtgagtgtcctctggagcccccaagcctcacccgcctctgtgccactctgaaggactgcccgggacccctggaactgcagtaagtaacgaggacacagccccagagggcaccatgtggggatctgcccagtgacctgggagggggcttcttggttagaagacaggtgagtctttctcgatttcttcccaccagccctgccccatgagagtcccctggcctttggtagaaacttggctgtctctcggcagcccccagccttaggcagcgcatgtctcccactgggagatgctgtgctggactggggaagccttcacctgcaccatccactcaactcagggcacctgggagccctgtccacctccaaccccacccctggagcctcaccagggcacccacttgaacctgcctgcatggctggagcgtagcacttctgaaagcccttcctcaaggcacccccactctccttggggttaccacctcactcgccccagaacatctgggtctgtaaccagagactggacctggaatcaggactcttggctcaaaagggatttaactccccgggcctcagcttcttcatctgcacagtggatggtcagcctttccttttattgtcattgtggtgattctattatagtaattaccttaaaataaagaaatccaagacaaaacctgcctcacctaaacaacctcttctctcatcaaatccatgttgtcatgtgtccacaggactgtctactccttgcctatttgcatattcagtttctacctgtttgcagtcataaactagtttcatgcactgtgttttcatagcatctgtgttttccattttgcttcagtcttttttcttgctttctagcccccatctcaaatgcccttccagcccttccaaccagataatccggtttgaccccctggagtgtggccttcccatgtccttctccaggttcaaacatataaccacaaaaccattatcagacctacactattttttttttctgagacagagttttgctcttgttgcccaggctggagtgcaatggcgtgatctcggcttgctgccacctctgcctcctgggttcaagcaattctcctgcctcagcctcctgagtagctgggattacaggcgcccgccatcatgcctggctaatttttgtatttttagtagaggcagggtttcaccatgttggccaggctggtctcgaactcctgacctcaagtgatccaccttcctcagcctcccaaagtgttgggattacaggcttgagccactgcacctggcccagacctaccctattaatggcaattccttaaagtcaaccaatggtcagtggtccctgattgtctcttacctgttttcacagagtatatactgatgccttttaatactaaattgccacagtacgggacgagctgcaagttactccaccacacccttctagagtctagatcaagggtgtccaatcttttggcttccctgggccacattggaagaagaaaaagaattgtcttgggccacacataaaatacactaacactagcgatagctgatgtgctaaaaaaaaaaaacaaaactccaaagaaaaatctcatagtgttttaagaaagtttacgaatttttgttaggccgtattcaaagccatcctaggctgcatgcagcaggccatgtggcttggacaacttggtctagattgaaatccaaactgcttctaggtgttgtgttttgttttgtgtagcactgcagtcagtgctacaaaaagcactcttacgtgatttgactgttaagtacctattgtataccatgcactgggccagatcctgggaacacaaggagactgggatgcgggctctgctggccaaggcaaatcatctgcagaggaagcttaatataaaaagcccactggcggcccggcacggtgactcacgcctataatcccagcactttgggaggccgaggtggctggatcatgaggtcaggagttcgagactagcctggccaacatagtgaaaccccatctctactaaaaatacaaaaattagccaggcatggtggtgcacccctgtaatcccagctactctggaggcaggcaggagacttgcttgaacccgggaggcagagattgtggtgagccaagactgcgccactgtcctccagcctgggcaacagagcaagactctgtctcaaataaataaataaataaataaataaataaataaataaagcccactggcagcactgggcggtctgagcacaggtgggagtttcaggtccccctccattacctgtggttggggaaagtgcaatagtgaatatgaaagcactttgtcaactgtagagtactgtgatcacttgcaggattattgctataaatagtcatcaaggtactcaatgctgaagtccagtgattccccggggttccaccggggaagccagggaagatagattgtggggctccatcccccctccctgaattcaagcactgcaggtctactttgcctgtgtacacatgggcataccatgtgggatgtggtaaagagtaaagattccattgctttaaaaaaaaaaaaaaggagggtgtaatcacctcctttgccaaccagagcccatggtgtatttgggggtctggtgggacaccatacgggatgtgtttctggaaagaccaccctcaataaaggccccagtcctgactgtgcctcaggggcccatgcccagtccctggggcagaaagggtagagttgggcctccagcctgggccctggcagaggctccaacatgaggctgctcctcccgccctaccctgccccccagctcactgagccagttgatgtagggcccctgtactccatgcctcccctccaaacagccagaggagaaagcagcagagatgggccaggcccttggaggccccggagaggggagagggcagcctgcagaggatgaaggaacagaaagagaggaagggggaggtggagaaggcagaaggagaacatagtagaggtctgcgggggttgggaagtggctccaggccccccaggaaggggctgtaggtaaaccccagggaactcagtgtcttgagttgtcctggtcctccatctagagcagagacagcaaggcaggtatctggagtttctcctaaatgcactgggttctgacgaattatctgaacaatgatgagctggttggtctggtgttaatgggcaactagagacccaagccagtccctgtctccttcgctgacctgttgtatgctgaatttccactgtcatatccactcctctgggttaaggcagcattgttttcttttcttttttatttttttgagatagagactcgctctgtcacccaggctggagtgcagtggtacgatcttggctcactgcaacctctgcctcccaggttcaagtgattcccatgcctcagcctcctgagtagctattactacaggtgtgcaccaccacgcctggctaatttttttttcgttttttgtagtagaggtggaatttcaccatgttgcccaggctggtcccagactcctgacctcagatgatccacccacctcagcctcccaaagtgctgcgattacaggcatgagccaccatgcccagctgcattcttttcttaacaaacatgttttgcggaacactaaccttcatggcccttaaaaattaattctgctagtccatttagtttggggaaaagtctgctgtagctccttggaaattcataatgcacagcagcctatcgcagcctcagagaagccctgcagcaaacaaaaccatttaatttggcttaaccccgtatttcccaaacttaaaagaccttcctcttcttccagcctcacggataacccatggacccagtgctgggagggaatgtttcaggtgaccctggttaggtcccatctccagaaggctctggctatgaggccgtgctccctgctttcctggaaggtttcccccacctcatccacctgctttgtttcacagattgtcctgtgagttcctgagtgaccagagcctggagactctactggactgcttacctcaactccctcagctgagcctgctgcagtaagacgagagtttttcctatttcccggttccttgtgctcgtgtttctaaggctcctccatggcaaagctgtacctgccctctaacccctcaaccccccgcctttaccccctccaaccccctctacccgctccattctttccttaggttgttttatcattttacctggcacaactggggactccaatctgcttccagctccaccctaatactttgtcaacctcagggggcgtcgtttgcctcctctgcgtctcagtttcctcatctgacaaatgggattaatattccccgcccattcccccagagttgggactcaaataagttattctaaaatcaccttaagaaatggaagatctgtgacaaatgagctgtccaacttctccccacccacggagggtcacccactcgtagaaaggggctgtacagatgtaggtcctgtacttatcacatgctgctttttaaaggtcaccgtcaaactcgcaaaaagggaatttaagcagaattcccccaaagtattaaaactattttctaatttcagctcagactggttagaattttaaaagtatttaggccatgtgtggtggctcatgcctgtaatcccggcactttgggaggccgaggcgggcagatcacctgaggtcaggagtttgagaccagcctggccaatgtggtgaaaccccgtctctactaaaaatacaaaaattagcccggtgtggtggtgggtgcctgtaattccagctacttgggaggctgaggcaggagaattgcttgaacttgggaggcggaggttgcagtgagccgagatcgcgccattgcactccagcttgggcgacaagagtgaaactccatctcagaaaaaaaaaaagaaaaaaagaaaaagaaagaattttagaaggatttactttaaacagtcttctagtggtgggaggcggggtgggaagcagctgcagctaagatgaaaaaatacagcaggaaagtaaatcataatgttaataacatcggtgcaaaggctggggctctctgggatgtctaagatggctcgcatcacctccaggatctcgcttatgcttgggttttatctgggagggagggaggagacgtgacaacattccaggggcaagtacagcccagctcacagcaccccatggcaccctgtaatagtcccaccctgcccggagataatgagtcagaaaggactcctttggacataaaaggtggcaggttaaaattgaacaggttggaaacctcagaccggagaggaacttctctttgcctaaatcacacagcttcacccctgactcctcgtccgcctttggagtggcgtggccagcctgaccccttgccagggtttaaactttgtagtactcaacgtgtagtgcttgtggccctactgtgggccaggcattgtgtgacgacacagcagaaaaagttgaccatgtccttatcttcttggagctcctcttacaatagtgggagctgaaaaataagtaaagtaaaatcaaataagatgaacttagccagtgataagagaattttctcgggatgtggtgaagagtggctggagaggtgatttagatgtggcagaagccatcagggaacatctctgaggagggatgctgagctgggacctaaaggaagagagagagctcgccttgtgaagagcagggaactgcattccaggcagagggaacggcatgtgtgaggccctgaggcatgattaagcttggtgggctccaggaacagcgcggaaccgagacagccagagcacagtgactggcagggacagtcctaggagaggaggaagagagagatgggctcgggttgggttgcatggggcctggcacccatggggagagtttagacttttgttcctgggaacatgaaagggagaggaataatttgggttttctttctttcttttttgtgggggagggtctcgctctgtcacacaggctggagtgcaatggcgcaatctcggctcactgcaacctccgcctcccaggttcaggcaattcttgtgcctcagcctcccaagtagctgggattacaggcgtgcaccatcatgcccagctaatttttgtatttttagtagagacagagtttaaccatgttgaccatgctggtctcaaactcccgacctcaagtgatccgcccgcctcggcttcccaaagtactgagattacaggcaggagccactgcacccgttcctcatttgggttttcaaaagttcagactgagtgctgggtagagaatggattgggagatacgagtggaaatgagagtgggaagagatgtgtgcagcagggtgaagggtgctgggggctgatcactgctggggtgggatagaagttggtagactcagggtggatcttgagagtggaatttacagacaagctgatagggggattactggatgaggcaaatggaggtgctgaggctgcctctgagggcagagtggacccatctcactttctctaaggcagtggtttccaactgggggtgattttcacccttgggagtcatttggaaatatctggagatatttttggtggtcatgactgcgggtgaggggtgctgctactggcatcgaatgaatagagatctgggatgctgctgaacatcctatagggcacaggagagcccacaacaaagaattattggacctcacatctcaatagtgctaaggtttaaaaactgtgtctgaagggcctgaagcttcccactctctgtgagcaaggactcgcctgtgaaatctgtgcttgcaggtaaaaacaatagtaataataacagcaagcacaggtcccatgcccggcagtgcacctgcatgatgtaattaaatcctcatatacctcgagagtcatacatgacgagtcttgatttccagataaggaaactgaagctcagagaggtgaagtcacttctccaaggtcacacagccaataagcagaactgggactcaaatccaaatctgcctgtccctcagccctatttgtgcctcttgatcccctgcctgcttccctattgccttgctgagctgctagccctccccaccctccctttccttaccctccaggctagccaggttccttgtccactcatcttgccggatctaccccctttccttttcaggctgagccagacgggactgtccccgaaaagccccttcctgctggccaacaccttaagcctgtgtccacgggttaaaaaggtggatctcaggtgggcattcccctgggacagccaggactcgtcctgaagggttgtgcctggagtctggtgggtatgagggggtaggatgaagacagtaggacccaactagaggctgggcttccggaggaggggtgctggccccgtgggggcatcctgaggctgtggccacagctgtctgacccaggtcctgtctgatccaggtccctgcaccatgcaactttgcacttcagatccaacgaggaggaggaaggcgtgtgctgtgggtaagcccccttgaaccatgcctaggcagctagttgatgttggggaccagtagatctgcctcctgggtggccagagcagtatgcagactgcctaccacaaaacattcccctggaacaaccctgcagagggacttgtttcacccagcatgaagaaacacaggtccgggtgggatctactgtgggggtgggagcagtggattctggacacttccagagggtccaagcttgagtggagacccacctggagcccagaggctgtgccctgggctagccaggccggagggggtctcagtggccaaacgccccatcccctgcttgtcccctttacctccgtccagcaggttcacaggctgcagcctcagccaggagcacgtagagtcactctgctggttgctgagcaagtgtaaagacctcagccaggtggagtaagttgagggaggaggaggaaggagaggagcatggacgcatgcctgaggggcactgaagggggtatgagggtccgtgtgtgcacatacactcatgtgtgcctgcctacacctctcaggaccagctgtcagggatgcctgggtcacatacccaaagcttccctgaatcaattttctctctcccgcccccactctcgccatggtggagctagttccatggtgtgccctctgacttgggcagccctcagcctcaagtatgtgcaagctctgctggcagatgggggctaaaacgcaggattcattgttggcccagcaggtggttaaaagtaccggatgactctgcctgaggagggacgcagagccagccagggtggggtcttgcagtctcttgtattgttgagatgtggtatctgcgtggcctgtcttggatattcaaatagtcagcccctgcatgggtggaataataatagctaacagctactgagcactttctccactgttctaagtgcttgacatgttctttttatgtttcccatatccctggatactagtattgttctcattttacagatgagggaactgagacacagagggtgtaagaacttgcccaaggtcacacagctagtaaaatgcagagtccctgctcagacgcattgggaatccagcctaggaccagtgggaaatagagagagcagtccgccaaaaatgccacacaattttcatttctgttgtgatgtggcagagaagaaaaatgtgactgataaaatcatggatttcttttttttttaagacctggggtctcactctgttgcccaggctggagtgcagtggtgcaatgataggtcactgcagcctccaactcctgggctcaagcgatcctcccacctcagcctctggagtagctgggactacaggcacacaccaacatgcctggctaatagtttagttttgtaagagatgaagtctcaccatgttccccaggttggtctcaaacttctgagctcaggtgatcctcagcctcccaggttgctgagattacaggcatgagccgctgtgcttggaatgtattttaaacagatatgaataagaaatatgtctttgagttttttgtttttcattatagagggaaatttttcttttctttctttctttttttttagatggagtctttctctgctgcccaggctggaatgcagtggcgcaatttcggctcactgcaacttccgcctcccaggttcaagcaattctcctgcctcagcctcccaaggagctgagattacaggcatgagccaccatgcctggctaattttggtatttttagtagagacggggtttcaccatgttggccaggctggtcttgaactcctgacctcaggcgatccgcctgcctcgccctcccaaagtgctgggattacagccttgagccaccgcacccagccaatttttcttattttaaagactattttattaagtggcttcataagacagaccaatttttaaatgacgtttctcaggaaaagatgaaattaacaaacatcaaaaatgtcacagacctaggaggaaaatcagatgttccgggacacactggttatattatttctgaaactgtagttaaaactagctgggcgtggtggctcacgcctgtaatcccagcactttgggaggccaaagcgggtggatcacctgaggtcaggagtttgagaccagcctgatcaacatggtgaaaacccgtctctactaaaaatacaaaaataattagccaggcatagtggcacatgcctgtaatcccagctacttgggaggctgaggcaggagaatctcttgaacctgggagacagaggtcgcagtgagccaagatcgtgccattgcactccagcctgggcaacagagcaagactccatctcaaaataaataaataaataaaaccacagaatgctgcaatgaagggaagtaagaaacttcaggtgaggtttccaatattgatattgcattcccagattaaaagaagaaatctatgggtttaatgcatcctgcaaacatttttttttcctgaatttcctctcattcaaaaactgtggatcccaaatgatgccggccaagggcgtggtgaaggcaaattggtttttctttaacccttgaaagcctgctggaggcacctgagctatgagtggtcacccgatatggaagaggaccaagaggatgggtttactgtggtgctggggaggggatagtagcagagaacgtaggagttgctggtcattctagtggtgatggaagggatggtgatggtggtactgggcttggtggtgtagaattgtggtgataatgaaagtggtggtggtgatggtggtaatactggtggtggtgacattggtggtggtggtgatggtggtgatactggtgatggtggtgatggtggtggcgctggtgaccctgacatggggtccagtagcagtgacagtggatgcaggctcctggtgactgaggagcatctcaggctgaggaggcacctctgatccccgccactgctccttaccccctacagtctctcagcaaacctgctgggcgacagcggactcagatgccttctggaatgtctgccgcaggtgcccatctccggtttgcttgagtaagtggaaagcagcataaaggacagatagcaaggaggaaggctcccctaggccaaaagcatgatgggggctccttctgagggcatcccccagagcaccagaggacaaggactgtggagggcaaggggcaattcttcccttgccttcactcccctggccttgggtcctttcctctgtccctcacacccaccatgggcagatcctccaccaaacacccaagagaggctgtgattcgtggcagggtgacacacccctacagccaaactgacctggggacagggaagcaacattccatccccaaccagctgatgcgggattgcagctgcctggctcctggtccatcccgtccctgaaattcttctgacccaatctgtggaacataaatgtggagatgtccctgtggcaggcaaggggccttaggaagtcatccacatggttgccccatctctcccgtgacctgctggagtgacagccagctccaggacaccacttgttgctaggcaactgagcttcgtgctcgggagtccttgacccatgcggggctagagctgccagcctggccttgccagtgcccagaccccagaccacaggggcagcgggcagggtgagtgcagcgctcaaggactcagggtctggtgccagttctgcctgtgtggggatggtatccttctgggcctcagtgtgtccatctggagaatagatgcttagacatggaggcttctcttcttggaaatgacagctggaagggagatggagggggctgggcagggctccaaggaggtcctgccctcactcccattctcatctccatttcccttctagtctgagtcacaacagcatttctcaggaaagtgccctgtacctgctggagacactgccctcctgcccacgtgtccgggaggcctcagtgaagtaaggggatgttggtccccgaaaagcccctttctgctggccaacaggtgcccctggctgatgatgggagaagcaaggcacccacactttgtggccttccatctgggtggcttggagcaacctctgcctttctctgaatctcagggtttcctgggcatgggatcataatttctatcccctgatgcccgggtgccatggggaccatggaggccatggggtgggaaggccaggtattgccatgctcacagaatgagtttgggggtctcctctggttctgaggcctccatcctcccttgtccttgtgggtgcagccccgcttccctctctgtgccctgtgggtgccctaggtgcctaggaagctggcatgtctgggcaccgtgcttccccaggcccttctctctgcagcctgggctctgagcagagcttccggattcacttctccagagaggaccaggctgggaagacactcaggtaatccctgcagggtgatgggacaggggacagagaggggagaggaggctgaccctatggcggcctccatggccccctcttccctgggccctctcctcctttagagagcagcttcaagctcactgcctgggtctgttcctccagatctgcccccgatgccctggtaactccagtctcagccagggccttggcattgaacttgtgcctcttagcccaccatcctaagcccaactcagcccaacattctcttccttgccatgtcctgactacaggccttgaggcttctgagtgtcacggttaaagattttgaagccaactgaaaataaatccctgatctgccacttaccagctatgtggccctggacaagtaaaatggggataataacacaacctaccccttagggttattgtgaggattaaatgagttaataagtataaagtgccaggaaaaggtctggctcatgggagtgctgtcagcagttattgtaactgttattattattattattattattattattattatcattatcattacccctggtagccctgactcactgccacggccagttcctttacatgtcttacttcagctgtgaacagggcctccaaactgatccctgcatcttatcaggcctcctcccctccattcactccacagcccccagagggatcttcacaacacacatctgacagtgcccctctgctactctgtgcccctcagtggctccccattaaccccagggtgaagttcaaagtccctagcatcttctccctcacagtctgatccaactgtcaccttccaccatgttccttcccacctcccccacaccacacacacgccctacacaccaacccatataccacagatacaccaagcacacccaaacacaccacacagcacgcagcacacacaacacacgcacaccacacagcacacacaacacacaaacgcaccacataccatacacataccacatacacacacatacaccacacacaccacacaatacacacaccccacaaaaacaaaccccccacatacatacctggcacattacaaatacagcacacacaccacataatacctacaaataccacatacacaacacacacacacacacacagttcagccataaccttcactatttgctcctagatcaagccctgcctgaagattctctgcctctgctcacaccgcactcagctcaacattctcttccttgccttttctgagataaaattctcccaatcctttaacacccagctcaaacatcagcccctcctggaagtatcccagcagccctgcctcatcagagtgaactgccccgaggttcactgggccctttcacttggctgggcccgtctgctggccacccagggctgagatgcctggacagcagagccccacggagaatcccaggcacacctccctccccagggagctcagccagtgctggtccgggagagtaaggcagtggttaagagcttggggtctgcagtcagactgacctggatggaaaccagattctgcccttctttcttatctgctgtgtgtccttgggttagtcagtttccccacctctaattggtgctatgagaattaaaggagaccctgcgggtaaggcaggaagtcccatgcacccagaggctggcacagtgcctgacctagagtcagcctccctaaataacttactcctaatactttcttacagggggtgtgggaggttcctccccaaagagacaggaagctcccagagcaggagctgcatatttggcctctcaggccctgctccaggcctttgccctcagaggtgggatgctcccccaataggccctcagggaggctgagatgaagctgagcagcagtgcccacaggcctcacccaggctctgccctggctttctgccctcaggctaagtgagtgcagcttccggccagagcacgtgtccaggctggccaccggcttgagcaagtccctgcagctgacggagctcacgtgagtgacccacccagcccgtgaggacagcagaggggtgggggcaccctgccagagccacctcagtgactgacctctgtctccaggctgacccagtgctgcctgggccagaagcagctggccatcctcctgagcttggtggggcgacccgcagggctgttcagcctcaggtacctcctcccccgctgcctccgggaggggccatggcatgaatgggagcaggggtgggcactggagtaagaggcccccaggatcatggccccagtcatttcctgtacccacaaccctgccatctggaccctgagcaaaccctgtccatctgtcccagagactccacaaggcacacagagaaactgtccttccccacactggaggcctgtgctttgggatttaagaaaaaaagaaagaaagaaagaaagaaggtttcagaggatactgaactgaggacaaaaataaactgaaacgaagttct

SEQ ID NO: 15691 - DNA, 62807 bp, Homo sapiens
atggaccccgttggcctccagctcggcaacaagaacctgtggagctgtcttgtgaggctgctcaccaaagacccagaatggctgaacgccaagatgaagttcttcctccccaacacggacctggattccaggaacgagaccttggaccctgaacagagagtcatcctgcaactcaacaagctgcatgtccagggttcggacacctggcagtctttcattcattgtgtgtgcatgcagctggaggtgcctctggacctggaggtgctgctgctgagtacttttggctatgatgatggtaagggcaggtgtgagagacgcaaagcagccgggccagtacctgcgtcatggggagccgggaggagcccagggacccacctaagtcagagagagggtgtagcccagccacgatctcaactctatatttctggacacttcccagaacaaatttcctaatgcgcccaaatctgctggggcctggaggacccctccttctacctggcttcactcgaattgctcgaattgctgagtgactgcttccagccacaaaatcccacatagcccataatgcccgagagatttatttcttcttttttggcgggggtgggggggtgttttttgtttgttgttgctcttgttgggttttgtttgtttgttttttatttttgagacaaggtcttgctctgttgcctaggctggagtgcagtggcacaatcatagctcactacagcatccaactccaggactcaggtgatccttcccacttcagcctcccaagtagctgagactacagtagaactataggtgcatgccaccacattaggctaatttttcattcttttgtagagacaggacatcactgtgttgcccaggctggtcttgaactcctggccttaagtgatcctcctcccttggcctcccaaagtgctgggattatagatgtgagccatcacacctggctagaggtgtttttgtttgtttgtttgttttgcaacatggtcagaaacagtgacggggagcgccttctgccctctactgatccgtggggatttcttgggcaccttctgtttgcacagcactgaggggaaacacaggacattgaggggcaacagcgtttttggagagaaaatgggaactcacttaagaaccctacttcaaggcagagtgtgggaattgcggggggcggggcggcgcatgcacatatgtgcagacatatgcagatacacacagtgcatatacatgtgggtatgtgcgtaaacccatgtacacatgcatgcaagtgtgcccacatgcataacacatgcatgcctgtgcacacacatacataaacttgcatgcacttgcatatacacacatttctgcccagcactgccttcaaagctcaccaccacattttctccacaacagataactgagtgttccatttagttctcccttgctgggtatctccctgtgagatgagccctgagccaggcgccaggccagagctggtccccagcatccctcgacagccccataccacattatactctcccctctcttgcagggttcaccagccagctgggagctgaggggaaaagccaacctgaatctcagctccaccatggtgaggactggagttggggggtgggaagggggtggtgagcactgtgaagtccccacttccaagctggaggaggctgtggaggctgtggtggctggtcacagccatttctcataggccatgctcttcgtctgtccctgacccatttgcaagtgtgtcaagcccctaactgtgtctcccagccccacctcctcctgcagtgactttcaaggctttagcttgtcccgttaccaattctaaagggtctaacctggaacccctcaggaagcctgttctcactttcctgcccgcaacccgcagggcctcatctcccagccccaaagtgtcaggcttcatggggaagccctaaccaccccctcccgacttgtacaccttggacttgacactcacccacagctgctgtcttcagcgggggagcctttggctgattttctgaaggagctcggaagggccagtgattaaataatgaccacctactgattcgtgggtcacactttcatctcagcaccttgatttctacagaagcattgactttacttatcgctgtgcatggcagtaatgccaacagaaaacccaccctataacctcagctccccagtgaatcaaaactgtccaagtccctggtccaataggcccgcatcactgagctggcatcattatctcatggctgtaaccagatctgattgatatttggccagtgagtccctttttaatataggatttgttaagatattgaagtgctctcgaactggttccagcctcctagctggacaaggagcccagggccctgctccaggggctgttcctattggtcacttagcttagctgtaggaggaccctgcttgacttcttaaaattctttcctgagtcctctttcctttctccctcccttcctttctgggtccccttccttcttgttttccttcttcctttctcaaactcttccagaaaggcattaaagtgattgttgaaaatccatacaatgagacaagactccagaaactattaagggaagtgaggaaatgtgggtgataagaaatcgggatgataaaaccctaacagaggagggaggttgcaggcctggccaaactcactgggaacttcacttatatgaccaccggcggcttccatagagcttggtccttccctgatggacagatggccatttagtgcttggagctgagtgtttctgggggctgctggctgttggccctgcttcctgcatcctggactgcaagactgccaggcccagaacatccaccttccaatgggggtgcctagaagtccactctgcaaatagaagctggtgttgacccagcctctgcctgctgcctgcctttccagtccctgcatgtgggtgtacttggctgcctgccacctgtctgtggactggagttccccaaaggttctgggtaacccctcagcccagatccccagaccccactcctccaccccttcctttgctttttcaggcctgaagcgcccacatcagagctgtgggtcctcaccccgccggaagcagtgcaagaagcagcagctaggtgggtaccagtgtggggaggaacataaacagagagatggggttgcctgggggccaagacccggaccctggaccttgtcccctgccaataagcctccagaggcccagtgactcttgtctcgcaagtttccaggagaaaaggactggaggtcttgcacaggcagaggagaggcctgggctggcagcgaaggggctccccacccatctggctgcatggggacttctctgaagagggctccgctgaaggagctggaagcaccatacaggtctcagcttcgctgtccaggcttttccagggacaccctatgtcctcagtgttgaaggagacccagggaggagaccagtttgggggtgagcagggatggggaggggtgaggaggcctgggagaaaccttcaagacagaggccctgggggcccatggggagacatggagctgcttagggcaggccaggccagtgagagaagaaaggggacttctctcattcttgaccagttctcagaatggtcctcgttctccacgagttgtcccactaactagagccttctctgcccccactgctgccaaccatggctataaccagaggattcacatccgctcaaaatagttcactaccttggcctttccccatagggttcccccaaaagcagccccagccctttccctgggtcacctgagacctctcaatgacccaggaattaaaaggttaacatctggcactgtaggggcccagctcccacagttccgatcggtaatgcctaggcctacaggttgttagtgctcacccctgggcattgcagaactgaaatattgggaagaggcactggggatccagatattacagaaagaggttgtttcaataagatattgcaaagtagctgggcgcggtggctcacacctgtaatcccagcactttggagggctgaggcaggtggatcagttgagcccaggaattcaatactagcctggccaacgtgacaaaaccttgtctctactaaaaatacaaaaattagctgggtgtggtggtgtgcacctgtagtcccagctactcaggaggctgaggcaggaggatcacttgagaccaggagtttgcggctacagtaagctaggatcgtgccactgcactggagcctgggcaagactgagactctgtctctgggaaaaaagaaaaaaaagagatgttgcaaaggaggtgccctattcccctccccccatcttactgaacccttacaccacgtgtactattgcagaatggatagaaccgtgacccacacttccccattcccacctgcctgtttaaatagctaccggagagcctatgctcccttagaactgattccttctggaagttggggtggcacagatccccctatggtgctcttgacacccccaccctcaccccatcatacatacacatctggggctacaggctcccaacagcccaatactggggcaagaagacatgagcagagggccggggggtcctctcctcatgccatgtccctgccccttgcagagttggccaagaagtacctgcagctcctgcggacctctgcccagcagcgctacaggagccaaatccctgggtcagggcagccccacgccttccaccaggtctatgtccctccaatcctgcgccgggccacagcatccttagacactccggagggggccattatgggggacgtcaaggtggaagatggtgctgacgtgagcatctcggacctcttcaacaccagggttaacaagggcccgagggtgaccgtgcttttggggaaggctggcatgggcaagaccacgctggcccaccggctctgccagaagtgggcagagggccatctgaactgtttccaggccctgttcctttttgaattccgccagctcaacttgatcacgaggttcctgacaccgtccgagctcctttttgatctgtacctgagccctgaatcggaccacgacactgtcttccagtacctggagaagaacgctgaccaagtcctgctgatctttgatgggctagatgaggccctccagcctatgggtcctgatggcccaggcccagtcctcacccttttctcccatctctgcaatgggaccctcctgcctggctgccgggtgatggctacctcccgtccagggaagctgcctgcctgcctgcctgcagaggcagccatggtccacatgttgggctttgatgggccacgggtggaagaatatgtgaatcacttcttcagcgcccagccatcgcgggagggggccctggtggagttacagacaaatggacgtctccgaagcctgtgtgcggtgcccgcactgtgccaagtcgcctgtctctgcctccaccatctgcttcctgaccacgccccaggccagtctgtggccctcctgcccaacatgactcagctctatatgcagatggtgctcgccctcagcccccctgggcacttgcccacctcgtccctactggacctgggggaggtggccctgaggggcctggagacagggaaggttatcttctatgcaaaagatattgctccacccttgatagcttttggggccactcacagcctgctgacttccttctgcgtctgcacaggccctgggcaccagcagacaggctatgctttcacccacctcagcctgcaggagtttcttgctgccctgcacctgatggccagccccaaggtgaacaaagacacacttacccagtatgttaccctccattcccgctgggtacagcggaccaaagctagactgggcctctcagaccacctccccaccttcctggcgggcctggcatcctgcacctgccgccccttccttagccacctggcgcagggcaatgaggactgtgtgggtgccaagcaggctgctgtagtgcaggtgttgaagaagttggccacccgcaagctcacagggccaaaggttgtagagctgtgtcactgtgtggatgagacacaggagcctgagctggccagtctcaccgcacaaagcctcccctatcaactgcccttccacaatttcccactgacctgcaccgacctggccaccctgaccaacatcctagagcacagggaggcccccatccacctggattttgatggctgtcccctggagccccactgccctgaggctctggtaggctgtgggcagatagagaatctcaggtgagtaagagtggaggaggaccggggaggggattgggcttttgggggagcagaggccaaccagtctagcaaacctctgccaagaggactggataagaatcttgaatatcagaacataatggcctgcaatgcaagagaggaagctccataccttgacaggacctctggagtccaaatggatcctcctcttgtctgtggtttctggactctcagtctctctgtcaatcatgggctgaaaccacagatccaggctgtctatagaggctggtggactttgggcaagtatatggagcacacacatgcacactgtctaggccagagtttcttcgttcctaaaacgaatctgtaacaatagccaactcatatggtcattgcaagaatgagatgggatggtgcatgaaaaacattttgtagcacagtgcctagcacagagcaaaggctcagtgtgcatattagctagagaaaaggctaggctgcagtaacagagaaacctcctccccaaatacagtaggttaaataatgtagaattttatttctctctcatggaagagtcagaggtaggtggtccaggtcagtggaatggctcagctccacgcagtcatgcaggtacccaggtccctcccattttgctccattatccccttgggaatcctatctgcacagtcaaagctacgtcatgggtatatctgtgctctggcttgggaacaaggaaagagcatggaggaacatgtcaatgcattaaagttcagtcctgaaactaggatacatcccttccactcacattccattggtgagaacatagtcacctggccacactgagctgcaagggaggctgggaaatgtgatctctggctgggaaaccatgttcctcatgatagctctattgctgtagatgaagtggagaatgggctttggtggacgattagaagtctcggccataatatgtatttgttagtactactgtattaagccccatctctctgaggggatggcgatgacttctcagctctgcccagcactgatcctctgacacttcgcttcttcttatggcagctttaagagcaggaagtgtggggatgcctttgcagaagccctctccaggagcttgccgacaatggggaggctgcagatgctggggtgagccaggccttggagctgagaagggtcttcagctggggatgcctggtactctcctccctctccttaatcctacacaaggcagattcctggccccgcccttttcccctcctcgttcctccccaccatctttgcttactctgtaggttagcaggaagtaaaatcactgcccgaggcatcagccacctggtgaaagctttgcctctctgtccacagctgaaagaagtcaggtgagtgatctccaggagggctcactgactggggagatgagccactgcccaggtcccagagtccccctggggcctgcatgttcctccaagtctgaccagtagtttttcagtgagacccagagagggaaggcatcagtccaagtactcagtagggctgagtccaaacccaaggctcccagagtccccagagcaaggcttccttcatctaatattttagactgtcttggaggagcatgagtgttaaggctccctccctctttctgaaatcccaggagaagggatagcagtgcgtaggcaggaatcaggcactgtgggtacacataactacatgaagcaccacacaccttcacatttgttcacacatgtctacacttgcacagaagtacacaggcatatgcaagaatatgcacccacacatgcccactcataggtgtgcacatgtatgcagcgcacacatgcacctttaactacatgtacacattttgatgccagcacactctaactaactaagcttgtatgcacaaatatactcctgccctgtgtctgggactcagtaccatggggaggagtgggaccagtgaccctcctccctggcagaacgctgctagtttatatggcacctttatgacatttagagaaggcaccacttcatccacacagatgcagcctgtcactaaggttcagcacttgttgagtgaaaataataagttggaccacagtccctattgtcgtctcggctgggcatctgtgaaccgtgattaagccaaggttcagaagtactgaacttgttgacatttttcttccctggctattgaaagtgactttaattttgtctttcatcacccaccattgttcttaatcaccctcactcccctcaactcatctgtctccccagctaggaacccaggcaaggctggcttgtgaacaggtggggaaagtgaggtcagagaggaatgcgcttggctcagggctctgggtgagtcagggccacagccgaggctggaagcgatgtctgcagcgtcccagtctagactttactcattgcctggggggcctatcccaggcacatcccaggcataagccctgggagcagggtgctaggtctcctcattgtgcctcatgaagaggccgtcagtctgtcttctagatcccttgagccgccaggcaaaaacttccccataggaacagaatagacccagaattgaggccagcagagggtctttcctcctagccgtgcctgctggaatccggcgagcaggccatcagctctttctgggcccctgtcttatgtctcccacatgagggtggccatcctgtcacttgctaactggggcttgcaagtgccccaaccccagggcaaagggactgggccttggtctcctcgcagttttcgggacaaccagctcagtgaccaggtggtgctgaacattgtggaggttctccctcacctaccacggctccggaagcttgagtaagtgatctttccactgcctctgcagcccagtccctctctatacctgattcaccccactcccttgcaaggcaaggaaggtctggggcccctggggtaggggattccactcctgacacctttgccacaatcttgcagcctgagcagcaacagcatctgcgtgtcaaccctactctgcttggcaagggtggcagtcacgtgtcctaccgtcaggatgcttcaggccaggtgagcagaaggaaagggatcttggccttatgggccttgagaaaagaggaggggaaagtgggatgggaaatggaggaggcccctcgtctgcaggataaatctgtgcataccctactgttttactcacagctttaccttcagaacctagctcaggcttggcacctggtacttggtatatattgaattaatggatggatgaaaagatggatgtatggatggatggctgaaaagatggatgggtggatgaaaagatggatggatgaatggatggctgaaaagatggatgggtggatgaaaagatggatggatggatggatggatggatggctgaaaagatggatgggtggatgaaaagatggatggatggatggatggatggatgaaaagatggatgggtggatgaaaagatggatggatggatggatggatggaaagattgatgggtggatgaaaagatgaatggatggatggatagatgaatggatggatggatagatggctagctgaaaagatggataggtgtgtgaaaagatggatggatggatggatggatggatggatggatggatggatggatggatgaaggaatgagtcaacaagtctacgaagcacaggcatagccaaaggaataattagctgtgtgttgccctccatggtgctgaaccaatatagccagttttgatcatggggtaggttaggtgtcatttttcttactcataaaaatttctattaaaaaaaattcagccgggctcagtggctcatgcctgtaattccaacactttggaaggccaaggcaagaggattacttgagctcaggagttcgagaccaacctgggcaacatagtctctacaaaaaatgaacaaaattaatggggcatggtggtgcatgcctgtggttccagctatttgggaggctgaggtgggaagattgcttgagccgtggaggttgaggctgcagtgaggtgtgaacacaccactgcactccagcctgagtagcagagtgagatctccatctcaaatttaaaaagaaaggaaaaaaaaaaactcacaacattcttaatttttattatatttcttgtgaaaattgtttttctgactttttaaaacactcttgcaggattcatcaagcaaagacataatcagtatttcacatgcctgatttaaaacacttttgctagttccgttatgtttccctgtcaattgcaaaatcagctttatctggatgtttgaacatttggggcagaaaagggtgtgcctgtggtgggtgatgtgctggtttccagtctctgggtttcatggcttggtatctgatcctgcagggaggcggacctcatcttccttctttccccgcccacagagacaactgcagagctacaaaggtaagaagccaagaggcggtgggcctggggccatccttagaagcaacttgggctcaggcagttgaggggaaaggtgaccaagagactaggaagagctggggtatgggaattcttcctgctactgctgcactgaggaatgaattactgcttaggttggcaaaggattttaacttcctctagcgtgtccagaccacatctggtccctgtggaaggaagcatccccagaagactcagaggaaggcaaacccttggggagaacataaagatactgttagactggcattactagatggtgaaaactctggaaaagcccttacaactgaaaaaagacagggagggcaattatggtacctacatcttagggttgttctgagaattaaatgagttactacacttaaggagtttagagcactgttggcatgcagtgggcagtcaaatgctggctattccagctgtgcatggattccagcttggccagtcttggatgggctgagaaaagggagctgcttttccctaaaagaccatcccaactgtgctctaccacactttgctctcctggctaagactcagagacagatgtatgtatgcccctgagcaatctctttcccttctctggatctcgattccttgcttgtataatgacctggtagtgtaggaccaatgttgctgggtgcggtggctcatgcctgtaatcctagcactttggaacgccaagcacgagaatctcttgattccaggtgttcaagaccagcctgggcaacatagcaagaccccatctctaaaaaaaaaaggcaggcgtggtggtgcacacctgtagtcccagctactcaagatgctgacgttgggaggatcgcttgagcctgggagcttgagccatgatcacaccactgtactccagcctgggtgacagagagggactctgtctcaaaaaatgacccactaggaccagtgtcactttcttttccctctaactgcttaaagctgtgatgctcagtaggatagccactagccccatatggctatttcaatttaaataaattaaaattttaatgctatttcaatttaaataaattaaaattttaatgctattttaatttaaataaattaaaattaagtaaaatgaaattttcagttcattagtcacattagctatatttcaactgctcagtggccataggtggctagtggctcccatagcaagtggtacagatgccaggacatttccatcattgcagaaagttctattaaacaggctggcatggtggctcatgtctgtaaccccagcactttgagaggctgagggggcaggatcgcttgaagctaggagttcaagaccagcctgggcaacaaagtgagacccccatctctacaaaaaaaaaaaaaaaatagctgggcatggtgattcactcctatagtaccagttactcaggaagccaaggtgggaggatcacttgagcccaggagtttgaggctgcagtgaactgggatagagccactgcactccagcttggggactgagtgggaccctgtctctaaaaaaaaaaaaatggttagcaccaatccaaaaagtctgtgaaacctggctcatgatgtcctagcttccctgcatcccctaacgctccctcagcccagtgggagagagtctgtggtttaccatagcctggactcactgcatacagctcatgctcctcgccttctgaaccacagacagcacatccacaaatggagaccatcacatcatcgacaatagcagcttctgtttactaaccttcgattttacacctatgctgggtacttggacatacattgtctcattcaatccttcaggtacctatgtgctagatgttgtcatccgttttagaaaagagaaaagggagccgactgcagtgatttgcccaaggccacatggctatacatggcagagccaaaatttgaataaaggttccatttgacctcaaacctgttgcccctcctgctctgctgaatcacatcttgagcatctgcaagcagtctcctttgttaccgactcactttgggttgtgcttcagggtcttcagcctctagaagccaaggaaagaggcttgatccaccaggccctagatgcctgagcccaggccaatgcttgatttgttcttgccagagctccagacctgcaggaaagtgacggccagaggaaaggggctcagagcagaagcttgacgctcaggtaccttggagggatctattgccttaggagagggatatgatatgggggaaagtccgaggcaagggagagcaggggcagggaggataaagggaaaagcagatgagggacagggaaaggattagccgggtgtggtgcccatcctggatagcccatcctggcttgaataaggagcatctgtcataataacaatagctgcaacttaatggaaccggctatctatatgccgggcattgcactagatgttttacatccattacctcactgtaattcctttagaatctctgtgaagtacacattattattcccctttgagggaggaggaaactgagtctcagacaggttaagtcccttgctcaagatcacccagctactaagaggtgtggctaggattagacccaggtctgtgggccccctgactcccccagcattggaagctggaggggccatggagtaggggctgtttgccctgagcccttctgtcccccactcctacccaaggctgcagaagtgtcagctccaggtccacgatgcggaggccctcatagccctgctccaggaaggccctcacctggaggaagtggagtgagtatcacgggaagccctggcgtaggagccaggaaaggaggttggagagggtgggcagggcctcgcctttgggtgggtggtgtgggggaggggcatgctgcctcatgaagaatttgggggaatcagatcattgtaacagctgctactattcagcacttgtcccgggtcaggtgctgtgctagggactgtacatgcctcctcgcattcactcctcacatctctgtgatgtaagcactgttactgtcctcattttatagaggaggaagttaagctgcagaaagataaacttgctcaaggccacacaggtaggaagagtctaggctagggttcaagcccagacagtctggctcgcagcctcatcctcataaccactgctacctctcttgctgagatctgccaagtagaaaccccaccacacctgggtctgccttccaaaccacagtccctcagggctccccccacccccttcatccttctcccagagtagagtgggataaccttctcttttcgggatggagaaattcccatggcgtccagcccctggctgaagccaataagagtagtgcttggggatggacggaggctctgtcacgaccctaggaggggcgcccctccaggaaacctccaagtgaacatgaaggcagatgatggaacgccaggatgtgttctgggtcgagtggccccacctcagggtaagacggataggggtgagggttgtcgtggtgatcacctcttgatcctggacctcgtcccattgggagaaccaggacagaattagaaggtggttttttaacaagctcacacacttctacctgcctcaccagcactgagcatgcccctccccgagtgccatcacctgcagaagcagccccatcacccgcctggttacgcagccacctcctagcccccttgcccttctcccacatttagtccctccagatggacctactggtagcgctcaaaactatcctcttttcctccacctttctagtccaacccaccctcatctcttacctggatgaccccctcgccttgccttccttgctggcttccctgctttcaccctggccacttccacctggcagagagtagatcacttttcactgatgcctgcccccttcactccttcccactgctcaggataaaacccacattctaaactcccaggtggtccagaaccctgcccccagcctcctaaaccccatctgaccccatccttccactcaatctccaatccagacacactggctctctttcaggtcctcatatgtgttatgccacagggcctttgaatgtactgcttctaccaccaggaacacccttcctccatctctcccccaaccttttacctactgaactcccagttatttcagcaagtagcttaagcaacaaataagccatccccgactcccagactaggtcagatgcccccataatcatgaagtttatcacaaaaagcaattatgtaacttgcagcataaaggaagagttgagggtggggccttgaaggcaggctgcctgggttcaaatccaggttctccctcgagcaagtgccttaactttactctgcacttaaccactctgcacttgagtttactcatcagtaaggtgaggataattacagtgcccacgtcatcggcactatgaggatgaaataggccaatagtcatagaagaacctaggatgttgccaggcatgtggtatggagtctgtcgatttcagttattatcaaggttcattcctgagagtgacactttgactaaagttagcaaaggaggagtaagtgatggggattgagggaggactccagccccacaatacagtgcattgggccccccgtctcagcctctcagggaaccagctggaagatgaaggctgtcggctgatggcagaggctgcatcccagctgcacatcgccaggaagctggagtgagttgtccaccccaccgctgggtaccagggaaggccctgtagagccccaggaggtccccgtgttcgtaatcagcagtaagggtgctgatccactgccacccctgcttcctcccaactccagcaaagtcaagatggtttgaccatgccttgccttcacctccggcatgagccactgtcttagtccaatcatctagcacccttacatgtgtaaaatgcgttcattatacatcagtggcttgcattccaattcatctttgtagctgccctggagcacggtggggtggggtgttgcactggggaggtgtcagggtgggtgggatgttgcactgtggaggtgtcatgctggggtgctagggtagggagtggtgtgttcctgtggggatacactgttggggtgaggggtggtgagatggaaaggtaggctattaggctgctgggtgtgctgtggtgttgcatggggtgagggtgatgtttgggtgggggtgtcttgggggtcttaggatcaagtgtgggtcgggtttggggagtgttgagattgggtagcagtggtttggggcctcagctttggatttcaatcttcgctctgtcacttagtagcattgtgaacctgggaaagtaattgaatgtctctgggcctcggtttcccctctgtaaaatgggatcacatgaaaccatatatgtacaaagccttttgtacagagtctggtatagtcagggctcagaaaatggtggttattttacagatgagaaaactgggggtcagagaggtgaaaacactgagttcttgctgtcaagctggacaactttattttccaaatgggatgggggtgtcatgcattttttggcttactcacacgcaccagaatcctttgagatcccctggcaagggacctaggacatccaggagtgacagccagcaagctgctgagccacagggaggggctagagctggctggggctgggtacctcagccacatgccaacggctgccttctcctgctctccacagcctcagtaacaacgggctttctgtggccggggtgcattgtgtgctgagggccgtgagtgcgtgctggaccctggcagagctgcacatcaggtgggagctccctcagaccacggtacccatccccccccccatcatgctctctctgaagcccttggaattccttctgggcccaggccttgggacgggcagaagatgctgctgctgtcccacccagaccccgttacagccggcacccctcttcctagctgctgtggatataggctgctcatggtttatacctctggagaactacccttggctgataagaaccagagacgcctggcagggtacaacccccactttcccctaacctagagtggccaatgacagaggcagagggcacaactctccagcccaaactctccagtgggacaaagctccctgggagactaggccaaggacttgctccgtttggcttccctcagtcccttactgtttctcctgagagcagaccgtcagttcatgatgtgcgcaactgacaagtgacatgcgaccccctaccccactcacagacccaggctctgccactagggaacccaatcctatttctgtaagtctcgccgttgagtatggggaggtgaggacagatgatgattaatgtcaactcagttcccactcggaggaaagcctcattctcaacccagtagggtggtccctgctttaaacacccctcaagggaggagagggaaaccgattcacccaaaaggtagattaggggaccttggttcactgtatatgatgattcaataaagggtccctagtgcattccaagcgatgccctgttcacttccaggaacttatactaaataaattatcacgattgtgcaaacacatttagctgtagggatgttcacctcagtattggttataataggaaaaaaaaagaaaatagctggaatgtttaaccgagggatattagttagactaagttacttccagagagaactcagtggaaccatagaaaaaaaaatgataatataggtgcagtttcaatatggaggggtgacggggagttattaagtaaacataaagaaatttctttagagacaggatcttgctctgttaccaaggctggagtacagtgacacaatcacagctcactgtaacctccaaatcctgggctcagcaatccatctctcttagtctcccaaagtgctgggattacagtcatgagtcactatgcctggcaattttttttatttttagtagagagagggtcttgctatattgaccaggctgttctcaaactcccgagctcatgtgatcctcctgccctggcctcccaaagagcaaggattataggtatgaaccactgcaccaggccaaacataaaaattttaactcattatcttaaaagattataaaagattataataaagcttttcaagatatgcaatggcagaaagaatggtataatctgggccaggtgctgtggctcatgctgtaaacccagcactttgggaggctgaggcagggggatcacctgaggtcaggagttcaagaccagcctggccaataggatgaaaccccgtctctactaaaaatacaaaaactagctgggcatggtggcgtgcacctgtaattccagctactcaggaggctgaggcaggagaatcgctggaacctgggaggcggaggttgcagtgagccgagatcatgccactgcactccagcctgggagacagagcaagactctgtctcaaattaaaaaaaaaaaaaaaaaaagagagagcatggtatatataatctgttcccatcaataatgatcaagtattaataattatttgtcatccctgcttctagcccttaaaaaactaatgtttaaaaagagaatctatagtttaatcccatgtttgtaaaacaaaaattattgcactagaaaatggaaggtttgaaggactcactccaaaggttaccaggggtaatccacacatactttgagcacagacagaacactgactagcagagagaggggtttcagtctggggctaaaagagagaacacagaatttgttttcttttaagacttgccaggaaatggggcttacttaggcaatagatacatttgtgaaatatctgtggtagaaagatttcagccctccaaaagctcagaggaagtcagaggggagtcagaggaagtggctgcagctggaggcagggggatggaacttgagaggtcctcccgggccaggggtaaaaagtgacaggccgggcacggtggctcacacctatcatcccagcactttgggaagcaaaggtgggaggatcacctgagcccagaagttcgagaccagagtagacaacatagactgtctctacatacttttttttttaattagctgggcctgatggcacaagcctgtaatcccagctactcaggaggctgaagtgggaggattgcttgagcccaggaggtggaggcttcagtgagccatgattgcaccactgcacaccagcttgggcaacagactgagaccttctctcaaaaagaaatagtaacagggagccaataacctctcgcttcctcacccctcttttgtcttcacagcctgcagcacaaaactgtgatcttcatgtttgcccaggagccagaggagcagaaggggccccaggagaggtagggcccgatttcaccccaactccatgctcagtcagggacattcccctctctaccctccacagctgggcagtgccagtcagtcaactgccagggtgacctggacaaattcacggaagagcgggaagtgagcaggcttggcaaaggatgcagccccaaagggggagggtccaaatccagaccacctccgcctctcatggtgcctgaaaggagccccagtgtgtaggatatagacagcaggccagggcaggagttgggtagccagagggggattccgggagactagagccctccagcttaaacccaggggattgcctggcctgtagctctggtcctggtcggaacttctgtatccctttcacacaaggacccattagggtcctggattgccccagcctagcgcatgggtagagactcagctctttgctcccggagcccacccacaatctcttctgtagagtctggactactgaaggctcgattccagctggggctgacatctctgaagcacagatgaggaggaggatgagattaatgataatagcagtcaaggtcaattgagtacttgccatgtatgcaccaagcaccaaactaaggcagttcacatacagtctcccattgagaggctgtgatttgtccagggtcacacaaccaggaagtggagaagccaaattggcaccaaggtctgattgactctaggtggaggatagggctcgatggtggaaggccaggctgaggatggattctggagatggcggacatggcctttgctcagcctggccttggtgatgtccctccagggctgcatttcttgacagcctcatgctccagatgccctctgagctgcctctgagctcccgaaggatgaggtacagtgatggcctccagccctgtgtgtgattccagccccctcccttcccctgctcagagcctgctcccaaacctgtgcccaggccccacatgctccctgaaggacacctgacctgctgtgtccaggggtcatggcctggcttccctacctcctacctcccctgcccagcccaccccagacagggctcacaaggcagccccgtcaaccaccttcccaagcccaggagaccccactccccttagctccctgacccccagcagctgaggggttgtggagactctgaaaagaggtgaaggggagcactgggctccttctgtcatgatcctggtgcctgggcctgggggctcccatcagcactcttccccccttctctcttggtctttgtctgtcctaatctccctctgtccctctgcctgtttctctcatttcttccctctctcatcgtgtatttctgttttatcagtttatttaactgttatttcagtcttatctgtcttcctctgatctgctctctctctctgaggtctctgtgccttggtttccttccatctgtgtctctgcccaccctctgcctatatgtgacatcctgtgggtgtcgtgtgtgttggtccctctttgtccgtctgtctaggtgccagatacatcccagtccctcctctcctgcaagcctcattctctgcctctgtgtctggggggtgggaaagcggctccttcccgcctctgttcagtggggcatgcagcactgtgtttttgtccctgggcaggctgacacattgtggcctccaagaaaagcacctagagcagctctgcaaggctctgggaggaagctgccacctcggtcacctccacctcgagtgagtggtttgtgtgttggaaggtgggtgggtggggccaattacagtgagttagtgttggtgtttgggtttggtttttaagatttagatcaactgttctttccctgctgaagtcagaaaccccttggagaatctggtgaaagttgtgactcttcctcccaagatacagatcccccatgtctgacacgctcggaggctcacccctggtccctcagaggtccacgaacctcagaataagaacctgggggagaccccagctgcccgtgccagatctgctgagatctggcctggcagcccagggctgtgtccagtttcaggaagttgagtaactggaatgcagggaccatgctgccagcaacccactccccacctgctaatgttctcccctcccttctccccacccccagcttctcaggcaatgctctgggggatgaaggtgcagcccggctggctcagctgctcccagggctgggagctctgcagtccttgaagtgagtagcccgctaggcagagcctctgaggctggggcagggggggagcattctctgtcccatccccctctttcctggggttattgtaaagattaaatcggaaaatgcatgaaaattgcccctaatacaatgtaagttctcggtgaaggctagctaatagatgattcttactcagagagtctgtgactcaataatcccacttctgattcaaggtttcacttctggaacctgtctccgcatctctgaacaggcttctgaggccaccctggggagggcaggtgtgggtgcgaagtatgactaacggctggcagttgttattctggccctggggtgccgggaggggctggggctgttagctggggtatggtcagggtagacagggagggtttgtaccagagaggacactcaagcagggtgcccagggctgccaaggatccctgagtacctggcagagagtgtgtaggaggaatccccaaagtttgcctgcaatggaccagagttcttgatccctaaatgcccttggtgcttttggctcacaaagcaccccctcctcccaggcacttctgggccaaagccagaggagcccaggggagaggtcacaggtcctatattccaggctgtctctgtgaacacgctttgctgtgtgattctgggcaagttacatcccctctccgagtccctggttcccagtcggtaaatacataaattgcaggcgtggcctctgttggtggctacgatctctgaaatgagtgctggggcctaaggaccccctgctcacaccctgtttttgtgcaatgctgggaaggaagggagttgccttggttcctgttcagggcctgcacctgggaaggaaggaaggtctaaccattgcaggcaaattacatgaagactggaggttttagtatgtcctcatgtgaccttcttattagtgtggactcgtgacctggtgctgtgagggtccacactcgccctaccagtgtccccgtgggaggggagtgtagcattaaatagtaaatagaaaacaataacaagttgacaggagaccctgaaagaaaggagacactttgttcctgctttctgcacaagagaccctgcattttcattttgtcctgggtaccacccctcccttatcaggtggagaaaaggaggcccagctccagccagaaagcactcctcagatccatcacagaccgagggacccactgggtgcccatctcagctctgtcaccaacatgtctcataaccttgggctagaccttgattctctctaggactctgtttccccatctccaccatgaggacttgcaaggggtgctctctgaccatcttgggttcagtgggttccgtcatctggaaccagggatccctcccccgccctgtgccctgaccacaaagaggatgtgtttgggtcctgagtgacctccattgtgccacccctgtgatctccagcctcagtgagaacggtttgtccctggatgccgtgttgggtttggttcggtgcttctccactctgcagtggctcttccgcttggacatcaggtgagcgtgcctctccgcccccagccctgcccctgtcccccatcccacaggtcatctgctcccacgtgggccccttgtccaccagtttcatgccaacctgtcatcctcagcaccttgggcagtaccagatctgcagagcatgtgatgggcgtccactgaatgaatgaatgatcaaatgaatgaataagtatggcctcacggatgctcaaatttctccaaattcaccattagagagttcattgactctgcctcactcgttctttggatagtccttagagatttttttttttaggattttttttttaattattatactttaagttctagggtacatgtgcacaacatacaggtttgttacatatgtatacatgtgccatgttggtatgctgcagagacttttaagaaaactgggggccaggcgcggtggctcacgcctgtaatcccagcattttgggaggccaaggtgggcggatcacgtgaggtcaggagtttgagaacagcctggccaacagggtgaaaccctgtctctgctaaaaataccaaaaaaaaaaaaaaaagtatctgggcgtggttgtgagcccttgtagtgccagccgctcaggagtcaggagaatcacttgaacccaggaggcgaaggttgcagtgagctgagatcgtgccactgcactccagcctgggcgacagagtgagactccatctcaaaaaaaaaaagaaaagaaaagaaaactgggagcttcctagttgccactggggactcagggacctgtcttaattgtgggagctgatgagaatataaaaggggaggcaccagccagccaagccaccccaggcactcagggcaccgcatccatgattttcaggggaggtctgcttccctttcccttccctaaggacccccaagaatgggaggtgccacagcagatggaccaggctcagttacttaactgctgcgagctcagagcaggtcccagagcctctccaggcctcagtttcctcatctgtaaaatggagataagaataattactggcctggcacagtggctcaagcctgtaatcccagcactttgggaggccaagacaggaggaggaggatcacctgagcctaggagtttgagaccagcctggacaacatggtgagacccccccatctctacagaaactttaaaaattagccaagcgtgatggcatgcacctacttgggaggctgaggtgggaggattgcttagactcaggagatcgaggctacagtgagttgtgatcacaccattgcactccagcctgggcaacagagcaagactctgtctcaaagaaaaaaaaatgtcaggcacaatggctcacatctgtaattccagcactttgggaggctaaggcaggaggatcgtttgagccatggagtttgagaccagcctgctcaacatggcaaaaccccatctctacaaaaaatacaaaaattagacagtcatggtggggcgttcctgtagtcccagctacttgggaggctgaggcagtaggatcagttgagcccggggaaggttgaggctgcagtgagccatgactgcaccactgcacaccagcctgggcgacagagcaagaccctttcttcgaaacaacaacaaagaagaatttcttacctcattgtttattgtgagaatcaaatgagaaatgtcgatggtgtgctttgcatgtgacttgatacatgtaattgttgcttaatctattccttgtttgctaagaaagcaggccaccccaggccctccttgccctgaccagtctgggttcttgccactgccagggaagttggtctttgaccattttcaaactgctgcttcctctctgcttccagctttgaaagccaacacatcctcctgagaggggacaagacaagcaggtgaggagggaacgctcggggtgggggagtcccctcccgctctggtccccgtctgttggaggtccccccacccccagacccatgctgaccactcagctctcagttaaaccacccaagtccggcacactaggtttaatcaccacttcagtaaccaccgccccccccataaattgtcagtaatcaactgccctgttttccccttggaaggaggcaatgcagatgggaggaagggagggatatggttgggagaggtcccagagcagggcaggtgcccgcagattgctgctgtgtgggaggagacaggagaacatttgtgcttctgcgtttcggggaattttgtagacccaccgctccatacatgtcactgccctttcacgctctgaaggcaggggccgtgggtgctctgaaaaaacattttccccgtcttcgcagtaaacaaccaatactagtttagctcttcatgatgttcccggctgccctctagtgggaccaggcctcttggcctcacttgggagcagtggcagcggacagggtgggcccatgtgcagctggctgggtggagagagtcacagctagtgtgtcaagaaaaggcactgccgtacagatgggctgtcaggagtcaggggtggctcaagcctgggtggtcttgcttcccaggataggatctctgtttctggggaacccccgggttcttgaggcccaaagaactgacgtacagggaggcagaagtcatgtgatgccaagcagtggtcagagaggctctgtcttgggtcctcctgcctgctcacctggacaggaacaagctgctggcttttctaactcaggcttcccttccctgagcctcagtttccccatctgaacaatgagggactgagctaggatctagtgactgcattgtctctgagatgccttccagccctgactttccaagtctgggagtccaatgtgggtgatctgaactttcctttctaaacgatccccctcctaggggtatatgggctgggctgggagtccgagggggtgatctgaactttcctttctaaatgatccccctcctagggatatgtgggccactggatctttgccagacttcccagctgcagccaagttcttagggttccgtcagcgctgcatccccaggagcctctggtactgtcccagcccttcttgtttgggggtaaccataatagggatgaggcgtcagagggggcagagctggcagggggctagggctggggattgggatagagggaagagagggagtttaagagaaaaggaaaagaaagaggcgtgggtgtgaggggtgctgggagttggggagctctggcccctgacgggcagctcagctggcccatgccccgcattctccttggagagaagattccacatttctgtgaagcaaacagagcagctcagccactccctgcctggggtctccatctgctctgggggacacccactttccagaaagaaaggggttggcctgtctccccactaatacactccccatctgcaagctctgccatgagaggctgtgagaccctgacttggccccacctctctctaggcctccagggaagtggaggcaagtgaggccctgggaaggacatttcaatttcactgttagccccagggcaatggggagccacgggggtaacagggagaggcctggtcagatgtgcagtgttaaaatgtgagacacttgtggggcagagagggattaaagggaggcaagagtggaagcccagagggtgttaaatggtcaaggtgagtgaggatggtggcctgggctctggagggggcggtggggaggacttggagagtcactgacaagggcagctgggaactcagggtcctgcactgtcactgtcagggcaggaggattgggggctgcaggggagactcgagagggaagcgagtgccccacaggggaaggggcctgtggcctcccacttagagtgagggatgctgggagaaggatagagcccctggggctagccagggaccctgggctttctctgattccctgccctgcccattgcccctttgcagcctcagtgagtgtcctctggagcccccaagcctcacccgcctctgtgccactctgaaggactgcccgggacccctggaactgcagtaagtaacgaggacacagccccagagggcaccatgtggggatctgcccagtgacctgggagggggcttcttggttagaagacaggtgagtctttctcgatttcttcccaccagccctgccccatgagagtcccctggcctttggtagaaacttggctgtctctcggcagcccccagccttaggcagcgcatgtctcccactgggagatgctgtgctggactggggaagccttcacctgcaccatccactcaactcagggcacctgggagccctgtccacctccaaccccacccctggagcctcaccagggcacccacttgaacctgcctgcatggctggagcgtagcacttctgaaagcccttcctcaaggcacccccactctccttggggttaccacctcactcgccccagaacatctgggtctgtaaccagagactggacctggaatcaggactcttggctcaaaagggatttaactccccgggcctcagcttcttcatctgcacagtggatggtcagcctttccttttattgtcattgtggtgattctattatagtaattaccttaaaataaagaaatccaagacaaaacctgcctcacctaaacaacctcttctctcatcaaatccatgttgtcatgtgtccacaggactgtctactccttgcctatttgcatattcagtttctacctgtttgcagtcataaactagtttcatgcactgtgttttcatagcatctgtgttttccattttgcttcagtcttttttcttgctttctagcccccatctcaaatgcccttccagcccttccaaccagataatccggtttgaccccctggagtgtggccttcccatgtccttctccaggttcaaacatataaccacaaaaccattatcagacctacactattttttttttctgagacagagttttgctcttgttgcccaggctggagtgcaatggcgtgatctcggcttgctgccacctctgcctcctgggttcaagcaattctcctgcctcagcctcctgagtagctgggattacaggcgcccgccatcatgcctggctaatttttgtatttttagtagaggcagggtttcaccatgttggccaggctggtctcgaactcctgacctcaagtgatccaccttcctcagcctcccaaagtgttgggattacaggcttgagccactgcacctggcccagacctaccctattaatggcaattccttaaagtcaaccaatggtcagtggtccctgattgtctcttacctgttttcacagagtatatactgatgccttttaatactaaattgccacagtacgggacgagctgcaagttactccaccacacccttctagagtctagatcaagggtgtccaatcttttggcttccctgggccacattggaagaagaaaaagaattgtcttgggccacacataaaatacactaacactagcgatagctgatgtgctaaaaaaaaaaaacaaaactccaaagaaaaatctcatagtgttttaagaaagtttacgaatttttgttaggccgtattcaaagccatcctaggctgcatgcagcaggccatgtggcttggacaacttggtctagattgaaatccaaactgcttctaggtgttgtgttttgttttgtgtagcactgcagtcagtgctacaaaaagcactcttacgtgatttgactgttaagtacctattgtataccatgcactgggccagatcctgggaacacaaggagactgggatgcgggctctgctggccaaggcaaatcatctgcagaggaagcttaatataaaaagcccactggcggcccggcacggtgactcacgcctataatcccagcactttgggaggccgaggtggctggatcatgaggtcaggagttcgagactagcctggccaacatagtgaaaccccatctctactaaaaatacaaaaattagccaggcatggtggtgcacccctgtaatcccagctactctggaggcaggcaggagacttgcttgaacccgggaggcagagattgtggtgagccaagactgcgccactgtcctccagcctgggcaacagagcaagactctgtctcaaataaataaataaataaataaataaataaataaataaagcccactggcagcactgggcggtctgagcacaggtgggagtttcaggtccccctccattacctgtggttggggaaagtgcaatagtgaatatgaaagcactttgtcaactgtagagtactgtgatcacttgcaggattattgctataaatagtcatcaaggtactcaatgctgaagtccagtgattccccggggttccaccggggaagccagggaagatagattgtggggctccatcccccctccctgaattcaagcactgcaggtctactttgcctgtgtacacatgggcataccatgtgggatgtggtaaagagtaaagattccattgctttaaaaaaaaaaaaaaggagggtgtaatcacctcctttgccaaccagagcccatggtgtatttgggggtctggtgggacaccatacgggatgtgtttctggaaagaccaccctcaataaaggccccagtcctgactgtgcctcaggggcccatgcccagtccctggggcagaaagggtagagttgggcctccagcctgggccctggcagaggctccaacatgaggctgctcctcccgccctaccctgccccccagctcactgagccagttgatgtagggcccctgtactccatgcctcccctccaaacagccagaggagaaagcagcagagatgggccaggcccttggaggccccggagaggggagagggcagcctgcagaggatgaaggaacagaaagagaggaagggggaggtggagaaggcagaaggagaacatagtagaggtctgcgggggttgggaagtggctccaggccccccaggaaggggctgtaggtaaaccccagggaactcagtgtcttgagttgtcctggtcctccatctagagcagagacagcaaggcaggtatctggagtttctcctaaatgcactgggttctgacgaattatctgaacaatgatgagctggttggtctggtgttaatgggcaactagagacccaagccagtccctgtctccttcgctgacctgttgtatgctgaatttccactgtcatatccactcctctgggttaaggcagcattgttttcttttcttttttatttttttgagatagagactcgctctgtcacccaggctggagtgcagtggtacgatcttggctcactgcaacctctgcctcccaggttcaagtgattcccatgcctcagcctcctgagtagctattactacaggtgtgcaccaccacgcctggctaatttttttttcgttttttgtagtagaggtggaatttcaccatgttgcccaggctggtcccagactcctgacctcagatgatccacccacctcagcctcccaaagtgctgcgattacaggcatgagccaccatgcccagctgcattcttttcttaacaaacatgttttgcggaacactaaccttcatggcccttaaaaattaattctgctagtccatttagtttggggaaaagtctgctgtagctccttggaaattcataatgcacagcagcctatcgcagcctcagagaagccctgcagcaaacaaaaccatttaatttggcttaaccccgtatttcccaaacttaaaagaccttcctcttcttccagcctcacggataacccatggacccagtgctgggagggaatgtttcaggtgaccctggttaggtcccatctccagaaggctctggctatgaggccgtgctccctgctttcctggaaggtttcccccacctcatccacctgctttgtttcacagattgtcctgtgagttcctgagtgaccagagcctggagactctactggactgcttacctcaactccctcagctgagcctgctgcagtaagacgagagtttttcctatttcccggttccttgtgctcgtgtttctaaggctcctccatggcaaagctgtacctgccctctaacccctcaaccccccgcctttaccccctccaaccccctctacccgctccattctttccttaggttgttttatcattttacctggcacaactggggactccaatctgcttccagctccaccctaatactttgtcaacctcagggggcgtcgtttgcctcctctgcgtctcagtttcctcatctgacaaatgggattaatattccccgcccattcccccagagttgggactcaaataagttattctaaaatcaccttaagaaatggaagatctgtgacaaatgagctgtccaacttctccccacccacggagggtcacccactcgtagaaaggggctgtacagatgtaggtcctgtacttatcacatgctgctttttaaaggtcaccgtcaaactcgcaaaaagggaatttaagcagaattcccccaaagtattaaaactattttctaatttcagctcagactggttagaattttaaaagtatttaggccatgtgtggtggctcatgcctgtaatcccggcactttgggaggccgaggcgggcagatcacctgaggtcaggagtttgagaccagcctggccaatgtggtgaaaccccgtctctactaaaaatacaaaaattagcccggtgtggtggtgggtgcctgtaattccagctacttgggaggctgaggcaggagaattgcttgaacttgggaggcggaggttgcagtgagccgagatcgcgccattgcactccagcttgggcgacaagagtgaaactccatctcagaaaaaaaaaaagaaaaaaagaaaaagaaagaattttagaaggatttactttaaacagtcttctagtggtgggaggcggggtgggaagcagctgcagctaagatgaaaaaatacagcaggaaagtaaatcataatgttaataacatcggtgcaaaggctggggctctctgggatgtctaagatggctcgcatcacctccaggatctcgcttatgcttgggttttatctgggagggagggaggagacgtgacaacattccaggggcaagtacagcccagctcacagcaccccatggcaccctgtaatagtcccaccctgcccggagataatgagtcagaaaggactcctttggacataaaaggtggcaggttaaaattgaacaggttggaaacctcagaccggagaggaacttctctttgcctaaatcacacagcttcacccctgactcctcgtccgcctttggagtggcgtggccagcctgaccccttgccagggtttaaactttgtagtactcaacgtgtagtgcttgtggccctactgtgggccaggcattgtgtgacgacacagcagaaaaagttgaccatgtccttatcttcttggagctcctcttacaatagtgggagctgaaaaataagtaaagtaaaatcaaataagatgaacttagccagtgataagagaattttctcgggatgtggtgaagagtggctggagaggtgatttagatgtggcagaagccatcagggaacatctctgaggagggatgctgagctgggacctaaaggaagagagagagctcgccttgtgaagagcagggaactgcattccaggcagagggaacggcatgtgtgaggccctgaggcatgattaagcttggtgggctccaggaacagcgcggaaccgagacagccagagcacagtgactggcagggacagtcctaggagaggaggaagagagagatgggctcgggttgggttgcatggggcctggcacccatggggagagtttagacttttgttcctgggaacatgaaagggagaggaataatttgggttttctttctttcttttttgtgggggagggtctcgctctgtcacacaggctggagtgcaatggcgcaatctcggctcactgcaacctccgcctcccaggttcaggcaattcttgtgcctcagcctcccaagtagctgggattacaggcgtgcaccatcatgcccagctaatttttgtatttttagtagagacagagtttaaccatgttgaccatgctggtctcaaactcccgacctcaagtgatccgcccgcctcggcttcccaaagtactgagattacaggcaggagccactgcacccgttcctcatttgggttttcaaaagttcagactgagtgctgggtagagaatggattgggagatacgagtggaaatgagagtgggaagagatgtgtgcagcagggtgaagggtgctgggggctgatcactgctggggtgggatagaagttggtagactcagggtggatcttgagagtggaatttacagacaagctgatagggggattactggatgaggcaaatggaggtgctgaggctgcctctgagggcagagtggacccatctcactttctctaaggcagtggtttccaactgggggtgattttcacccttgggagtcatttggaaatatctggagatatttttggtggtcatgactgcgggtgaggggtgctgctactggcatcgaatgaatagagatctgggatgctgctgaacatcctatagggcacaggagagcccacaacaaagaattattggacctcacatctcaatagtgctaaggtttaaaaactgtgtctgaagggcctgaagcttcccactctctgtgagcaaggactcgcctgtgaaatctgtgcttgcaggtaaaaacaatagtaataataacagcaagcacaggtcccatgcccggcagtgcacctgcatgatgtaattaaatcctcatatacctcgagagtcatacatgacgagtcttgatttccagataaggaaactgaagctcagagaggtgaagtcacttctccaaggtcacacagccaataagcagaactgggactcaaatccaaatctgcctgtccctcagccctatttgtgcctcttgatcccctgcctgcttccctattgccttgctgagctgctagccctccccaccctccctttccttaccctccaggctagccaggttccttgtccactcatcttgccggatctaccccctttccttttcaggctgagccagacgggactgtccccgaaaagccccttcctgctggccaacaccttaagcctgtgtccacgggttaaaaaggtggatctcaggtgggcattcccctgggacagccaggactcgtcctgaagggttgtgcctggagtctggtgggtatgagggggtaggatgaagacagtaggacccaactagaggctgggcttccggaggaggggtgctggccccgtgggggcatcctgaggctgtggccacagctgtctgacccaggtcctgtctgatccaggtccctgcaccatgcaactttgcacttcagatccaacgaggaggaggaaggcgtgtgctgtgggtaagcccccttgaaccatgcctaggcagctagttgatgttggggaccagtagatctgcctcctgggtggccagagcagtatgcagactgcctaccacaaaacattcccctggaacaaccctgcagagggacttgtttcacccagcatgaagaaacacaggtccgggtgggatctactgtgggggtgggagcagtggattctggacacttccagagggtccaagcttgagtggagacccacctggagcccagaggctgtgccctgggctagccaggccggagggggtctcagtggccaaacgccccatcccctgcttgtcccctttacctccgtccagcaggttcacaggctgcagcctcagccaggagcacgtagagtcactctgctggttgctgagcaagtgtaaagacctcagccaggtggagtaagttgagggaggaggaggaaggagaggagcatggacgcatgcctgaggggcactgaagggggtatgagggtccgtgtgtgcacatacactcatgtgtgcctgcctacacctctcaggaccagctgtcagggatgcctgggtcacatacccaaagcttccctgaatcaattttctctctcccgcccccactctcgccatggtggagctagttccatggtgtgccctctgacttgggcagccctcagcctcaagtatgtgcaagctctgctggcagatgggggctaaaacgcaggattcattgttggcccagcaggtggttaaaagtaccggatgactctgcctgaggagggacgcagagccagccagggtggggtcttgcagtctcttgtattgttgagatgtggtatctgcgtggcctgtcttggatattcaaatagtcagcccctgcatgggtggaataataatagctaacagctactgagcactttctccactgttctaagtgcttgacatgttctttttatgtttcccatatccctggatactagtattgttctcattttacagatgagggaactgagacacagagggtgtaagaacttgcccaaggtcacacagctagtaaaatgcagagtccctgctcagacgcattgggaatccagcctaggaccagtgggaaatagagagagcagtccgccaaaaatgccacacaattttcatttctgttgtgatgtggcagagaagaaaaatgtgactgataaaatcatggatttcttttttttttaagacctggggtctcactctgttgcccaggctggagtgcagtggtgcaatgataggtcactgcagcctccaactcctgggctcaagcgatcctcccacctcagcctctggagtagctgggactacaggcacacaccaacatgcctggctaatagtttagttttgtaagagatgaagtctcaccatgttccccaggttggtctcaaacttctgagctcaggtgatcctcagcctcccaggttgctgagattacaggcatgagccgctgtgcttggaatgtattttaaacagatatgaataagaaatatgtctttgagttttttgtttttcattatagagggaaatttttcttttctttctttctttttttttagatggagtctttctctgctgcccaggctggaatgcagtggcgcaatttcggctcactgcaacttccgcctcccaggttcaagcaattctcctgcctcagcctcccaaggagctgagattacaggcatgagccaccatgcctggctaattttggtatttttagtagagacggggtttcaccatgttggccaggctggtcttgaactcctgacctcaggcgatccgcctgcctcgccctcccaaagtgctgggattacagccttgagccaccgcacccagccaatttttcttattttaaagactattttattaagtggcttcataagacagaccaatttttaaatgacgtttctcaggaaaagatgaaattaacaaacatcaaaaatgtcacagacctaggaggaaaatcagatgttccgggacacactggttatattatttctgaaactgtagttaaaactagctgggcgtggtggctcacgcctgtaatcccagcactttgggaggccaaagcgggtggatcacctgaggtcaggagtttgagaccagcctgatcaacatggtgaaaacccgtctctactaaaaatacaaaaataattagccaggcatagtggcacatgcctgtaatcccagctacttgggaggctgaggcaggagaatctcttgaacctgggagacagaggtcgcagtgagccaagatcgtgccattgcactccagcctgggcaacagagcaagactccatctcaaaataaataaataaataaaaccacagaatgctgcaatgaagggaagtaagaaacttcaggtgaggtttccaatattgatattgcattcccagattaaaagaagaaatctatgggtttaatgcatcctgcaaacatttttttttcctgaatttcctctcattcaaaaactgtggatcccaaatgatgccggccaagggcgtggtgaaggcaaattggtttttctttaacccttgaaagcctgctggaggcacctgagctatgagtggtcacccgatatggaagaggaccaagaggatgggtttactgtggtgctggggaggggatagtagcagagaacgtaggagttgctggtcattctagtggtgatggaagggatggtgatggtggtactgggcttggtggtgtagaattgtggtgataatgaaagtggtggtggtgatggtggtaatactggtggtggtgacattggtggtggtggtgatggtggtgatactggtgatggtggtgatggtggtggcgctggtgaccctgacatggggtccagtagcagtgacagtggatgcaggctcctggtgactgaggagcatctcaggctgaggaggcacctctgatccccgccactgctccttaccccctacagtctctcagcaaacctgctgggcgacagcggactcagatgccttctggaatgtctgccgcaggtgcccatctccggtttgcttgagtaagtggaaagcagcataaaggacagatagcaaggaggaaggctcccctaggccaaaagcatgatgggggctccttctgagggcatcccccagagcaccagaggacaaggactgtggagggcaaggggcaattcttcccttgccttcactcccctggccttgggtcctttcctctgtccctcacacccaccatgggcagatcctccaccaaacacccaagagaggctgtgattcgtggcagggtgacacacccctacagccaaactgacctggggacagggaagcaacattccatccccaaccagctgatgcgggattgcagctgcctggctcctggtccatcccgtccctgaaattcttctgacccaatctgtggaacataaatgtggagatgtccctgtggcaggcaaggggccttaggaagtcatccacatggttgccccatctctcccgtgacctgctggagtgacagccagctccaggacaccacttgttgctaggcaactgagcttcgtgctcgggagtccttgacccatgcggggctagagctgccagcctggccttgccagtgcccagaccccagaccacaggggcagcgggcagggtgagtgcagcgctcaaggactcagggtctggtgccagttctgcctgtgtggggatggtatccttctgggcctcagtgtgtccatctggagaatagatgcttagacatggaggcttctcttcttggaaatgacagctggaagggagatggagggggctgggcagggctccaaggaggtcctgccctcactcccattctcatctccatttcccttctagtctgagtcacaacagcatttctcaggaaagtgccctgtacctgctggagacactgccctcctgcccacgtgtccgggaggcctcagtgaagtaaggggatgttggtccccgaaaagcccctttctgctggccaacaggtgcccctggctgatgatgggagaagcaaggcacccacactttgtggccttccatctgggtggcttggagcaacctctgcctttctctgaatctcagggtttcctgggcatgggatcataatttctatcccctgatgcccgggtgccatggggaccatggaggccatggggtgggaaggccaggtattgccatgctcacagaatgagtttgggggtctcctctggttctgaggcctccatcctcccttgtccttgtgggtgcagccccgcttccctctctgtgccctgtgggtgccctaggtgcctaggaagctggcatgtctgggcaccgtgcttccccaggcccttctctctgcagcctgggctctgagcagagcttccggattcacttctccagagaggaccaggctgggaagacactcaggtaatccctgcagggtgatgggacaggggacagagaggggagaggaggctgaccctatggcggcctccatggccccctcttccctgggccctctcctcctttagagagcagcttcaagctcactgcctgggtctgttcctccagatctgcccccgatgccctggtaactccagtctcagccagggccttggcattgaacttgtgcctcttagcccaccatcctaagcccaactcagcccaacattctcttccttgccatgtcctgactacaggccttgaggcttctgagtgtcacggttaaagattttgaagccaactgaaaataaatccctgatctgccacttaccagctatgtggccctggacaagtaaaatggggataataacacaacctaccccttagggttattgtgaggattaaatgagttaataagtataaagtgccaggaaaaggtctggctcatgggagtgctgtcagcagttattgtaactgttattattattattattattattattattattatcattatcattacccctggtagccctgactcactgccacggccagttcctttacatgtcttacttcagctgtgaacagggcctccaaactgatccctgcatcttatcaggcctcctcccctccattcactccacagcccccagagggatcttcacaacacacatctgacagtgcccctctgctactctgtgcccctcagtggctccccattaaccccagggtgaagttcaaagtccctagcatcttctccctcacagtctgatccaactgtcaccttccaccatgttccttcccacctcccccacaccacacacacgccctacacaccaacccatataccacagatacaccaagcacacccaaacacaccacacagcacgcagcacacacaacacacgcacaccacacagcacacacaacacacaaacgcaccacataccatacacataccacatacacacacatacaccacacacaccacacaatacacacaccccacaaaaacaaaccccccacatacatacctggcacattacaaatacagcacacacaccacataatacctacaaataccacatacacaacacacacacacacacacagttcagccataaccttcactatttgctcctagatcaagccctgcctgaagattctctgcctctgctcacaccgcactcagctcaacattctcttccttgccttttctgagataaaattctcccaatcctttaacacccagctcaaacatcagcccctcctggaagtatcccagcagccctgcctcatcagagtgaactgccccgaggttcactgggccctttcacttggctgggcccgtctgctggccacccagggctgagatgcctggacagcagagccccacggagaatcccaggcacacctccctccccagggagctcagccagtgctggtccgggagagtaaggcagtggttaagagcttggggtctgcagtcagactgacctggatggaaaccagattctgcccttctttcttatctgctgtgtgtccttgggttagtcagtttccccacctctaattggtgctatgagaattaaaggagaccctgcgggtaaggcaggaagtcccatgcacccagaggctggcacagtgcctgacctagagtcagcctccctaaataacttactcctaatactttcttacagggggtgtgggaggttcctccccaaagagacaggaagctcccagagcaggagctgcatatttggcctctcaggccctgctccaggcctttgccctcagaggtgggatgctcccccaataggccctcagggaggctgagatgaagctgagcagcagtgcccacaggcctcacccaggctctgccctggctttctgccctcaggctaagtgagtgcagcttccggccagagcacgtgtccaggctggccaccggcttgagcaagtccctgcagctgacggagctcacgtgagtgacccacccagcccgtgaggacagcagaggggtgggggcaccctgccagagccacctcagtgactgacctctgtctccaggctgacccagtgctgcctgggccagaagcagctggccatcctcctgagcttggtggggcgacccgcagggctgttcagcctcaggtacctcctcccccgctgcctccgggaggggccatggcatgaatgggagcaggggtgggcactggagtaagaggcccccaggatcatggccccagtcatttcctgtacccacaaccctgccatctggaccctgagcaaaccctgtccatctgtcccagagactccacaaggcacacagagaaactgtccttccccacactggaggcctgtgctttgggatttaagaaaaaaagaaagaaagaaagaaagaaggtttcagaggatactgaactgaggacaaaaataaactgaaacgaagttcttgtctgtctgttcactatgatcattttaaaacactcagaaaaagaagataccgaagtagaaagaataattttttaaaactcctattcccagaacctaggtttgacagttgttcatactttttttatatttgcttctatttttatttttatttcagctgaagcggtttcaagtaagttatagacctcataatccatcactcctaaatatttcaccgtgaagctccaaaaaataaggacatttttttcagtaatcacagttccatcaggacacctaagaaactcagttagcgattccttagtgtcgggtactacctagtctaatctaaaatgtccccattgtcccccagataagacagctggcttttgggatccaggatctgtcacatctggtctgcatttgcacgggatggcgatggtcttctgactcttctaacctgcggcatcactgcccccatcccctcaccacagctttctgtttcatgtcagtgtctgttgacaaaatcagcaactgtgtgtactgcagactgtcctgctcctgactctggtggctttctcatgatgtcatggcacgtgttcctctaaccccgactttcctggaaactggacgttagatcaaaaggctccatgacattcagtttcatgtttgtgcccaaaaaacttacgtcaccgacagagctgtgcacttctcattgcagcctgtgacaaggcacctaagaactgactgttccccaaaataacctgtaaaaattattataaaatacacataacaaaatttgccatcttaatcatttctaagtgtaccattcaggagtgttaagtacatccacttttttgtacggccaatctccggaactcttttcctcttgcaaaactgaatctctatccccattaaacaacaccccatttcccccctaccccagcccctggcaaccaccattctgctttctgtctctatgaattggactgctctaaatagtttatatgagtggagtcatttgtatttgtctgtatttgtctttttgtgactggctcatttcattgggcataatgtcctctggttcattcatgttgcagcgtgtgtcactgtgtcagactttccttcctttttttttttttttttttttttgagacagagtctcactcttgtcacctgggctggagtgcactggctcgatctcagctcactgcaccctccacctcttgggttcaagcgattctcctgcctcagcctccggagtagctgggattacaggcgcccgccaccacacccagctaatttttttttgtatttttgtagagacagggtttcaccatgttggcgaggctggtctcgaactcctgacctcagatgatctgcccgtttcggccttccaaagtgctgggattacaggcatgagccaccacacccagccctttccttttttaaggctgcataatattccattgtgtggatggaccacattttgtgtatccacttatccatcaattgacacttgggttgtccattcaagtgcccaattgacagtccctgctttctttttttaaatattattttatttcaaaaacaatagagatgaggtctcactgttttgcccaggatgatcttgatctcctgagctcaagtgatcctcccacctcagcctcccaaagtgctaggcgtgagccaccatgcccagccagaaagtcccagctttcaattattttggttatatatccagaattgctagagcacccaaaataactttttttttttgagacggagtctcgctctgttgcccaggttggagtgcagtggtgcgatctcggctcactgcaagctccgcctcctgggttcacgccattctcctgcctcagcctccagagtagctgggactacaggtgcccgccaccacgcctgactaatgttttgtatttttagtagagacggggtttcaccatgttagccaggatggtctcgatctcctgacctcgtgatccccccacctcagcctcccaaagtgctgggattacaggtgtgagccactgcacccagccaaaataacattttcaaataaaacttttcttagtctaaaaataatattggttgggggaagtggcacacgcctgtaatcccaacactttgggaggctgaggtgggcagattgtttgagctcaggcgttcaagaccagcctggacaacatggcaaaaccccatatctacaaaaaataaaaataaaaaaataatatttaatcattgttgaaatgtgcagaaaatccagaaatacataaagaaaatagtgctttaaaaattcagcataactttaaagcagtaatatttgacttaattctcttttttcctactttcaaattaatgcacatgcattgtagaaagtttagaaaatatagaaaattaaagaagacataaaataaaaatcactcatgagaattctatcatcttaaacaaccaccatgaacatttaatatattttcctatgttttccacacatctctctccctgtttctttccacactttttttctccaaatactttcctttttttgaaatgcaaaattgggatcatgttttatatacagtttggtttccttacctttgtgatgtaacattatgtgaatcttttcttaaatctaaaaatatcagtggcccagtgcagtggctcacgcctgtaatcccagcactttgggaggccgaggcaggtggatcacttgaggtcaggagttcaagaccagcctgaccaacatggtgaaaccccatctctactaaaaatacaaaaattagccaggcgtggtggcgcatgcctgtaatcccagctacttgggaggctgaggcaggagaatcgcttgaacccaggaggcagaggttgcagtgatctgagatcatgccattgcactccagtctgggcaacaagagcaaaactctgtctcaaaaataaaataagataagataaaaaaataaaatataaaaatatcatttaaaaaataatattttctgtttggattgtcacaacaatagttgttggaataagggtgatgttaatttccttttttagattgatgcctacttgtataattttatagttttaaaatgagcaaaaaaaactcaaaaagcctctaggtcccccccttgacactcctcccccggccccgtcatgtgtgctgattgtctgctgctcaccttgggggggccttatctgtgtccccttctgtgacagggtgcaggagccgtgggcggacagagccagggttctctccctgttagaagtctgcgcccaggcctcaggcagtgtcactgaaatcaggtgagtccagagaagaggcccctttggaattcttcatctttcataagcattgggacttttccttgaccttccctcatcctgtggggtaatagctgtgtcaccagctagttttccatgtccccagggtagcaggagctcctggggcatatgtgaggggctacacatttgttgggactagtgcagtagtcaagccacagtgtcagaggaagacatccccagaatcaaaacaaagggctattggatccaggcagacatggctgggagtccacgctggttgcttggaagtggccccccagatgcagtaacacacattatggctcttcaaccagaaataacacaatgacacacagagtagcttatagcaaaggttttagcatcccactcagctatgttcagatcccaactcagtcacttactggttggagcccattactgtgtctctctgacctcaacctcctgctcttaaaagagtctaattacggccctttgcagggctgggaggattacaagaactggagcctgtaaagatgtctgctgtactgtcaccagccacacagcctgccctgcttcttccttctctcctccaggagtgagcaaggggatgctctggggactttataatctcccatagccctctccccataagcaccccatgaacataacattcaagtgaaggcagtgagcttagagcgcaaatgcagactccagacacatcccctaccccacccttccaccacactgtggtccttgtgcccctccctcagaaaattctggaactgcccttggatccctctaatggctttctgtcatggtctgaaaaggcttatcaacttattaactttaaattgttgaaaagggccaggcgcggtggctcacgcctgtaaccccagcactttgggaggccgaggcaggaggatcactgaagcccagagttcaaggctgcagtgagctatgatcgtgcccaccactgcacttcagcctgggctacagagcaagaccctgtctctttaaaaaaaaaaaaaaagaaagagaaaaattgttgaaaaggcactacttggggtattgtgtgtgactcacggaagcacctactttccagtcctaagctggtccctggcaggggagaaggggacccaggcaaagtgagagttcagagttggagccgggcagcccaggtgccagctaggccctccggggaaggctgcccgacctcacgttggttactgctcactcctcagcatctccgagacccagcagcagctctgtgtccagctggaatttcctcgccaggaagagaatccagaagctgtggcactcaggtgggacccagcaccagggaccccaaggcaggggctggtgttggggagggggcagggctgcttctgaccaatattcaccaccctgcccagagaccttaggggttcgaagtctttacacaggctacagaggtctgaccaacccacttctgaggcgtttcagccccactccaggccccagtctcagctccagtcacccccatgaactttcagttccccgaacaccatcttgcttagaccttagggcatttgcacaggctgtgctctctgcccagaatgttctcttcacgcctacctgcttcacctgcctaactcctcctcatccctcaggtctcagcttaaatgccaccacctcagggaggccccctggaccccaaggcttagtcaaacacttccattatccactcttatagatccctggattcacagcacctctaaatccatatggcacagtttgggaaattaaaatgtcacccttttgagtggatgcagccctgcatgtgtacattctgggaaatagagcatggtaggatctcagcctcacctcacctcctcggctgtgtgtccttgtgcggtgaacaacctgcacaaccataccagctgccccatctggactcctgcttcctagcacttctcataagtgaatagcaaactgtaggacttcatttgatcagcatttatttacccctacaccataagctccttgcaggcagatactgaatcccacatactggactagatgttccaaaactgtcgtctccctgtctgtgtccaggttggctcactgtgaccttggagcccaccacagccttcttgtcgggcagctgatggagacatgtgccaggctgcagcagctcaggtcagcgcctggaaactctgtgtggggccctgagttctctggttgaccctggtacctactccaggccatgtgtgaccctggcattctcacttccttgtgcaggagaaaatcacacttggccagtggaggggagggagagccccagggtggctcaggggagctcttgggtggccccttctcctctcttggcacccccttctggatgtgatgacctctgaggtgtgtccagcctgaaatcctctagaatatccttggaccttttcagcttgtctcaggttaacctctgtgaggacgatgatgccagttccctgctgctgcagagcctcctgctgtccctctctgagctgaagacatttcggtatgtagacaagacattcactcagtcccctttgcagctctgccctgccctgacacctcccgttattcccagccctgggctcagaggactcttactctgtgtcttactctgtggacacaaaccacaggtggccctggagatgatttttaggggtacctagtcgtaaacatgaccttaggaacattgagccacatggcaagaaagttgttccctttttaacactctttcattgtttttcttttaaaataactgcgaactaacacaaagtttcaagaagactgagaactgctgtgtgccatttacccaaattcacccttagagctgggcgtggtggctcatgtctgtaatcctagcactttgggaggccgaggcaggtggattgcctgagctcaggaattcgagaccaccctggacaacacggtgaaaccccgtctctactaaaatacaaaaaaattagctgggcatggtggtgcatgcctgtaatcccagctaattgggaggctgaggcacaagaattgcttgaacccgggaggctgaggttacagtgagccaagattgtgccactgcactctagcctaggtgacagagcgaggctcggtttccgaaaaaaaaaaaaaagaacaaattcaccctttgccaatctttttccacatttgctcatttcttccctccctccttctttcccacctcccttttctttcactctctccctctctccttttctgaaccatttagaagtaagttgtaatcatgtccctttacccgttaacatttcagcgaatttgctagaaataaggacattctcttccataatccagtaaaattataaaatccaggaaatgtgacattgatacactactattatctcaactacagtttatactccaatctcaccagttctcccaataatgttgcttattgcatttttttcccagttgtggatccaatccaggatcacacgtctcatttagtgtcatctctttagtgtctccttcaatctggaacacgtccttggcccttctttgtctttcatagcattgtctctgacatttacaggccagttattttatagaatgtccttccacttgggtttgtccaatgtttcctcatgtttagagttagagtctgccctttgggcaggaatatcacacaggtgatgctgtgttatcgtgccttccatcggggcacatgatgtgtcagagtcctcgggctagtgatgttaactgtgatcacctgtgacagtggtgtctgccaggtctctccacttgcaaatttactaactttccctttgtaatcaacatagattatgtggggagatactttaagattatgtattaagtcttcctcaaactctcattggcaaattttagcagccgttaataaatcttacttaaatcgatgaatcagcatgacagttgcaaaatgtagctttcctaactttacattttatttccatctaactgattacaccaagaagaaactcttgggctgggaacagtggctcaagcttgtaatcccagcactctgggaggccgaggaggaaaaatcgcttgagcccgggagttcgacaccagcctgagcaacatagcgagaccacccccatctctacaaaaaataaataaataaaataaatgtttaaaaaggaagaaactctttaggacagagagatctttgacacttcttcagtatttgctttaaagatgcagagtttgtaataaacaacagtaactagctaaactacagtgatacctaatcctggcttaagttgtgaagttgctacctgaatgactgcggtttaggaaatactgaactagtccatgcttctgcttccaagctctgtggtggcttaatgagttcatggtggaagagatttacgaagggaaggaggtctcctcacattgcccgccacatccctaccccacatccttgccctctgccaccagcattcagagctcccaagacccagggcggctcctgcctgacctgttgccctttgacccccaccaggctgacctccagctgtgtgagcaccgagggcctcgcccacctggcatctggtctgggccactgccaccacttggaggagctggagtgagttgcagagtggagggattggggacaagtggcccagctgagggtgaggggtggagaagagagcagggcgtttgggagggcaggcaatgagacttcaaccaatgacccttcccctgatgaagtgcagcagttctgggtgtggcctggggaaggaagagcaccacagttttggtctgaatttcgccactgactcacagaggggctgtgggcatggctgttccactctgggctttgattgccttatctatgaaaatggggctcatgagccttgctctgctgggctggctgtgggagtcaggctacggagagggctgaagaacaagagggtgtgtgtgtgtgtgtgtgtccctagtcccccagcttcctctctgcagccttcatccagggcatagtttctcagctgggccagctgtgactatcatgcctacccagagcctgagccctggagctagggatacccatggggaacctggacagcgagggtggcccagggcatgcagatgcagagttggcctcccaggggacagagcaggagaggggagctgacaggacagctcagctccagggctgggcaggctgcgctaacccttgcctctgcctggtcttctgcagcttgtctaacaatcaatttgatgaggagggcaccaaggcgctgatgagggcccttgaggggaaatggatgctaaagaggctggagtaagtagtgatggtggttgtgggtgagtgagtggtgggggtggttaatggatggtggaagtgggtgagtggtggggttggttaatggatggtggaagtgggtgagtggtggggttggttaatggggaatggggtgagtgagtggtgggagtggttaatggggaatgggctgagtgagtggtgggagtggttaatggggaatggggtgagtgagtggtgatggtggttaatggggaagggtgtgagagtggtgatggtggttaatggggaagggggtgagtgagtggtgatggtggttaatggggaagtgttgtgagtgagttgtgttggtggttaatggggaaggagatgagtgagtggtgttggtggttaatggggaagggttgtgagtgagtggtggcgttggttaatggggaagggggtgagtgagtggtgatggtggttaatggggaagagttgtgagtgagtggtgttggtggttaatggggaagggggtgagtgagtggtggggttggttaatggggaagtgttgtgagtgagtggtgatggtgattaatggggaagggttgtgagtgagtggcgttggtggttaatggggaagggagggagtgagtgatgatggtggttaatggggaagggttgtgagtgagttgtggggttggttaatggggaagcgttgtgagtgagtggtgatggttggttaatggggaagggttgtgagtgagtggtgatggtggttaatggggaagggggtgagtgagtggtgttggtggttaatggggaagtgttgtgagtgagtggtgatggtggttaatggggaagggttgtgagtgagtggtgttggtggttaatggggaagggggtgagtgagcgatgatggtggttaatggggaagggttgtgagtgagtggtggggttggttaacggggaagggggtgagtgagtggtggtggtggttaatggggaagggggtgagtgagtggtgttggtggttaatggggaagggggtgggtgagtggtgatggtggttaatgggaagggagtgagtggtgatggtggttaatggggaagggttgtgagtgagtggtgatggtggttaatggggaagggggtgagtaaggggtgggggtggttaatagggaagagttgtgagtgagtggtggggttggttaatggggaagggggtgagtgagggatgacagtggttaatggggaaaggagtgagtgaggggtgatggtgcttagtgctgcatggtcagtgagtagcatgcctaggaacctttgcatgttttgtgaacacaaaccgccatgtttctggatggacccaggtgagctgaatgcccttacatgaccttttactttctattctggatctcagtgccagcaagaaccttggtcataggaaacagaatacacaactcaaagcaatccaagacagaaatatattggcttatgtcatggaaaattacgaggccaatgacttcaggcacagctggatccaggggttctatatttgtcaggcttctctctcacacacttcactctggcccttactctttctctgtccaccttggcttccttctcaggcaggccatccctgcacctgcaggcttactttctctcagcttagtggaaagggagtaccattctctctgtggttacaacaaaaggtcctagactgagtctcactggactagcttgagtcacctgccccaccctaaagcaatcactgtggctgtgagcacaaaatattctcctcactggccagacctgggcgcatgcacaccctatcttctggacttagaggggtggtatttcaggatgtgagtaacagaagaggaaagaaactctgggcagaaaaaaatctacagatgtccactacatttgtctacagttgtttccttggtaactggcagcttttactactctcccccataatttgaagtcatcaaattcttagaaatgccagaaacagcctcagtctaaaagacaggtccccgtcctgcacagattcctgtttagacagtatctggacagaaaatttaacagaatatcttctgcttttcatctcttaactttttctgatgaccaaaaaagttccatctttctagaaatatgtaacaaataacatgaaatgccccggggatgacaccccctgagaaaacttctgttgaacggtttgtgaatttttctccagatttttttttctacatatgttttgaattcagcttgaaagtagccttttgactttttgccccttaacattgaaattcttccgcttgtccctctttgcttgtcctggggagaggatcaggtaaaaggagaagagggattacagagacctttgaccacagggccctcctgtcgtctcactggtctgtttctttgcccactgtccatgtacctgcatctcggctcagccttctggaagcttttatttaggggattggaggcccagtgaggtcattcattggctcattcatgcattcgacaaatatgtactgagctgggcacctgggccggggacaggacagattcatccatgcccctgggggcctttttcttcctcctgatttcccaggcaccatgtgctgctccttacctcctgctgccttagttgccctatctgtaaactgggcataatatcttccctgtccgaaggaaggggatggatcgtcagtgcccggaggtctcttcccatctcagatctgtcatttccaagtgtaactccccacaggcagttaccctcaaatccagtcagcttcttccagctgtatacctgtgatggagtgggtaggagcatggaccctagttaggagcctcactgcctgggttcaactctgggtggggtaactgacacttccagtttgcttggagctttccccattttggcacccaaagtcccacatccaggaaaaactcttctgttctgagccaaccaagacagttgaccatcttttgcttctgcctcttattttattatttatttatttgagacccagtctctctccgttgcccaggctggagtgcagtggcacagtcttggctcactgcaacctccgcctcccgggttcaagcaaccctcctgcctcagcctcccaagtagctggcattacaggcacatgccaccaggcccagctaatttttctatttttagtggagatggggtttcactttgttggccaggctggtctcgaactcctgacctcaggtgattcacccgccttggcctcacaaagtcctgggattacaggcatgagccattgcgcccagccagttctgtttcttaatgtgtgaactcgtgccagtccctcagcctctctgttctttggcctcctcatcttaactttgaggataagagcaatctcccctgctacggttgttgtgagtattaaatgagataatatgtgttacagtcttagagtctggtcagagttcacactctacaagtgctagctattgttattctcctctcctgcctaggctgggggcctctagaagtacaatcgcctgggtcacatatggttggggctcaggaatgggagttctatagtttttggttctgttcctgaagcagccactttgtgtatgaccttaagcaagttctctaactctctgaaccttggtgttcctcacctgtaaaatggggacgataataaacccacctttccagatggccccaagccctgagtttggcccacattttatgatcaatgtgtgaccgccattattacggatcattagtcttggtccatgtggttcagaacatagaactgctgcctgcctgacctcagtaattcatgcagagaaacagcatttggacctcccagtacagttcattttgtagaatttttacactgtgtggatataagtggctgtcttggaggtccctaggcttgctaagcacagaggcctcagacccccagactggacagtgccccacccccagatgtcaagttcacctggcctcctcttctccagcctcagtcaccttctgctgaacagctccaccttggccttgcttactcacagactaagccagatgacctgcctgcagagcctcaggtgagtgaccgagcggccccatgggaatgagtgggaagaaacacttcccactcagttgggaccacatccagggaagcactgaggccacctcccaggggatcctttgcggatccctcccaggcccatccctgtgccctcccaggtgggtgcccactgctcttgccttctaatgccatcagcttcctcctggttacaaaagtggcctaaagggcttaggcccacgtcgtagaacaacccttgaggcacacacacagttcaccctgggctcttgttaaaatgctcattctgattccccaggtctggaattctgcctagactgtgcttttttttttttttttttttttttttttttttttttttttttgagttggggcctcactgtgtggcccaggctggagtgcagtggcaatgcacaggtgcaatcgtgttgcactgcagcctcaaactcctgggcgaacgtgatcctcctgcctcaccctcctaagcagctgggactacaggcctaaggcgttgcacccaaacttagcatttctttttttgtttgtttgtttttgagacagagtttcgctcttgttgcccaggctggagtgcaatggcacaatctcagctcactgcaacctccgcctcccgggttcaagcgattctcctgcctcagcctcccgagtagccgggattataggcatgtgccaccacgcccggctaatttttgtatttttggtagagacagtgtttctccatgttggtcaggctggtcttgaacgtccaacctcaggtgatctgcccacctcggcctcccaaagtgctgggattacaggcgtgagccaccacgcctggcttcagactctgcattttctaacaagcttccgggtggtatcaattctgggggccacggtcagcactttgagtagtgtgggtctagactcagatggggtggccttcctacactccctttgtgatttcactccctgctgctaggataaataaacatgacacttactttcaatgtgatttttcaaaacatgaaatcttgtgactaaaaacaaatccaagcagtgacacaaagcattgctttgtttatatccaagtacacctcctaccccctacctcgggcagagcagagtaggtaggaaatgaggttagagagttccaggaggttatatcatattggaccatttcacccaaaattaatttactgaaaggtgatccattaaagtgtatttatttatttctattttatttttattttttgagacacagtctcactctgtcgcccaggctggagtgcagtggcatgatctcacttcactgcaacctctgcctcctgggttcaagcgattctggtgcctcagccgcccaagtagctgggattacaggtatgcaccaccacgcccagataatttttgtatatttttagtacaaatggggtttcaccatgttggccgggctggtctcgaacccctgacctcaaatgatccacctgcctagactccgaaagtgctgggaatacaggtgtgaaccactgctcccagccccattaaaatttaatttgcaaaataaaagaaagtaaaaacaacatgcaaacaaatacttcccaaggggctaagaccatttgcctcagctatttattgttttttcctacccaggcagagcaaggtcagggctcagtaaagacaataccctgggtttaaggaaaaacctaccatttgcatggatgagaacacatatgcccctgagaactgatctgcgtgaatcagagaatcccacgtgaaagtggcattcagccgggccagcccggagatccctgacacagaggctgaggtgaagcttggcaaagaaatgtagagactcctcctgggccaggggctctggatttgtttccacccagcctgcaagtccctaagtctctggccagtcacagctcactgctggctctcaagttttctcacctggacactggggacaataattcccaccttgctcaccactccccacctgccatgacccccagaagttttgctaccagcatatgaattcctgggcgtgtaaggctttgcaaactgtagagttcttagcacagcacctgcaaaggcctttaagctcctgaaagcctcttggtctattccctgcttttccagactgaacaggaacagtatcggtgatgtcggttgctgccacctttctgaggctctcagggctgccaccagcctagaggagctggagtgagttgcccattctgcccccagacccaggacaattttggccgggaaagatgacaagggcaaggggctacctgagcacgccctttgcttcttcatctcatctccttcacccacttctacactgtgtaaacaacctggggcctagaagcttgggggacccaaagacaggatgtaagagtgtcaattgtagcaagagggatttaggtcagacaatggggagaacatcctaaacagaagccaagggttaggagctgtcactcaacatggggtgatggggctctctgtgtgagtcgaggcccttcctgggacttcagcctccccttctttttctgggagtggggtgtggacaagatgagacggcagaaggctgatgaagctgttttctcccccaagcttgagccacaaccagattggagacgctggtgtccagcacttagctaccatcctgcctgggctgccagagctcaggaagatagagtgagtagccagccctacagaggagggccacaggggtcacacgatggtcctaggagatactggcccctagctgaggccagcatggtaaaatctcccctgcgccaacctcagtgtccaggcagtggggctcggtgacctcctggccctcactgcgggaccttaagccaccccagcccctgctcttctctgggcctttctgcctcattgtctgggtaggtgtgtggtgtcggggggttgtctcttaggccccctgaagcaggggtggcagacccagcagatgtgctggggtgtcggggagagggggcatcagaggacctgatggctgcccccctcccacagcctctcagggaatagcatcagctcagccgggggagtgcagttggcagagtctctcgttctttgcaggcgcctggaggagttgatgtgagtgtctgcccaggtggcctctgccctctgtgccccccaggtccacctggcctcctctcccgcagtgggcacagggcagggcgggggtcccgagtgggcaggcccagtactcaatgctcattcctctcctcttccaggcttggctgcaatgccctgggggatcccacagccctggggctggctcaggagctgccccagcacctgagggtcctacagtgagtggccccctgcccataccatgcagggctggtggggaggagggtcctcgggagcagtgggggggtccaggcccccatcagttgagctgccctgccccaagtcaagcttggcatatacccactctcctgcctgttccttccctgcctctgatgtctgcagcaagaaaatcaggaggcccagcctagtcctggctctgccactggcccctgcctgaccttggccaaacccctgccccttctcagcctcagtttcttcacatgcaaaagaagtacaatgatcccagttcattgtgccctgtgagcgggtccctgagggcgaatgagaaatcctggcagagggcttcgcaggagcacggtgccaatcaacgtggcctcagcacttcacaaatgacctcattgcagccccatggcagcccccagagtcccagagtgctgggaccttgttttttttttttttttttttttttagatggagtctctctctgtcacccaggctggagtgcagtggtgcaacctcggctcactgcaacctccacctcccgggttcaagcaattcttgtgcctcagctaccagagtagctgggattacgagcatgcccaccatgcccagctaatttttgtatttttagtagagacggcatttcaccatattgcccaggctggtcttggactcctggcctcaagtgatccacccacctcagcctccaaaagtgctgggattacaggcgtgagccaccatggctggctggtgctgggacttttatgtgctcccttttccaggcaagggaatgaaggccaggagaggtgtggagaattttccttactcatacacgaaggacccaggtgttgaatttgggatctcagaccccaaagccagggtccttgatacctacccaggtcctgtgtggatggggaattagccagagactgtctacgggctggcactgcagcctgagacaaggctgagggtggggctctggaaacgccagtccctcaggctcctctcaccctctcctctttccccagcctaccattcagccatctgggcccaggtggggccctgagcctggcccaggccctggatggatccccccatttggaagagatcaggtaagtaggggctgcccagcccaggcacggggacagtcctgggcgggtctgggggttcctctcacaggtatctcccctaccctgcagcttggcggaaaacaacctggctggaggggtcctgcgtttctgtatggagctcccgctgctcagacagatagagtaagtagcctcccctgcctgcctaggggaccagtggcaggctgagggcagcccttctctgactgagcctaacacctggggaggcctttgaagtgatagaagccccagggatggtgggggcctggctcaagaaaggaagtctttcctaaaacgcctagcttaccccagaccctggtggctctggaggcaggacctgctagatcccctgactcaaacaacccccatcccatcccatgcccttctccatccccagcctggtttcctgtaagattgacaaccagactgccaagctcctcacctccagcttcacgagctgccctgccctggaagtaatcttgtgagtgattggaagagccctgagctggctgggaaaaggaaaagtcgggaggggtcgggggagttggctccagcctgctgtgtggcctggagctgctcccatcctctctggccagtcctcccatttgtaaatggggaagatcatccttactcagacatcctctcaaagacattttaacacttgagctgcaggtaatgttgggtaaaacagtttaccttcttctgcctttttccccatttgtagattggtgggaggggaggtggaccagatggtctttaaaggtttttggtccaaccttccttttgggaggcaactggatagaccaccttgcctgcttgatgaaacctccatttatgaaccacagttggtagaaacagtggctaaagccaggagaaagccacccccagacctgctggctggccgtgcttggctgtctcttagcaatcagaatcccccagaccttggggctttgcagtgctgcctcatgagtaaactagaattctaggactagcctgggaccctaaccatggtatggaggacaaagctgtttcctaaagaacaggacacaagtgattacgagaagattttagtttgcatcctaaaggtcttaacccttctcattacaccaaagcgaaagtctcagatcagtggtaattcatctttaacacctaacactggattctccctttttaaccaaaagggttaaaaacccaacatcttaggaagggcatatgttccaactagaagttaataccattgtttgtactatatttatttttgtaactaccttctatatggagtctgtaacacaagttttccattgatagtagcaataaaagtttcctttcaagatttttttttttttttttttttgagatggagtctccctctgttacccaggctggagtgcagtggtgcaatctcggctcactgcaacctccacctgccgggttcaagagattctcctgcctcagcctcctgagtagctgggattacaagtgcccaccaccacacccagctaatttttgtatttttagtagagacaggatttcaccatgttggttaggctcgtctcaaacacctgaccttggcctcccaaagtgctgggattacaggcgtgagcaaccacgcccagccaagattaattttttaaagtaagaaaaaagagggggccaatttaaagaaaaatatgatgcatcttaaatacaggaggtacatgtatgtggcaaaaatggcaacatcttgtgaacaacgtcatgattcaaacttgacggggaggggagcagggaggaaggtaacctgcaccctgacgtcttcaggggaggacacacaagcaccctatcaggtggcctctcttgaaaacccttgcccccacgactggcaccctgctttccccattcactgccttgtctccacccctcgacctccttgctctcctgccgctgactttgggacccctaccctgcaggctgtcctggaatctcctcggggatgaggcagctgccgagctggcccaggtgctgccgcagatgggccggctgaagagagtggagtatgaggggccgggggaggaatgggacgggctaaagggggacctacatcccgggaacaccaagaggccactgggtcagtcccctgcctcccagaaagcccttccttgagttgcacactctggcctgttccaagcccctgccaggcttagttccccctgggttctagccttcagccttcctgctgcacctgccaccagtcccctgttgtcttttgggttccctgagaaggtagtgtgggagactgtgtcccctgaccttggcctgaggaagggacctaggaaactctcacacccattctcatggccgtgtttctctttcccctcccctcactgtccactgagaagcctggagaagaatcagatcacagctttgggggcctggctcctggctgaaggactggcccaggggtctagcatccaagtcatccggtaacagaggcctgcaggggcagggatggtgggtgggaggctacaccaacccccagatctaatgggactccctggaggaggcggcagggcctgggctggggattatcaaaggagacttggaccactccaccaagaatttggcagcaagcagacttggatcaaaccccagctctgccacttgccaactgtgtaactttgtagccataactcaacctctctgaaccccaattttctcatctgtgaaatggggatactgatagtatctacctcagagagttgtgaagactaaatgagcatataaagcactgaacccaatgcctggcacatagtaagcacttaaaatggcagctataatcagagccatcacatacagttgtataggttgtgcactgcacaagggcattaaacctaaggggcaccattcacattgtcaacctgctagatttctagcagatgagagtaaagtaccttgttctaccaaaatcatatattatgacaatttcagacagatggaagtaaaacatcttgaagaaagagggtcttttccttatttgcacaaatgtgtcatatgagtgtggccttagctggcatcactatctcccagggaggaaggttgagttggaggactcaggaggcaggtgtggggtacaccctctccctaggtcagctatgctggtctaacacctgcctctgccaggtaactctaggcacagctctacctttttgggcctcagcctcccaatctgcagatacgacagatggcaaagatgggaggatgaatgagtgcctatatctgtgccccacagcctctggaataaccccattccctgcgacatggcccagcacctgaagagccaggagcccaggctggactttgccttctttgacaaccagccccaggccccttggggtacttgatggccccctcaagacctttggaatccagccaagtgatgcacccaaatgatccacctttcgcccactgggataattgactcaggaaagaagagcctcggcagggcgctctgcactccacccaggaggaaggatacgtgtgtcctgctgcagtcctcagggagaacttttttgggaaccaggagctgggtctggacaaaggagtaccctgcattacgtgggatatgtgtgatcaattggggacatgcgacacacaatgagggtgtcatgacaatgcatgacacgtacggttatatgtggcagtgtgaccccttgacatgtggcgttacatgaaagtcagtgtggcacgtgttctgtggcatgggtgctggcatcccaagtagcaggatacatgattgttggtctatatatgacacatgacaaatgtccatgtcacaggactcatggctggccagatgacctcaggctggcccaagatctaatttattaatttttaaagcaaatacatatttatagattgtgtgtatggagcagctaagtcaggaaaagtcttccgcccgagctgggaggggagagtgtccatgcactgaccagtccaggggctcaagggccagggctctggaacaagccagggactcagccattaagtcccctcctgcctcaatcctcagcctacccatctataaacttgatgactcctcccttacttacatactagcttccaaggacaggtggaggtagggccagcctggcgggagtggagaagcccagtctgtcctatgtaagggacaaagccaggtctaatggtactgggtagggggcactgccaagacaataagctaggctactgggtccagctactactttggtgggattcaggtgagtctccatgcacttcacatgttacccagtgttcttgttacttccaaggagaaccaagaatggctctgtcacactcgaagccaggcttgatcaataaacacaatggtattcc

SEQ ID NO: 15692 - DNA, 58870 bp, Homo sapiens
acgtgatttctcggcagcagccgccagttccatgcactggcggagcagctctaggcggcggcttctactttcagtttcgtgcagagcgcggaggagccgcgagcgctgagggtgagtgccgggagctctgagggtgagtgccgggcgtgccgcggggctgcgggacccgggctggggcgagcggaagggagaggatcggggttcgaattctgcacggagaggggtggaggggatgtcagaggccctggagcgggaggtgcgggtggccgggtggctggccgatggatagctgggtaagcggacagggcgccagtggcccggcagcgcgcacagcatgcgccccggcagtttggaggaagagttgccggcccgcagaggatggcagatgagggtcgcctggatggggggacacagtaagcggctgtgctcccctccctgcgcagctcctgtcacctaccggatccacccactctctctgtcttttactttgcaacttttcattgattttaaaacaattacggaagttacactgttcattgtacgcaatttagactttttggcctaaacaactttttattgtggaaaattccaaacatatacaatagtagaaggaatagaattaggttgagccttctgcacctgcgggttttcatataatgaagccccacctatccacgttcagcttggacagtcacgaccccaaggccacctactcacgaccccaaggccacctaggtagcccaatctccaccgctggttattttgaaacaaatggcagacagcatagcatctcaactgaggtatttcagaatgtactaaaagataaggcatcttttaaaaacaaaaccacagtaccaccagcatactacaaacattttaatagttattccttaatgtcaaatctccagattatttctaaggaacatttaacctcataagtgataggtgaatacgtgggtgttgttttgttacttgctttctgcattcccatgtggttttcggtcactattctcacccagaaagccaggacctgaaactggctggggtgatcattcgaggaggtcggaagaggctcctaccttcagtgccgtttgcgtccattttataagttggagttcttatgtttccttttttaaaaggttgaagtttctgcagacctaaaaagcagtttgaaaactggcagttcccagcctctaaaacccgggggtagcaggaggcagagagtaccccggggccagatcctggagcctcattgtcccttcaaatcaccttccgtttctctaagggagaaataaaccttgaaaagccatgggcttttcagatgtatctagatgtatctgatgcttttcaggtgtatctagactcccatccagcgtgctttctgcaaaacttactgaaccatagcccagaatggccatccatgatgcccacccgccttgtctcctgaagcacattgccaggtggacctgcacatggtgtggacggcagacagactggggctctcaacaactggtatttgctggatgaccatgaactaaccattcaatttctcgaaactttggtttctcgtctgtaaaatgaacatatgcaaatctatcctacaaagtgtgttttgtggattgaatgagatgatacacgcccacccagtgccttgatcaaccttaaaatgctgcacaagtgtgaggggagatggatccttgaagaagacagacaagcagaggggaaagatcttggaagagtttcacaatatgctgaactttattcctggatcagatacagagctgtccgggtgtccacagggccgggtcagcctcctcagaccccaacacacataccctcttcccctctgaggaaaattcagcaaaacttcttttgctgttgttgttctttattccttttttttttttttttttttttgacgaagtctcactctgttgctcaggctggagtgtagtggcacgatcttggctcactgcaacctccatctcctgggttcaagcgattctcctgcctcagcctcccgagtagctgggattataggcgcccgccgctacacccagctaatttttgtatttttagtagagatggggtttcactatgttcgccaggctggtgtcaaactcccaacctcagatgatccacccgcctcggcctcctgtgggattataggcgtgagccatcttgcccggactcctttttttttttttttttttttttaatagacatgaggtctcaaactcctggcctcaagtgatcagtctgcctctgcctcccaaagtgttgagattatgggcgtgagccaccacacccagccataacttcttagcatgacttttcccatttgttatgagttcaattgtgcctccccacaaaagatatgctgaaggcctaaccctcggcgcctcctaacgtgaccttatttggaaatagggctgttgcagatataactggtgaagatgaggtcatactggagtaggatgggccttgaatccaataggaccggtgtccttataagagaggagatggacacatgaagacagagacatacggggatcagacaatcatggacggaggaggaagagagtgcggcgatgcatctaggagccacaggacacctagaatggccagcagccggtgggaaccaggagaggcaaggacggatcctctcctccagccttcagagggagcccggccctgaccacacctcgatctcagactctgacctccagaactgcgagagaagaaatctcagttgttttaatgtacgcagcttgtggcactttgtgacagcagatacagcagtactgtgacaacactaggaaacgaatacaccatcccagcatctctgctctgttttccatacagaattgaactaaggaccaggcaagctaatgcaagtccaaacactgtaaaaactttggaggcaatctaaggatgtgagccagatttgtttgccagatcttttttattttatttatttatttattttattttattttttttttttagtgagagggagtctcactctgttgcctaggctggagtgcagtgatatgatctcggctcacagcaacctccacctcccaggtttaagtgattctcctgcctcagcttcctgagtagctgggattataggcacctgcccccatgcccagctagtttttgtatttttagtacagacaggatttcaccatgttggccaggctggtcttgaactcctgacctcaggtgatccacctgccttggcctcccaaaatgctaggattacaggcatgagccaccaacacccagcccatatattcatatttttaatggacttatacatgaaaatggtatctcacttttaaaaataaatgatatggaattatgcgttaaagggaaattaaatcttattatatcatgttttaaaatttttaatttttcatagctaatacatttatgtagttttaaaaatgtaaaacatttggaaagatataatgaaaaataagtctccttccatctcctgtctcccagccacccaattgccctccccgaagacaaccaatgttatcaggttcttgtgtctccttccaaagacagtctaagtgtgtttttacaaacatggatatatacatatatatatacacgtatatatgtgtatatatatatacacacacacacacacacacatatacacatatatagacacacacacacatgtgtacttttcccttctcacaaatggcagtgtactatatgtagtgttctctaacttgggttttttttttttaaacttagtgcaatttggaaatctttctacatcaaaattttaaaatctgccctttccctctttctttttaacagctgcctagtatttcaccgtatgactgctctgtaattgatctaacagttgtagaacacttaggttatttcctgtcttttgctatttcaacagtgctgtaatgaatatccttggtcaggcatcatttttcatacgtgggagtgaatctttaagaaaaccaggagtggatttgcaaggtcaaggggaatatgcagtttgaacttggataaataaggcaaattatccccccttaaatgttgtactaatttttgctcccaccagctggagggggaggggccaaatttccatatttgcaaatctgggagacgaacaatggtgtgttttttatgcctcttattacgaatgagtttgaacatcttttcaaatatttaagagtcacctgtagctcattttccataaactgtcagttcatatcctttgcccacttttttattggcttttggtctttttcctgttgagttgtaaaagcacttttcatgttaagggaatttgctctttgtctattatatggttatactgtcatttaaaatggtggcatagttgcttatagaatgtctgaaccatatgcgtcattgttagatatttatattgggtctcattttcttgtattatatatgggatgttttccctgttttttgtaaaaaaaaaaaaaaaagcaagatatgacattttaattcttccaatagttctcaccataatggtgaaggaaaggaaatacgtttgggaaaatacttcgataggatttggggtggctggaacctgtgtgcaaaatggccaacagggaccaggaccattttgggtgggaagagagtgctttgcatggtgtatgtgtatggggcggaggggctgtatttgctcctgaaagaaaagggggtggagggaggggagaagaaaggaaggagagaaggtggagggaggttagccacagagggagatgactcccagaaacttcttaggggaaggatggcaaaagggcattttcggtgagtccaggaatgccctctgctccgtgtgaggcaggtaccagcactgcagacaccggctctggctcaccacctgccatcatgagtgcattcagcttctccactgagcttccacacaccaggccctgctctaggcactgggctacagccgggaacacaaccaactccctgccttgtggagctgatgaggcagtagaaacagacaaacaagtaaacaaagatgtgcatgtcatatgaggtcaggtggaagtgactgcagtgaagaaggcaaggcaggcgagggtggagcatgctggatagagaggcagatgtagccttcttgtagggatgttgggacatttgagagagaacttgaagggagcgtggcagggaaccatgggccatggcatctggaggaagagggaaccagtcagaggggatggcaagaaacaaaaaagtggggagaagaagaaagcagagaagaggagaggagggagaagaggagaaaatgctgcttaaagtctgcttttgtgctcccagatgctcattgtgaatgacatttttgcaatttttgcaattttgttttgtaatttaataatgggctgggctgggcgcagtggctcacgcctgtaattccagcactttgggaggctgagatgggcagatcacttgaggtctgcagtttgagaccagcctggccaacatggagaagccccgtctctcctaaaaatacaaaaatagccaggtgtggtggcacgtgactgtaatctcagctactctggaggctgaggcaggagaatcgcttgaacctgagaggtggaggttgtagtgagttgagatcgtgccatgctctccagcctgagttacagagggagactcggtctcaaaaaaagcaacaaactgcttgaattaaagcaggagccctcagctagaggagtgcccacccacctcctccccaggaatcgcagagctcccaggagaggccatagcctcctataggtcatggcattgcaggtgggttggtgtcccagctggctgtttctgtctcaagaaaggaagggctgctcccgctgacatccaggcgtaagcaacgccctggtgaacatcctcgtagctagagctttgctcacattctggatggcttccttaggctcaatcctcaaagtggactcctaaagggatatatgaacttttattttttaaatgtttgaaaccgtgttgtcaaatttctctcctaaaagattgtgccaatgtagagaggctgccgaccgctggaagcttcccaatcccccagcacctatcccttgtgggtgggatggatcctgtaccatcgccagaccctcaagaaccccttgtcctgcacggtcccttctgtccctcctggtgaaatggaaggagcatgcatgccttgggaagctggtgctttgaggcattcagatcttaccgtggcatcatgtttgaagagagaaatagcttgctgttttgtgtgtctctcaatagtcttattcactgagttcttgaaggtgtcctgtgtgtttctggactgcagaatccttttattgaaatggacaggtcagtgttttcccagagaaagacctatccagtaggagttcacaagaggattttaggaggtatgtggagagggcatccgattccattgaatcgtaaagtgacaaatttgttcccttttcagttctttttcattcttccagactagtgaaagagaaagcctcagtcaggtgctaacgcatctgtaaacctctcacactcttgatattttcagcaaggggaggccaggcctccggtcagagccctgggtctgcagcaatacccagctacagttcaacagcatcatagtgttttttgttttccttggctttctttctttctttttttttctagacaaggtctcactctgtcacccaggctggagtgcactggttgcacagctccgtgcatagtttcctgcagcctctatttcccaggctcaatcgatcctcctgcctcagcctcccaagtagatgggactacaggtgcgcaccaccacacctggctaattgttttttgtttttatttttgatagagacgaggtctcattacgttgcccaggctgatctcaaactcctgagctcaagcagttttcctgccttagcctcccaaagtgctgggattacaggtgtgagcctccatgccccacccttgagtttcttttcgatgataccttcagttcgtggcaagtggtacttcaaaaaataaagttaaaagtgacatggtttctagaaaagctttaaggaaatggtgttctggctttcagataagtcaaaaaaaatctcaaacatgagtaaagagttttggaaattatacacttacccctagagggtgagtttgtgggggaaatttcataatgtatacttccagaatatttagaactttccaaatgagtacaggttatgttcgtaaacaggaaaaataataaagacataataaaatgataatttagttttaaaagacgaccatttgttgaaagcagtattatatttcagttaggaaatggcctctggaatcagcatagattttattgttttatttattttgtttttgagacagtgtctcactctgttgcccacactggagtgcagtagtgtgatcacagcccactgcagcctcaacttcctgggctcaggtgatccttctgcctcagcctcccaaatagctgggactataggtgcacaccactatgccaggctaatttttttgcattttttgtaaagacagattttcaccatgttgccctggctggtctcgaacttccaggttcaagcaatctgcctgtctcggcctcccaaagtgttggaattacaggtgtgagccactgtgcccggccagcatagattttaaatccaccttttgttgcttgacttcttggagcctgtttcttcatctatgaaatgcaggaaacgtgcctggaaatattgcttgagattctaatggggaggtgcaggtggaatactgtagcctgatgcccagcctatgccgggaactcagtacataacagccaatgagcattggctgcggactggacatgtcccctccttgtgctgtagtattaatgtctccaaccctcacagtgatcctgtgaagtaaatgtaaaatcaccacccagatgaggaaaacagtggcacagagaggttaagaaaactgtccaaggttgcacagcactaaaatgttgaaatcaggatttaaacccagccctcctgaccccagaggatcttttttcaaaaattatgttcttttattttatttcgagatgggggtctttcacagtcacccaggctggagtgcagtcacaatatcacggcttactgcgcctcaacctcccaggctcaagtgatcctcccacctctgtcccccaacccccagttgcttaggagcacaggcacacgacaccatgcctggctaatttttgtactttttgtagagatggggtttctccatgttgcccaggctggtctcaaactactgggctcaagcgatcctcctgcttcagcctcccaaagtactgggatcacaggtgtgagccactatgcccagcattagaggctcttttaacagctccacaattccctgtgagatgggctgcatacaaagcattactcctgcttgacatatacacaaaccatggcccaaagggagctgggacttgtccggatgtcagcctctaagtcagttttgggtcagtgagacccaaaaccaaggctctagccgtctagcccctccaacctttcttctgccccagttttatgggtttggcaatgtctgccaggatgggagggagcagttcagatgatccagtctggaggcaaaattctgctaaattcaaagggcccagcctcaagtcactgatgtctttttttttttttttttactttaaaaaaatgtattaattctaaaccacacaagtaagacacgaatcagtcttccttgcagaaagttaaactttttatacataaagctgatatctattttactcactgcttccagccccatgcctgtcccctctcctgcagtaacccctatttgatatgtttccagaactttatctaaaccttcacataataaaaataattcttatatagggcttactaacttccaagcactgctttaagagctttacatatttaagccccacaataactctgtgaggtaggtgctgctcttatccccattttacagatgagaacattgaggcccagagaggctatgtaactggcctggcgtcacccagcctgcagttggtggaaaggtcagtcccaaatctaggcagccttgctccgaaattcatgctcttagcctctaagttataaaacatgctattatcgacctgtgggaagaaacagtattgctgtttgttgatgtgtattttgagacaagtgatatcatgttgtgcatatcattatacaatgtgtcttgtttattccatgatacatcttgaagatacagccacgtcaacaaaaaataagtccctttcctgtacataatcccacagcgtggttacaccaaactttattatggctgtctagggtgtttaaagaccgctgctggaatttctttatccaagactctgtgtgtcttagcccattggggctgctgtaacaaagtgccagagactggctggattctaaacaatagaaatttatttctcacagttctggagactaaagtctgagatcagagtgccagcatggtcgggttctggcaagagcccttttccgggttgccgatggcggacttttcattgtatcctcacatggtgcaaagcaggctagagcattctcttgggtctcttttataagggcatcaatcccattcactacggctcctccctcctgacctaattacctcccccagaccccagctcctaataccctcctattaggggttagagtttcaacatgtgaatttcaggggagcacaaatattcagtcgatcacattgtgtattctgggccccaaggctgtccattttgctttctgctgagaagtttagtggtaaggtcaaagggtagaagcgcagtaagatctagaagtcactgctgatttgccctacaagatgggcaaaccacttcccagcctgcagctctgagccctggatccaggccttctctcctttatgtctcgagcttactctgtcccctgccttacttaccaaaccaaagcaagactcctctgggacattcctgccaggccccatggcaaggttggagctgaggaggggacttccaaaccttggttttattttcactttggcttgggtgtgccaagccctggcagagccacagagttggggcacgaggtgccaagaaacagctcccagtctgaggaaggtgctctgccctgggaaggggataaagctgagtgttggttatggggagacatcctcaaggtctccatctaaatatggtcaacttggtggccttcctgtccccagggcctttggggctctcagaggacaagaatcactcagctctgatttgctggagaagcagagccccaggtgggaggtagcgaggagcctgtctctccccactgggagtggagagctgggtgccacagcctcaaacagttgttcccagacatcggcacatggggaaccccccgggagcttccaaaagtgccagtgcctgcgttctacctcctgggatggtgctgtgatgggtctggagtgtggcccattgggattttttaaagaccctcttcccaggtgatgccgtcgtgcagacaagcatgggaaccactggcctggaagccccagggagaggcctctggggcccgggacacgcaagcgggagccttctcctagcagccttgctagccacccaccccttcctgtgggtgctagacccaaactgccagggctgagcaggagaagcaaggccaccagctggccacctgctgtcccagccaggctcaggctggcagtagggcaccccagtcctggaggagggtgcatctggaaagcttgggggctcttggtggaaagttcaagcctttagcataggaaggtggctggggtgaaggaggcagtttaaagactagtgatgtgggctgggacccagattgctgggtttccaatgaccagaagaagatggccttgttggactggggacagggaccacccaggctcaggcctgaggctgggagtgcaggcatgaatttgagtgcaggctcaggaacatccccagggccgccaggcagggagacacctcttcaactcctggctcctcgactctagctggtgacctaggcaggtccctttcccactgtgagcctcaatttcctcatgtgtaaagcatcatgactgtgtgttttaagtcctttagggccctatctttgtgagggacaacagagacgatggttttcacaggcaacagtcacccctgcatcatcactgactcacagaaatggatatgccctataaggacatctcttgcttgccctgccagcatttgtgggcgggggaggaaatggccactaaccattcctgaaggcacctcccaagggacccctgaaaggagggtgacgcctcccagaaagagaccagtggcccagcccagccctgctcttagttttgtttcctctgctttgaatgccagcaaggcctttccctcccagggcctcagtttccccatctttacaatgggcacagcatagaccccatcactggggctctttctgctctgccaccctgtgcatccaggctcaggtgttatccgaagccctgacatcatcagccattcccggggggaaggcagaggcgctgggttctctgtgtccccctggtagggcttggtgtaggattcagggaggattggagggcctctgtggcctcaggtcctcccccagggtccccaggccctgacctgtccacctggacctaaagaaccaacaacagcagcactttctgtttctttgaggtatttctgtccaaatgtctgtagtcatgactggggtgcctggctatcaccccacaaactgcatcctttctgatctgcacagatgagaaaactgaggtcttgtttcccctccatcccaagacctaatgggacctcctccttaatctaatcctcaagaggcagaaacaggatggaaagcaaaggaatggcagccagaagtctgtggctccactcctgtcctctctgcatccctcacttccttccttacaccaggcgtcaggggctggagagacggaagaagcgatagcaacgacaaccacactagtggtaatcatagcttgtgtggattgaaccttttttttatttttcatttttaatttttgtgggtacatagtaggtgtatatatttatgggttacatgagatgttttgatataggcgtccagtgtgtaatcacatcagggtaaatggggtttccatcacctcaagcatttatcctttgtgttgcaaacaattcaattatactttttgttatttttaaatgtacagttaaattattactgactatagttaccctcttgtgctattgaatactaggttttattcattctaactattttttgtacccactaaccatccccacctcccccaccctggcctcctactatacttcccatcctctggtaaccatccttctactctctatctccatgacttaaattgttttgatttttagatcccacaaataagtgagaacaagtgatgtgtgtctttctgtacctggcttatttcacttaacataatggcctccagtgccatccatgtccttgcaaatgatgggatctcattctttttgatggctgaatagtactccattttgtatgtgtgccacattttcttttactcttttattcttttctttctttcgagatggactcttgctctgtcacccaggctggagtgcagtggcacgatcttggctcactgcaacctctgcttcccaggttcaagcaattctcctgcctcagcctcccaagtagctgggattacaggcatgccccaccatgccctgttaatttttgtacttttagtagaggaggggttttgccatgttagccaggttggtctccaatgcctgacctcaggtgatccacctgcctcagcctcccacagtgctggaattacaggcgtgagctgccgtgcccagctgccacattttctctgttcattcatctgtcgatgaacacttagattaattccaaatcttggctattgtaaacagtgctgtcataaacatagtagtgcagatatctctttgagacactgattcctttcttttgggtatatacctagcagtgggattgctggatcatatggtagctctaaatttagtttagtttttttttgttttttttttttttttgagacagagtctcactctgtctcaaggctggagtgcagtgcgtgatctcagttcactgcaacctctgcctcctgggttcaagcgattctcctgcctcagcctcccaagtagctgggactacaggcatggggcgccactacgcccagctaatttttgtatttttagtagagacagggtttcaccatgttggcgaggatggtctcaatctcttgacctcatgatctgcccacctcggcctcccaaagtgctgggattataggtgtgagcctccgtgcccagccctatttttagttttttgaggtacctccgaactgtcctgtagtggctgtactaatttacattcccaccagtgtatgaggtctcccttttctccacatagattgaggtgtttgtttgtttgtttgtttgtttgtttggagatgaagtctcgctctgtcgcccagactggagtgcagtggcgtgatctcagctcactgccgcctccgtctcttgggttcaagctattctcccacctcagcctgggattacaggcgcctgccaccacgcctggctaattttttttattttaagtagagacgaggtttcctcatgttgcccaggctgctctcaaactccggacctcaggtgatctgcctgcctcagccttccaaagtgctgggattacaggcttgagccaccatgcccagcctggattgagtttgtatcatgtgccaggttccatgtcagggattccacatgccccatcccacaaccatcttgccaggtgggcattatgatgaccccccatagcagacactgtcagagctcccccaaccccatctctgcccggatgcccccactcactgtgggtgacacctgcatccttcttccggggtcgcctttgcctggtgggcattgccttgctcagagatgcctgggcagtcatgcctccctcccccgcccactgggggtgcagtgacgtgaagtgtgaccgaccacccagaccccttgcacatgcgcaggatggacctcttctatcatcacgctccagttctcccatgtggcaggctgaagcgaggcttttgaaaccatatctttgctcagctgcctctgctaccctatctttcttccaccaccccctcaataaacaacttccacaggaacccccttgggctctgcttctagggacctgacctagaagatcctcattttacagatgaggacgctgaggtacgaagaggctgcgtaacctaccagggtcacacagctttggtgtggagtagggactcaaatccagggccctggtacggaggcatttgccctcaccaagattcaggcactgagagaagctgacgggcctagagaatggcaagacttgagatagcagaaggaaggagagagggtgagaaatggatccccgtgctgaggtctggtctggaaggagaagtctgcaaggtaggaaaaagaggaaaggggacgtgaggtagggaagcaggatgtgcaaggcggggacttgtgaaagagaatgccggggggtggtgagcagcatctcatgggcaggtcagcaggtgcaggagaggcctaggagggccggggactggatgatgaaagggcatttgtttatttatcctttgtttttgttttttgttgtttaaattgagaccagctctcacaatgttgcccaggctcgtctcgccaactgtctgcccactcctggcctcaaacgatcttcctgcctcagcctccaaaagtgttgggattacaggcataagccaatgtttattcgtcctgagccttccctggacacctgatatgtagctgctttgtggtggtcacagttccatggtgtgactttatcctggaggcagtgggatgctgatagcaagttcagacaggcatgaggccagaccagagctgagttttcaagataactccagccagaggtatgcgtgcatgtgcacatgtgggtacatgtatgtgtgtgcacgtgcatgtgtgtatgagtgtggactagagatggaatggctttctgagcaaagggaacagccaaggcaaaggcctgtgggctgcagggagagaacaaggtttgatctctgcactccctcctctaagctctgtgtcaacagcattttcaggacagcaggaaggattcccaaagagcacagcagcgagggcagttggagggaggcgtctgctgggacactgaaaccagggtggggtaaactcccctcgcacctcctcagactcagagcccccataaatcttccaggtgcaccccagcccttttccctctctctgtctgaactggggtggcatgatcccaggactgcaactccacgtgtctggattccccttactgactgcgtgaccctggccattttccctccacctttctctcagcgcccccatttgattactcggcctcaggggtgcactggggattcttagaggtaacacttcgaacggaaagccagaggtcctggtgccaaaatgcaaatgtgagggcttgaaagttcatcgggttttattttctctgttccgtttgcagtagctcttctttcttgttttctatagaacagtaaaaaactttatgcatttgaatatcgtgaaccttgtaattcatatgcaatataaaaactactagctatgcatggagaaatcaattgaagaacagtggcttagcatgtctttctcattctttgatggctacctcaaatcaaatcaatatgaacttggggtcaggcatggtggctcacacctgtaatcccaacacttggggaggccaaggcaggaggatcacttgagcgcaggaatttgagactagcttgggcaacatagcgggacctcatcttaatattaaaaaaaaaaaaaagagaaagaaaaaaagtgaacttgggaggtttgaatgacaactcgtatagctgaagtaatagatatattcaacttttaaaacttaattttcattagataacacatgcatatggtataacattctaggccaggtgcagtggctcacatctgtaatcccagcactttgggaggccaaggtgggcagattgcttgagcccaggagttgaagtctagcttgggcaagatggcaaaaccccatctctgcaaaaaacacaaaaaattagctaggtgtggtggtgtgcacttgtagtcccagctactcaggaagctgaggtcggggaatcatataagcccaggaggtggagactgcagtgagccacgaccacaccactgcactccagcctgggtgacagagcaataccctgtctcaaaaaaaaaaggaaaaaaaattcctttcactggggacaattacctttatgaatttcttccagaaatattaatgtatttgtatacacatttttttttgagacagggtctcactctgtcacccaggctggagtgcagggatgcaatcttggctcactgcagcctggatacccccaggctcaagcaatcctcccacctcaaccttgcgggtagcttggacaacatgtgtgcaccaccactcctggctaatttttgtattttttgtcaagatggggttttgccatgttacccaggctcgtctcaaactcctgacctcaagtgatctgcccgcctttgcccctcaaagtgctgggattacaggcatgagccaccatatttattttttctttacacaaaggaagcatattctacaccctgttttgccccggctctcttttaaaaaacagtgtatcttggataccattccatatcattccataaagttcatcttcatcctctttttttttttttttttttttttgagacagggtttcactctgtcgcccaggctggggtgcagtggcactatctcagcttacctcaacctcccgggctcaagtgatcctcccacctcagcctcctgagtggctggatgctgcttctttctttttgatggctgcaaagaattccattgtatagatgtgccataatttaatcataatatgtcctctttgatcatttaggtttttccaatcttttgctattacaagcaaggccacgttaaatatccctgggcatattattttgcacattatgaagatatctgtaggctaaatacctgtgtatggaattgctcagtgtgattacatggcatttaccactttggtagataaaggttgtatcctgttacatgtccacggatgaatttcttccagaaatattcatgtatttgtatacacattttttgagacagggtcacaaaaccgttaacacattattattattattattattattattatttcacattatttagggaagtttcatttttttgtgagctatcactgataatttcttatttactcatcatcttgtatttctcttccttgcacattggggaaatgtctattctagtttttaatgtaaatgttcttgtggcttttttagaaaaaatcaaaatgtgcacattaaaaagtttgaatggttcaaaaggtcctaaaaagggtccacagtggaaaaggctctcctttcccagcaggcccagatccctcctcagacacaagcctgtcgtcagtttcctgtgtagcttcccagagttggtcactatgtatgcaaatacacacacatttaaaatatacacactccacgtccacgtggaatgatgcaaagcatctaagtgcccgttaattcacaaccttgccaactcagtaatatccttgcgaatctaatagctagaaaatggtgtatctttttagttctaatgtattatatttattctattttctgtgagcttgaacatcttttcatatatttaaaagtcattggggccaggggtggtggctcatgcctgtaaccccagcactttgggaggccgaggcaggtagatcacctgaggtcagaagttcgagaccagcctggtcaacatggtgaaactcagtctctattaaaaatacaaaaaaaaaaaattaatcaggcatggtggctcgtgcctgtaatcccagctattgggaggctgaggcagaagaattgcttgaactggggaggtggaagttgcagtgagtggagatcgtgccactgtactccagcctgggcaacagagtgagactctgtctcaaaaaaaaatttttaaatgtcattggtgtttcccttttttgtaaaccttttatgttctttgcctagttttctatgaggtcattggctttttcagtgttggtttttagtaactctcgatttattaaaacatttatacatttatagctttgtttatgatgtatacatttataaccttgtctgtgatgcagatatttttccaatttgtcatctggcttttgaccttatctgtggtattctttgacaatacaaaaattttaatttatatctgatcagtttcatccagttgtttttttcttttttcatgatttctgagttttgtgtcatgcttagcaagatgctctctactctgaaattattttctgtaaaatatttttttcagccaggcatagtggctcacacctgcaatcccagaactttgggaggtagaggtggaaggattatttgagtccaggagttcaaggccagcctgggcaacagagcaagaccccgcctctattttttaaaagagaaatttttttaaaatactttttcccatgttttgtttgagcacttacattttcttaacttttttgtcgtgaaacataacacatagaaaaatgtaatgtaagtgtacaacttcatgaattgttataaattgaacatatagctttctggtactttcatggtttaacttcttacatttaaattttggtttcatctagactttattttgatataattgtgaaatagaaatccatttttattctaaaagaacactttttaaatgttcatgaaatgttttaaaatttattatataccaagcaagaaaaaatctcaacatagtcctcaaagcagaaattgcacaggacttattctttgtacagtgtaatgcacaaaaactaataagaaagccttaaaaacaaccctttattaaattactccattccaaattataatttcaatctacttagcacataagtattgatatacatttatcgaaattggccaaaagtgttttattattttttaaaagaaaaagcctagcaatggcttaagcaataaagtttttaattttaaagaataacaaacagcctcactaaatcagaggaaagaaataaaaagataaaagcaaaaattacagaactagaaaagggaccattccagcaaaattgataaatgaaaacaaaaatttgtttttcaaacataagagttaccaacggctggtgaatctaaaaagaagaaaaaacaaagtaaactaaattaaatgtgaagccatgaagagatttaaaattataagaaaataggccgtgcacggtggctcacgcctgtaatcccagcactttgggaggccgaggtgggtggatcatgaggtcaggagcttgagacccgcctggccaacatggtgaaaccccgtctctaccaaaaatacaaaaattagctggctgtggtagcatgagcctgtagtcccagctacttaggaggctgaggcgggagaatcacttgaacccaagaggtggaggttgcagtgagccgagaccttgccattgctctccagcctgggtggcagagtgagattccgtctcaaaaaataaataaataaataaagctgggcgcagtggctcatgcctctaatcacagcactttgggaggccgaggtgggcggatcacaaggttaggagatcgagaccatcctggctgacatggtgaaaccccgtctctactaaaaatacaaaaaatgagctgggcatggtggcgtgtgcctgtggtcccagctactcgggaggctgaggaaagagaatggcgtgaacctgggaggtggaggttgcagtgagctgagatcacgccactgcactccagcctgggcgacagagtgagactccatttcaaaaaaaaaaatacaagaacatattatatacaactgtgagctacaccatgtttgaacatcttgacaaaatgagcaactttctcaaaactaaattgccaaatgttcatttttaaaaagccaaaaataaccaaccaacacaatgaggataaatttaaagtgatcaagtttgatttttttaaaaaactgttcaaacatcttggtagtgctgggcaggaagttggctttcattctgggtgagatgagaaggctctaaggggcataggacctgatgtcatgggacctgatgcaggctctgtcttaatagctgactcctgcgtggagtaggttattgggggatgggtggacagagaccagggaggaggctggtgcaggaatcccagtgagaaatgatggtgtccaggctaggccatagcagtagaggaagcaagattctggaatgcacttggaaaatgaagccatctttgggcttgagctcaaggaagcatgaagctgcccctaactgaagtggggaaggtggtctggggagcagtttaggaggagagatcaggagctcagtttcggacttggaaattttgaaacgcacatgaggcatccaggtggagttgggagaattaaataatgctgaaaggtactcacttggcaagtagcaaatattcgctatattgtctgttcaactttgtcaactgcttttccagtagaaatgtagtgtccttatcacacatgcataaatgttaaactcaaaagtaaaatgaaatattttctcagtagatatgaataactttttaatttttttgttttttgacatgcggtctcactctgttgcccaggctggagtggggtggcgagatcatagctcactgcagcctcaaactcctgggctcaagcaatcctctgccacagcctcccgattagctgggactacaggcacacaccaccacgcccagctaatcttttattttttgtagagactgagttgcacaatgtagcccaagctggtctccaactcctgagctcaagctatcctcccacctcggcctcccaaagtgttgggattacaggcgtgagccactgcacctggctgctttttaattgtaatattcatcctccatccatcatacttagtgcaaatatttttccccacctattgccttcctatttctcttttatttcacgtcatttagggaagtttcatttttttgtgagctatcactgataatttcttatttactcatcatcttgtatttctcttccttacacattggggaaatgtctattctagtttttaatgtaaatgttcttgtggctttttttaaaaaaaaatcaaaatgtgcacattaaaaagtttgaatggttcaaagggtcctaaaaagggtccacagtgggaaaggctctcctgtcccagcaggcccagacccctcctcagacacaagcctgtcatcagtttcctgtgtagcttcccagagttggtctctatgtatgcaaatacacacacatttaaaatatacacatgccacagctttttaaaatttgaatttatgggccatgtgcagtggctcacgcctgtaaccccaacactttgggaggccgaggcaggtggatcacctgaggtcaggagttcgagaccaacctgaccaatatggtgaaaccccgtctctactaaaaatacaaaaattagctgggcatggtggtgggtgcctataatcccagcttctcaggaggttgagacaggagaatcgcttggacccaggaggcagaggttgcagtgagctgagatcgtgccactacactcaagtctaggcgacagagggagactccgtctcaaaaaaaaaaaaaaaaattgaatttagactcaggtgcagaggctcacgcctgtaatcccagcacttacggaggctgatgaggggagaatcacttgagtccagtagttcaagaccagcctgggcaacacagggaaactatgtctctacaaaaaaattaaaattagcctggcatggtggagtgtgcctgttgtctcacctactcaggagggtgaggcaggggaatcacttgaactcaggagtaggaggctgcatgagctatgattgcaccactgcactccagcctgggtgacagagcaagaccctgtgtcaaaaaaaaaaaaaaagaaaagaaaattagactaccatcatagatggtacaaacacttcccagtttgttgctttcgttttgtttgttgccatttttactatacagaaaaaaaaggcaataaagaatacattattataatatgttaatttctactgcattatttttaacaacttcattgaggtgtaatttacataccgtaaaatctatccattttaggtgtaggattcagtgatttctggtaaatttactgagttatgtgaccatcaccacaatctggttttgggacattttcattactgccataatattcctcaaacccatttagaatcattcctatttctgctcccaggcccaggcaaccagtaatctacttgctgtttcaatagatttgccttttctggatgttttacataaatagaatcatacaatacgtgatctttagtgatcttttttcacatggcataaacttggttcctttttatgttgaataatattccattgtatagatatgtcacagtttgtttctccattcatgagcttttgggtatttgggttgatttcactttttgactgttatggataatgctggtacaaacattcatatacaagtttttgtgtagatgtatattttcatttctcttggaatagacctaggcgtggaattgctggattagatggtaattctattgttttacattctaaggcaggggtccccaacccccaggctacagatcagtgtcggttcatggcctgttaggaactgggccgcacagcaggtggtgagcggccatcgggcgagtattactgcctgagctctgcctcctgtcggatcagcggtgccattagattctcataggagcacaaacccagttgtgaaatgcgcatgtgagggatctaggttgcgagtttctgatgagaatctaatgataaatgtaatgagcttgaatcatcccgaatccatcccccaaccccaacccccgtccggggaaaaaatgatctctcatgaaatcagtccctaggccaaaaagtctggggactgctgttctaaggaactgccaaaactgccaaactgtttttcagagtggctggaccattttacattcccaccggcaatatatacggtgtcctgtttctttacatcctcatcaacatgtgtctttttcattacagccattctatgtgggtgtgaaatgctatgtggctgtgtttttcatttccatgcagaaatttttaatttaattgcttagttaaaaataattctttaaatttaaaacactcatattgccatatgtatatttttatactacaaagtgatacaatttttgttaattttcttgccttgattactctttacctgtatagtatttaaatctttacataagatcacaattatagtgaatagtaatttattcaactcaaaatcttcataggatttagaaaatttaagtcctttaccaaagggattgacttctaacttcattaaaggttgcgaacagtatcaaatccttggtaaagccacattcaatctttggcactccaggattttgagctataactgtagtgatcactaatatgtcatttctaagctgacggtcataatgactaaaacctctcatagattttaaaatacttccttcaaagtcagtaaacattccaagttactaagctgttgaacaatttcttattttgaagattttttctgataagttccaaagtgtttctgatgaaggaaataaaagctgtccagagaaatctgagtcattgaggtgagcacagattccattggctgcttgtgctttcatcattacagtacaattaacttcagaagtcgagagatgctgcagaattttaagtacccaaagtttctcaacaagttgattttcaagcaaggtcattaactgggccattgtttttgccaatcctccaacttcagccatttgaatcttgtatgatgaactcacttgctggtaacctggaatatgctcctttggtggttgtgcctgataaaagtcaacaatacgtttacaattttttatcctcaattcagaacttggtattttcattaagtcacccagaagcgcaactgaactagcagtatctccagcataagttatttcatccgatactttctttttcaaaaatggcaagccacactattttatgatatcatatgcagattctacaaaatgcggctggttttcaatttttactgcacacagattcagaatttcaaatgtctgtactaaatcccttaagggaagttcattctgataacactgtaccagtttcttgacagatttaagttgcttttcttctaagccttctttagcagtctcttcaaaaagtttgatgacaccattaaggtccacaggcttcaaaacaccagttccacatggcgagggaggccttgggaaacatcatcatgatggaaggcaaaggggaagtaaagaccttcttcatggtggcaggaaagagacagcatattgctatgtattttaacaccacttatttccccccttttttctttcaatatcatggattaaatagtgtattttaaatgagtgtgaggctcacttggactctattccatccctttggccaatttttttccatttttaatccaagaatcttaaagtttgaatgatggtcaccttgttatatattttattatgtttggaagcttttttgctattgtctgatcctcccaacaaatagccttttgatagaattgcctttattcgtttctttatatctaattctaacttaagattagacttaaaagtaacttcagcggttttattatgaaatatttaaggcatataaatactgcctcttttctctaaatgactgctaatataattttaccaagttctgttaaagtatcctgttgtacataaagtgctgttgttttttatctgcctgttaacttagagtgggttttattttctttcactttctgtggtcgaaggcaagtatgtcttagtcagtttgggctgttataatgaaacactgtagactgggtggcttaaacaacagaaacttgtttctcacgttctgaaagccgggaagtccccaatcagggagccagcaggcctggtgtctggagaggatgcgcttcctggtttgcagacggcaccttctcattgtgtcctcacagggcagagagcaaaaagaaagggcaagcgctctccagcctcttcctttttcctttttttttttgtttgtttgagatggagtcttgctctgttgcccagactggagtgcggtggcatgatcttggctcaatgcaacctctgcctcctggcttcaagtgattctcctgcctcagcctcctgagtagctgggactacaggtgcctgccaccatgcctgactaatttttatgtttttattagagatggggtttcatcatgttggccagactggttttagactcctgacctcaagtgatctacctaccttggcctcccaaagtgctgggattacaggcgtgaaccaccgcacccggcctccagcctcttcttgtgagggcagtaatcccatcataaggggtccaccctcttgacctaatcacttcgcaaaggtcccacttccaaataccatcacactgggtatttaggcttcaccaggtgaattggtgggggaggtgggacacaaacattcagtccacggcaagtttttatctcaatttgctaaagcctctctttatttctcctgttacagtgtgataatgttttttaaaatatcatttagctggctgtggtgacccatgcctgcagtcccagctactcaggaggctaaggcaaaaggatcacatgaacctaggagtttgaatccagcctgggcaacatagaaagaccctgtctcttaaaaaaataaataaataaataaataaataaataaataaataaataaataaaggaaagaggctgggcacagtggctcatgcctataatcccagcactttgggaggccgaggcgggcagatcacctgaagtcgggagttcaagaccagcctgaccaacatggagaaaccccttctctactaaaaatacaaaattagccgggtgtagtggcacatgcctgtaatcccactacttgggaggctgaggcaagagaattgcttgaaccagaaggtggaggttgtggtgagccgagatcatgccattgcactccagcctgggcaacaagaatgaaactccatctcaaaaaaaaaaaaaaaaaaaaaaagaaagaaaagaaaagaagcacttaaagaggctgaggcaggcagatcacttgaagtcaggagttcaagaccagcctggccaacatggtgaaacctagtctctactaaaaatactagaattagccagacgtggtggcacatgcctgtaatcccagctactcgggaggctgaggcatgagacttgcttgaacctaggaggtggaggttgcagtgagctgagaacatgccattgcactccagcctgggcaacagagcaagactccatctcaagaaaaaagaaagagagagaaagagaaatatagacatatgttattagtcccccaggacctcttcaaaagatctctcttttcctttcttatttctaattaccatactacataccacctccattatgtcagaatgtgccctatttacgtggatttgtctaaagtcatggaactctgagttacattccccgtatttcacagagacacaatcagagcacacgctgatcttccgcctctcttcatttcctccatgtactctgtagctacctgttctcttctttgttcgtaggaagatctctgttgcgtggtgtgggagtttgtgccagctcatctttttattgtgctttctgtgagcagctatcaatgcctccaggtcttctctttaagaagaatgtttactctcaattgtttaaaaaactaactaaataggaagaagattgcaaatcctaacctttttggggttttatattgggggcaaaagttggcatctgcagtaaggattatttcattttcatctgaataaatgagcagtaataactttgctgacttgcagggctcattgtgatgccaaaggacattgtaaggtgcatatctgaattggaggaggaagaggggcatcctctgagccaggtgtggcaggaggtgacatcaaggagggttaggctgcgtaaacccagggacacaaggagctgcagtcggggaagaacaaggtctagcggatggagttggggggactgtgtctggagccaatgttctcagatgtgtctccggcaggcaggggcaagggctggtgcctggtttacagcattccttttggagtctggaatagtggggaaaactccctgtcttctctccccttaggagtctgcactatggaaacaacctgtcaatccagctcaaggcacacatagcccagacacccatgagaccctctccgtggggaccctagagcacctatcatgaacgaggagaccaagtaggtgatttttctctccccttcacctcctcttttcccctcctatctacttcgtcacttttctcctactgccaagactggtccctacccaaatctgccttactgggctgcccccaacacaacaaacctgcccttgaccatcattcagcatgagaatgtaatgatcagacacagaaaatcaggaagagttttgagacagcatctaatctacccattttagagatggtatgactgaggcttatataggaaaaaggcttgctcaaggtcacactatgagtgtatcagctaggataggccaggttacactgtagtacatgcaccctccaaagtcccagtgactcatggcaacaaaagtttatttcctgctcttgcttcctgtctcgtgtggattgactgggattgctcctccacatcatcctgtctcccacactcaggctaacagggtagccatgatttgcaatatttctggtccctggagtagaaaaaaagaaaaagtactgtcaattacaccttggttcttaaaacaactacaggcatgacatgagtcttttttagcatgtttcattgaccaaagcaagtttcatggctgtgcccaatttcaaggaggcagagaagtgtaatcccaccaaaggcctagaaagaggagaaagagtatctgtgaacagccctaatgcctaccacagagaattagtaacagagctgggccatggatctttcaaccatcgtcctctgtctccaagattattccccatggaaatctcaatgactgataatgatgccatgtgctttttctcctgaggatggttagccttaaagagatttgtgtcatatcctaaggggatagaacactaatgatggaaacaaaggtattgtgttagactggctggaggagaaatttgaggatgagaaacatcaccagaaatcacaccatccaggcactacttacttccatctggtgccatgctgccctggaccatttcttcatgggtagcatggatgctggacaccatagcctggaaaagaagttatgccctaggctatggccacatccttttgccgagatcacacaaaatccagggacttagccttgtctggtgccatctaggcctccaaggccttggaaatttactggcctgggaggcaagaaacctcagttctcctcctgcctctgtcatggacttgctgtgtgactgtgggcacaccctttgcccttccttggccatggtctttccgtctgcttagtggaggtggtgatccctgcctgaggatcatggtgtgagcatgtttcataaattctaagactctctgcctgagtgaggacctattgctattagcccagttgaggagaaatgaccagtggggctgacagtacatccaagtatgtctctactgcatgcccagggagcagctgggctctaaaccccaggacgcatagtactggcctcagcctctgggaattgggaaggctggcttctgggtggacctcctactcttttcagagttagaggtggactctctggagttgtgaggataaaataaggtatataaagcacttagacagtgcctaatacacagtgagtgctttccaagtgtgtactgctatgaggaaggacatagtaccagaaagtacatccggaaatgtgatagcatagtccactagatgatggaccaccatttagttggccaatccccaactgttggacatttaggttgtttccaatttttaataattataaataatcttgcagtgagcatctttgcaattaaatattgtatatacgttcatgatcgtttgccaaggttagagtcctagaaatggaattactgaatcaaaggaactgcacattatttaggcttttgctgtgtaaatgccccgtgccctctattggtacttctagaaggaggtggtttaagagttccagttcggccatcatgatggctcacacctgtaatcccagcactttgggaggccgaggtgggcagatcaccctgaggtcaggagtttgagcccagcctggccaacatggtgaaaccccatctgtactaaaaattacaaaaattagctgggcattgtggtgtgcacctgtaatcccagctactcgggaggctgaggcagaagaatcgcttgaacccgggaggcggaggctgcagtgagccgagattgcaccattgcactccagcctgggtgacagagcgagactctgtctcaaaaaaaaaagagttccagttcagaagggaagaatttgcttagcaaaagaggtgatggtctgtgttagctaggattagagttcactgtgagtagcagaaagcactaaacaacagtggcttaaccagaatggaagtgtatttccctgccatgtaacagaagtccaaagtcagtgagcacagggcagatgggcagctttaccttccaccttcctcagtatgggttccacctcatgattcaatatggctgcccaagatccagccatcccatcaacaatccagacaacaggaaggagcaaagaagaatagacaacatttctacttacattccactggccaaattacatggctacatataactgcaagggagactgggatataataatctattctagatgaccagagaatatttagtagttctaatactgaggaagaagggaagaacagattttgggagacaactagttgtctctgccatgaggttagctcagactgagagcagcataaatggttcatggaaataagaatgagtaatgcatcctcacgggactgtccacaggggatgaacaagaccattccagagagccagggtgcaggcacaaatggagtagggagggggtgcagaagaaacagactgatctctggagctgatccctgggcagagacatcaagactccatggagaggccacttccctgcctattttatgtcgctcaaatgtagggactggttcttgactgcttgacttccctagaaactcccttatcccccaactcaccttccccagatcaccttccccctagttcatctgtaccccactcacctgccctcaggtcacctgccccacaactcacctgttctccatctaatcttcctcccagctcccctgtcccccaaatcacctgcccccaatttgcttgtcctccagctcaccggttccccagctcatcttccttccagttcccctgtcccccagctcacctgcctgccctcagttcacctgtcccccagttcatcttcctcctagctcccctgtcccctagctcacctgtgccccagctcccctgtcccccagttcccctgtcccccagctcacctccccctcagctctcctgtcccccagctcatctgcccccagtttacctgtcccctagctcacctcccccccagtttacctgtcccccagctcacctccccccagtttgcctgtcccccagctcaactccccccaagttcccctgtccctcagctcatctgcccccagtttacctgtccccctcaactcacctatcttccctgtccctccagggctggctcctcatggaccccgttggcctccagctcggcaacaagaacctgtggagctgtcttgtgaggctgctcaccaaagacccagaatggctgaacgccaagatgaagttcttcctccccaacacggacctggattccaggaacgagaccttggaccctgaacagagagtcatcctgcaactcaacaagctgcatgtccagggttcggacacctggcagtctttcattcattgtgtgtgcatgcagctggaggtgcctctggacctggaggtgctgctgctgagtacttttggctatgatgatggtaagggcaggtgtgagagacgcaaagcagccgggccagtacctgcgtcatggggagccgggaggagcccagggacccacctaagtcagagagagggtgtagcccagccacgatctcaactctatatttctggacacttcccagaacaaatttcctaatgcgcccaaatctgctggggcctggaggacccctccttctacctggcttcactcgaattgctcgaattgctgagtgactgcttccagccacaaaatcccacatagcccataatgcccgagagatttatttcttcttttttggcgggggtgggggggtgttttttgtttgttgttgctcttgttgggttttgtttgtttgttttttatttttgagacaaggtcttgctctgttgcctaggctggagtgcagtggcacaatcatagctcactacagcatccaactccaggactcaggtgatccttcccacttcagcctcccaagtagctgagactacagtagaactataggtgcatgccaccacattaggctaatttttcattcttttgtagagacaggacatcactgtgttgcccaggctggtcttgaactcctggccttaagtgatcctcctcccttggcctcccaaagtgctgggattatagatgtgagccatcacacctggctagaggtgtttttgtttgtttgtttgttttgcaacatggtcagaaacagtgacggggagcgccttctgccctctactgatccgtggggatttcttgggcaccttctgtttgcacagcactgaggggaaacacaggacattgaggggcaacagcgtttttggagagaaaatgggaactcacttaagaaccctacttcaaggcagagtgtgggaattgcggggggcggggcggcgcatgcacatatgtgcagacatatgcagatacacacagtgcatatacatgtgggtatgtgcgtaaacccatgtacacatgcatgcaagtgtgcccacatgcataacacatgcatgcctgtgcacacacatacataaacttgcatgcacttgcatatacacacatttctgcccagcactgccttcaaagctcaccaccacattttctccacaacagataactgagtgttccatttagttctcccttgctgggtatctccctgtgagatgagccctgagccaggcgccaggccagagctggtccccagcatccctcgacagccccataccacattatactctcccctctcttgcagggttcaccagccagctgggagctgaggggaaaagccaacctgaatctcagctccaccatggtgaggactggagttggggggtgggaagggggtggtgagcactgtgaagtccccacttccaagctggaggaggctgtggaggctgtggtggctggtcacagccatttctcataggccatgctcttcgtctgtccctgacccatttgcaagtgtgtcaagcccctaactgtgtctcccagccccacctcctcctgcagtgactttcaaggctttagcttgtcccgttaccaattctaaagggtctaacctggaacccctcaggaagcctgttctcactttcctgcccgcaacccgcagggcctcatctcccagccccaaagtgtcaggcttcatggggaagccctaaccaccccctcccgacttgtacaccttggacttgacactcacccacagctgctgtcttcagcgggggagcctttggctgattttctgaaggagctcggaagggccagtgattaaataatgaccacctactgattcgtgggtcacactttcatctcagcaccttgatttctacagaagcattgactttacttatcgctgtgcatggcagtaatgccaacagaaaacccaccctataacctcagctccccagtgaatcaaaactgtccaagtccctggtccaataggcccgcatcactgagctggcatcattatctcatggctgtaaccagatctgattgatatttggccagtgagtccctttttaatataggatttgttaagatattgaagtgctctcgaactggttccagcctcctagctggacaaggagcccagggccctgctccaggggctgttcctattggtcacttagcttagctgtaggaggaccctgcttgacttcttaaaattctttcctgagtcctctttcctttctccctcccttcctttctgggtccccttccttcttgttttccttcttcctttctcaaactcttccagaaaggcattaaagtgattgttgaaaatccatacaatgagacaagactccagaaactattaagggaagtgaggaaatgtgggtgataagaaatcgggatgataaaaccctaacagaggagggaggttgcaggcctggccaaactcactgggaacttcacttatatgaccaccggcggcttccatagagcttggtccttccctgatggacagatggccatttagtgcttggagctgagtgtttctgggggctgctggctgttggccctgcttcctgcatcctggactgcaagactgccaggcccagaacatccaccttccaatgggggtgcctagaagtccactctgcaaatagaagctggtgttgacccagcctctgcctgctgcctgcctttccagtccctgcatgtgggtgtacttggctgcctgccacctgtctgtggactggagttccccaaaggttctgggtaacccctcagcccagatccccagaccccactcctccaccccttcctttgctttttcaggcctgaagcgcccacatcagagctgtgggtcctcaccccgccggaagcagtgcaagaagcagcagctaggtgggtaccagtgtggggaggaacataaacagagagatggggttgcctgggggccaagacccggaccctggaccttgtcccctgccaataagcctccagaggcccagtgactcttgtctcgcaagtttccaggagaaaaggactggaggtcttgcacaggcagaggagaggcctgggctggcagcgaaggggctccccacccatctggctgcatggggacttctctgaagagggctccgctgaaggagctggaagcaccatacaggtctcagcttcgctgtccaggcttttccagggacaccctatgtcctcagtgttgaaggagacccagggaggagaccagtttgggggtgagcagggatggggaggggtgaggaggcctgggagaaaccttcaagacagaggccctgggggcccatggggagacatggagctgcttagggcaggccaggccagtgagagaagaaaggggacttctctcattcttgaccagttctcagaatggtcctcgttctccacgagttgtcccactaactagagccttctctgcccccactgctgccaaccatggctataaccagaggattcacatccgctcaaaatagttcactaccttggcctttccccatagggttcccccaaaagcagccccagccctttccctgggtcacctgagacctctcaatgacccaggaattaaaaggttaacatctggcactgtaggggcccagctcccacagttccgatcggtaatgcctaggcctacaggttgttagtgctcacccctgggcattgcagaactgaaatattgggaagaggcactggggatccagatattacagaaagaggttgtttcaataagatattgcaaagtagctgggcgcggtggctcacacctgtaatcccagcactttggagggctgaggcaggtggatcagttgagcccaggaattcaatactagcctggccaacgtgacaaaaccttgtctctactaaaaatacaaaaattagctgggtgtggtggtgtgcacctgtagtcccagctactcaggaggctgaggcaggaggatcacttgagaccaggagtttgcggctacagtaagctaggatcgtgccactgcactggagcctgggcaagactgagactctgtctctgggaaaaaagaaaaaaaagagatgttgcaaaggaggtgccctattcccctccccccatcttactgaacccttacaccacgtgtactattgcagaatggatagaaccgtgacccacacttccccattcccacctgcctgtttaaatagctaccggagagcctatgctcccttagaactgattccttctggaagttggggtggcacagatccccctatggtgctcttgacacccccaccctcaccccatcatacatacacatctggggctacaggctcccaacagcccaatactggggcaagaagacatgagcagagggccggggggtcctctcctcatgccatgtccctgccccttgcagagttggccaagaagtacctgcagctcctgcggacctctgcccagcagcgctacaggagccaaatccctgggtcagggcagccccacgccttccaccaggtctatgtccctccaatcctgcgccgggccacagcatccttagacactccggagggggccattatgggggacgtcaaggtggaagatggtgctgacgtgagcatctcggacctcttcaacaccagggttaacaagggcccgagggtgaccgtgcttttggggaaggctggcatgggcaagaccacgctggcccaccggctctgccagaagtgggcagagggccatctgaactgtttccaggccctgttcctttttgaattccgccagctcaacttgatcacgaggttcctgacaccgtccgagctcctttttgatctgtacctgagccctgaatcggaccacgacactgtcttccagtacctggagaagaacgctgaccaagtcctgctgatctttgatgggctagatgaggccctccagcctatgggtcctgatggcccaggcccagtcctcacccttttctcccatctctgcaatgggaccctcctgcctggctgccgggtgatggctacctcccgtccagggaagctgcctgcctgcctgcctgcagaggcagccatggtccacatgttgggctttgatgggccacgggtggaagaatatgtgaatcacttcttcagcgcccagccatcgcgggagggggccctggtggagttacagacaaatggacgtctccgaagcctgtgtgcggtgcccgcactgtgccaagtcgcctgtctctgcctccaccatctgcttcctgaccacgccccaggccagtctgtggccctcctgcccaacatgactcagctctatatgcagatggtgctcgccctcagcccccctgggcacttgcccacctcgtccctactggacctgggggaggtggccctgaggggcctggagacagggaaggttatcttctatgcaaaagatattgctccacccttgatagcttttggggccactcacagcctgctgacttccttctgcgtctgcacaggccctgggcaccagcagacaggctatgctttcacccacctcagcctgcaggagtttcttgctgccctgcacctgatggccagccccaaggtgaacaaagacacacttacccagtatgttaccctccattcccgctgggtacagcggaccaaagctagactgggcctctcagaccacctccccaccttcctggcgggcctggcatcctgcacctgccgccccttccttagccacctggcgcagggcaatgaggactgtgtgggtgccaagcaggctgctgtagtgcaggtgttgaagaagttggccacccgcaagctcacagggccaaaggttgtagagctgtgtcactgtgtggatgagacacaggagcctgagctggccagtctcaccgcacaaagcctcccctatcaactgcccttccacaatttcccactgacctgcaccgacctggccaccctgaccaacatcctagagcacagggaggcccccatccacctggattttgatggctgtcccctggagccccactgccctgaggctctggtaggctgtgggcagatagagaatctcaggtgagtaagagtggaggaggaccggggaggggattgggcttttgggggagcagaggccaaccagtctagcaaacctctgccaagaggactggataagaatcttgaatatcagaacataatggcctgcaatgcaagagaggaagctccataccttgacaggacctctggagtccaaatggatcctcctcttgtctgtggtttctggactctcagtctctctgtcaatcatgggctgaaaccacagatccaggctgtctatagaggctggtggactttgggcaagtatatggagcacacacatgcacactgtctaggccagagtttcttcgttcctaaaacgaatctgtaacaatagccaactcatatggtcattgcaagaatgagatgggatggtgcatgaaaaacattttgtagcacagtgcctagcacagagcaaaggctcagtgtgcatattagctagagaaaaggctaggctgcagtaacagagaaacctcctccccaaatacagtaggttaaataatgtagaattttatttctctctcatggaagagtcagaggtaggtggtccaggtcagtggaatggctcagctccacgcagtcatgcaggtacccaggtccctcccattttgctccattatccccttgggaatcctatctgcacagtcaaagctacgtcatgggtatatctgtgctctggcttgggaacaaggaaagagcatggaggaacatgtcaatgcattaaagttcagtcctgaaactaggatacatcccttccactcacattccattggtgagaacatagtcacctggccacactgagctgcaagggaggctgggaaatgtgatctctggctgggaaaccatgttcctcatgatagctctattgctgtagatgaagtggagaatgggctttggtggacgattagaagtctcggccataatatgtatttgttagtactactgtattaagccccatctctctgaggggatggcgatgacttctcagctctgcccagcactgatcctctgacacttcgcttcttcttatggcagctttaagagcaggaagtgtggggatgcctttgcagaagccctctccaggagcttgccgacaatggggaggctgcagatgctggggtgagccaggccttggagctgagaagggtcttcagctggggatgcctggtactctcctccctctccttaatcctacacaaggcagattcctggccccgcccttttcccctcctcgttcctccccaccatctttgcttactctgtaggttagcaggaagtaaaatcactgcccgaggcatcagccacctggtgaaagctttgcctctctgtccacagctgaaagaagtcaggtgagtgatctccaggagggctcactgactggggagatgagccactgcccaggtcccagagtccccctggggcctgcatgttcctccaagtctgaccagtagtttttcagtgagacccagagagggaaggcatcagtccaagtactcagtagggctgagtccaaacccaaggctcccagagtccccagagcaaggcttccttcatctaatattttagactgtcttggaggagcatgagtgttaaggctccctccctctttctgaaatcccaggagaagggatagcagtgcgtaggcaggaatcaggcactgtgggtacacataactacatgaagcaccacacaccttcacatttgttcacacatgtctacacttgcacagaagtacacaggcatatgcaagaatatgcacccacacatgcccactcataggtgtgcacatgtatgcagcgcacacatgcacctttaactacatgtacacattttgatgccagcacactctaactaactaagcttgtatgcacaaatatactcctgccctgtgtctgggactcagtaccatggggaggagtgggaccagtgaccctcctccctggcagaacgctgctagtttatatggcacctttatgacatttagagaaggcaccacttcatccacacagatgcagcctgtcactaaggttcagcacttgttgagtgaaaataataagttggaccacagtccctattgtcgtctcggctgggcatctgtgaaccgtgattaagccaaggttcagaagtactgaacttgttgacatttttcttccctggctattgaaagtgactttaattttgtctttcatcacccaccattgttcttaatcaccctcactcccctcaactcatctgtctccccagctaggaacccaggcaaggctggcttgtgaacaggtggggaaagtgaggtcagagaggaatgcgcttggctcagggctctgggtgagtcagggccacagccgaggctggaagcgatgtctgcagcgtcccagtctagactttactcattgcctggggggcctatcccaggcacatcccaggcataagccctgggagcagggtgctaggtctcctcattgtgcctcatgaagaggccgtcagtctgtcttctagatcccttgagccgccaggcaaaaacttccccataggaacagaatagacccagaattgaggccagcagagggtctttcctcctagccgtgcctgctggaatccggcgagcaggccatcagctctttctgggcccctgtcttatgtctcccacatgagggtggccatcctgtcacttgctaactggggcttgcaagtgccccaaccccagggcaaagggactgggccttggtctcctcgcagttttcgggacaaccagctcagtgaccaggtggtgctgaacattgtggaggttctccctcacctaccacggctccggaagcttgagtaagtgatctttccactgcctctgcagcccagtccctctctatacctgattcaccccactcccttgcaaggcaaggaaggtctggggcccctggggtaggggattccactcctgacacctttgccacaatcttgcagcctgagcagcaacagcatctgcgtgtcaaccctactctgcttggcaagggtggcagtcacgtgtcctaccgtcaggatgcttcaggccaggtgagcagaaggaaagggatcttggccttatgggccttgagaaaagaggaggggaaagtgggatgggaaatggaggaggcccctcgtctgcaggataaatctgtgcataccctactgttttactcacagctttaccttcagaacctagctcaggcttggcacctggtacttggtatatattgaattaatggatggatgaaaagatggatgtatggatggatggctgaaaagatggatgggtggatgaaaagatggatggatgaatggatggctgaaaagatggatgggtggatgaaaagatggatggatggatggatggatggatggctgaaaagatggatgggtggatgaaaagatggatggatggatggatggatggatgaaaagatggatgggtggatgaaaagatggatggatggatggatggatggaaagattgatgggtggatgaaaagatgaatggatggatggatagatgaatggatggatggatagatggctagctgaaaagatggataggtgtgtgaaaagatggatggatggatggatggatggatggatggatggatggatggatggatgaaggaatgagtcaacaagtctacgaagcacaggcatagccaaaggaataattagctgtgtgttgccctccatggtgctgaaccaatatagccagttttgatcatggggtaggttaggtgtcatttttcttactcataaaaatttctattaaaaaaaattcagccgggctcagtggctcatgcctgtaattccaacactttggaaggccaaggcaagaggattacttgagctcaggagttcgagaccaacctgggcaacatagtctctacaaaaaatgaacaaaattaatggggcatggtggtgcatgcctgtggttccagctatttgggaggctgaggtgggaagattgcttgagccgtggaggttgaggctgcagtgaggtgtgaacacaccactgcactccagcctgagtagcagagtgagatctccatctcaaatttaaaaagaaaggaaaaaaaaaaactcacaacattcttaatttttattatatttcttgtgaaaattgtttttctgactttttaaaacactcttgcaggattcatcaagcaaagacataatcagtatttcacatgcctgatttaaaacacttttgctagttccgttatgtttccctgtcaattgcaaaatcagctttatctggatgtttgaacatttggggcagaaaagggtgtgcctgtggtgggtgatgtgctggtttccagtctctgggtttcatggcttggtatctgatcctgcagggaggcggacctcatcttccttctttccccgcccacagagacaactgcagagctacaaaggtaagaagccaagaggcggtgggcctggggccatccttagaagcaacttgggctcaggcagttgaggggaaaggtgaccaagagactaggaagagctggggtatgggaattcttcctgctactgctgcactgaggaatgaattactgcttaggttggcaaaggattttaacttcctctagcgtgtccagaccacatctggtccctgtggaaggaagcatccccagaagactcagaggaaggcaaacccttggggagaacataaagatactgttagactggcattactagatggtgaaaactctggaaaagcccttacaactgaaaaaagacagggagggcaattatggtacctacatcttagggttgttctgagaattaaatgagttactacacttaaggagtttagagcactgttggcatgcagtgggcagtcaaatgctggctattccagctgtgcatggattccagcttggccagtcttggatgggctgagaaaagggagctgcttttccctaaaagaccatcccaactgtgctctaccacactttgctctcctggctaagactcagagacagatgtatgtatgcccctgagcaatctctttcccttctctggatctcgattccttgcttgtataatgacctggtagtgtaggaccaatgttgctgggtgcggtggctcatgcctgtaatcctagcactttggaacgccaagcacgagaatctcttgattccaggtgttcaagaccagcctgggcaacatagcaagaccccatctctaaaaaaaaaaggcaggcgtggtggtgcacacctgtagtcccagctactcaagatgctgacgttgggaggatcgcttgagcctgggagcttgagccatgatcacaccactgtactccagcctgggtgacagagagggactctgtctcaaaaaatgacccactaggaccagtgtcactttcttttccctctaactgcttaaagctgtgatgctcagtaggatagccactagccccatatggctatttcaatttaaataaattaaaattttaatgctatttcaatttaaataaattaaaattttaatgctattttaatttaaataaattaaaattaagtaaaatgaaattttcagttcattagtcacattagctatatttcaactgctcagtggccataggtggctagtggctcccatagcaagtggtacagatgccaggacatttccatcattgcagaaagttctattaaacaggctggcatggtggctcatgtctgtaaccccagcactttgagaggctgagggggcaggatcgcttgaagctaggagttcaagaccagcctgggcaacaaagtgagacccccatctctacaaaaaaaaaaaaaaaatagctgggcatggtgattcactcctatagtaccagttactcaggaagccaaggtgggaggatcacttgagcccaggagtttgaggctgcagtgaactgggatagagccactgcactccagcttggggactgagtgggaccctgtctctaaaaaaaaaaaaatggttagcaccaatccaaaaagtctgtgaaacctggctcatgatgtcctagcttccctgcatcccctaacgctccctcagcccagtgggagagagtctgtggtttaccatagcctggactcactgcatacagctcatgctcctcgccttctgaaccacagacagcacatccacaaatggagaccatcacatcatcgacaatagcagcttctgtttactaaccttcgattttacacctatgctgggtacttggacatacattgtctcattcaatccttcaggtacctatgtgctagatgttgtcatccgttttagaaaagagaaaagggagccgactgcagtgatttgcccaaggccacatggctatacatggcagagccaaaatttgaataaaggttccatttgacctcaaacctgttgcccctcctgctctgctgaatcacatcttgagcatctgcaagcagtctcctttgttaccgactcactttgggttgtgcttcagggtcttcagcctctagaagccaaggaaagaggcttgatccaccaggccctagatgcctgagcccaggccaatgcttgatttgttcttgccagagctccagacctgcaggaaagtgacggccagaggaaaggggctcagagcagaagcttgacgctcaggtaccttggagggatctattgccttaggagagggatatgatatgggggaaagtccgaggcaagggagagcaggggcagggaggataaagggaaaagcagatgagggacagggaaaggattagccgggtgtggtgcccatcctggatagcccatcctggcttgaataaggagcatctgtcataataacaatagctgcaacttaatggaaccggctatctatatgccgggcattgcactagatgttttacatccattacctcactgtaattcctttagaatctctgtgaagtacacattattattcccctttgagggaggaggaaactgagtctcagacaggttaagtcccttgctcaagatcacccagctactaagaggtgtggctaggattagacccaggtctgtgggccccctgactcccccagcattggaagctggaggggccatggagtaggggctgtttgccctgagcccttctgtcccccactcctacccaaggctgcagaagtgtcagctccaggtccacgatgcggaggccctcatagccctgctccaggaaggccctcacctggaggaagtggagtgagtatcacgggaagccctggcgtaggagccaggaaaggaggttggagagggtgggcagggcctcgcctttgggtgggtggtgtgggggaggggcatgctgcctcatgaagaatttgggggaatcagatcattgtaacagctgctactattcagcacttgtcccgggtcaggtgctgtgctagggactgtacatgcctcctcgcattcactcctcacatctctgtgatgtaagcactgttactgtcctcattttatagaggaggaagttaagctgcagaaagataaacttgctcaaggccacacaggtaggaagagtctaggctagggttcaagcccagacagtctggctcgcagcctcatcctcataaccactgctacctctcttgctgagatctgccaagtagaaaccccaccacacctgggtctgccttccaaaccacagtccctcagggctccccccacccccttcatccttctcccagagtagagtgggataaccttctcttttcgggatggagaaattcccatggcgtccagcccctggctgaagccaataagagtagtgcttggggatggacggaggctctgtcacgaccctaggaggggcgcccctccaggaaacctccaagtgaacatgaaggcagatgatggaacgccaggatgtgttctgggtcgagtggccccacctcagggtaagacggataggggtgagggttgtcgtggtgatcacctcttgatcctggacctcgtcccattgggagaaccaggacagaattagaaggtggttttttaacaagctcacacacttctacctgcctcaccagcactgagcatgcccctccccgagtgccatcacctgcagaagcagccccatcacccgcctggttacgcagccacctcctagcccccttgcccttctcccacatttagtccctccagatggacctactggtagcgctcaaaactatcctcttttcctccacctttctagtccaacccaccctcatctcttacctggatgaccccctcgccttgccttccttgctggcttccctgctttcaccctggccacttccacctggcagagagtagatcacttttcactgatgcctgcccccttcactccttcccactgctcaggataaaacccacattctaaactcccaggtggtccagaaccctgcccccagcctcctaaaccccatctgaccccatccttccactcaatctccaatccagacacactggctctctttcaggtcctcatatgtgttatgccacagggcctttgaatgtactgcttctaccaccaggaacacccttcctccatctctcccccaaccttttacctactgaactcccagttatttcagcaagtagcttaagcaacaaataagccatccccgactcccagactaggtcagatgcccccataatcatgaagtttatcacaaaaagcaattatgtaacttgcagcataaaggaagagttgagggtggggccttgaaggcaggctgcctgggttcaaatccaggttctccctcgagcaagtgccttaactttactctgcacttaaccactctgcacttgagtttactcatcagtaaggtgaggataattacagtgcccacgtcatcggcactatgaggatgaaataggccaatagtcatagaagaacctaggatgttgccaggcatgtggtatggagtctgtcgatttcagttattatcaaggttcattcctgagagtgacactttgactaaagttagcaaaggaggagtaagtgatggggattgagggaggactccagccccacaatacagtgcattgggccccccgtctcagcctctcagggaaccagctggaagatgaaggctgtcggctgatggcagaggctgcatcccagctgcacatcgccaggaagctggagtgagttgtccaccccaccgctgggtaccagggaaggccctgtagagccccaggaggtccccgtgttcgtaatcagcagtaagggtgctgatccactgccacccctgcttcctcccaactccagcaaagtcaagatggtttgaccatgccttgccttcacctccggcatgagccactgtcttagtccaatcatctagcacccttacatgtgtaaaatgcgttcattatacatcagtggcttgcattccaattcatctttgtagctgccctggagcacggtggggtggggtgttgcactggggaggtgtcagggtgggtgggatgttgcactgtggaggtgtcatgctggggtgctagggtagggagtggtgtgttcctgtggggatacactgttggggtgaggggtggtgagatggaaaggtaggctattaggctgctgggtgtgctgtggtgttgcatggggtgagggtgatgtttgggtgggggtgtcttgggggtcttaggatcaagtgtgggtcgggtttggggagtgttgagattgggtagcagtggtttggggcctcagctttggatttcaatcttcgctctgtcacttagtagcattgtgaacctgggaaagtaattgaatgtctctgggcctcggtttcccctctgtaaaatgggatcacatgaaaccatatatgtacaaagccttttgtacagagtctggtatagtcagggctcagaaaatggtggttattttacagatgagaaaactgggggtcagagaggtgaaaacactgagttcttgctgtcaagctggacaactttattttccaaatgggatgggggtgtcatgcattttttggcttactcacacgcaccagaatcctttgagatcccctggcaagggacctaggacatccaggagtgacagccagcaagctgctgagccacagggaggggctagagctggctggggctgggtacctcagccacatgccaacggctgccttctcctgctctccacagcctcagtaacaacgggctttctgtggccggggtgcattgtgtgctgagggccgtgagtgcgtgctggaccctggcagagctgcacatcaggtgggagctccctcagaccacggtacccatccccccccccatcatgctctctctgaagcccttggaattccttctgggcccaggccttgggacgggcagaagatgctgctgctgtcccacccagaccccgttacagccggcacccctcttcctagctgctgtggatataggctgctcatggtttatacctctggagaactacccttggctgataagaaccagagacgcctggcagggtacaacccccactttcccctaacctagagtggccaatgacagaggcagagggcacaactctccagcccaaactctccagtgggacaaagctccctgggagactaggccaaggacttgctccgtttggcttccctcagtcccttactgtttctcctgagagcagaccgtcagttcatgatgtgcgcaactgacaagtgacatgcgaccccctaccccactcacagacccaggctctgccactagggaacccaatcctatttctgtaagtctcgccgttgagtatggggaggtgaggacagatgatgattaatgtcaactcagttcccactcggaggaaagcctcattctcaacccagtagggtggtccctgctttaaacacccctcaagggaggagagggaaaccgattcacccaaaaggtagattaggggaccttggttcactgtatatgatgattcaataaagggtccctagtgcattccaagcgatgccctgttcacttccaggaacttatactaaataaattatcacgattgtgcaaacacatttagctgtagggatgttcacctcagtattggttataataggaaaaaaaaagaaaatagctggaatgtttaaccgagggatattagttagactaagttacttccagagagaactcagtggaaccatagaaaaaaaaatgataatataggtgcagtttcaatatggaggggtgacggggagttattaagtaaacataaagaaatttctttagagacaggatcttgctctgttaccaaggctggagtacagtgacacaatcacagctcactgtaacctccaaatcctgggctcagcaatccatctctcttagtctcccaaagtgctgggattacagtcatgagtcactatgcctggcaattttttttatttttagtagagagagggtcttgctatattgaccaggctgttctcaaactcccgagctcatgtgatcctcctgccctggcctcccaaagagcaaggattataggtatgaaccactgcaccaggccaaacataaaaattttaactcattatcttaaaagattataaaagattataataaagcttttcaagatatgcaatggcagaaagaatggtataatctgggccaggtgctgtggctcatgctgtaaacccagcactttgggaggctgaggcagggggatcacctgaggtcaggagttcaagaccagcctggccaataggatgaaaccccgtctctactaaaaatacaaaaactagctgggcatggtggcgtgcacctgtaattccagctactcaggaggctgaggcaggagaatcgctggaacctgggaggcggaggttgcagtgagccgagatcatgccactgcactccagcctgggagacagagcaagactctgtctcaaattaaaaaaaaaaaaaaaaaaagagagagcatggtatatataatctgttcccatcaataatgatcaagtattaataattatttgtcatccctgcttctagcccttaaaaaactaatgtttaaaaagagaatctatagtttaatcccatgtttgtaaaacaaaaattattgcactagaaaatggaaggtttgaaggactcactccaaaggttaccaggggtaatccacacatactttgagcacagacagaacactgactagcagagagaggggtttcagtctggggctaaaagagagaacacagaatttgttttcttttaagacttgccaggaaatggggcttacttaggcaatagatacatttgtgaaatatctgtggtagaaagatttcagccctccaaaagctcagaggaagtcagaggggagtcagaggaagtggctgcagctggaggcagggggatggaacttgagaggtcctcccgggccaggggtaaaaagtgacaggccgggcacggtggctcacacctatcatcccagcactttgggaagcaaaggtgggaggatcacctgagcccagaagttcgagaccagagtagacaacatagactgtctctacatacttttttttttaattagctgggcctgatggcacaagcctgtaatcccagctactcaggaggctgaagtgggaggattgcttgagcccaggaggtggaggcttcagtgagccatgattgcaccactgcacaccagcttgggcaacagactgagaccttctctcaaaaagaaatagtaacagggagccaataacctctcgcttcctcacccctcttttgtcttcacagcctgcagcacaaaactgtgatcttcatgtttgcccaggagccagaggagcagaaggggccccaggagaggtagggcccgatttcaccccaactccatgctcagtcagggacattcccctctctaccctccacagctgggcagtgccagtcagtcaactgccagggtgacctggacaaattcacggaagagcgggaagtgagcaggcttggcaaaggatgcagccccaaagggggagggtccaaatccagaccacctccgcctctcatggtgcctgaaaggagccccagtgtgtaggatatagacagcaggccagggcaggagttgggtagccagagggggattccgggagactagagccctccagcttaaacccaggggattgcctggcctgtagctctggtcctggtcggaacttctgtatccctttcacacaaggacccattagggtcctggattgccccagcctagcgcatgggtagagactcagctctttgctcccggagcccacccacaatctcttctgtagagtctggactactgaaggctcgattccagctggggctgacatctctgaagcacagatgaggaggaggatgagattaatgataatagcagtcaaggtcaattgagtacttgccatgtatgcaccaagcaccaaactaaggcagttcacatacagtctcccattgagaggctgtgatttgtccagggtcacacaaccaggaagtggagaagccaaattggcaccaaggtctgattgactctaggtggaggatagggctcgatggtggaaggccaggctgaggatggattctggagatggcggacatggcctttgctcagcctggccttggtgatgtccctccagggctgcatttcttgacagcctcatgctccagatgccctctgagctgcctctgagctcccgaaggatgaggtacagtgatggcctccagccctgtgtgtgattccagccccctcccttcccctgctcagagcctgctcccaaacctgtgcccaggccccacatgctccctgaaggacacctgacctgctgtgtccaggggtcatggcctggcttccctacctcctacctcccctgcccagcccaccccagacagggctcacaaggcagccccgtcaaccaccttcccaagcccaggagaccccactccccttagctccctgacccccagcagctgaggggttgtggagactctgaaaagaggtgaaggggagcactgggctccttctgtcatgatcctggtgcctgggcctgggggctcccatcagcactcttccccccttctctcttggtctttgtctgtcctaatctccctctgtccctctgcctgtttctctcatttcttccctctctcatcgtgtatttctgttttatcagtttatttaactgttatttcagtcttatctgtcttcctctgatctgctctctctctctgaggtctctgtgccttggtttccttccatctgtgtctctgcccaccctctgcctatatgtgacatcctgtgggtgtcgtgtgtgttggtccctctttgtccgtctgtctaggtgccagatacatcccagtccctcctctcctgcaagcctcattctctgcctctgtgtctggggggtgggaaagcggctccttcccgcctctgttcagtggggcatgcagcactgtgtttttgtccctgggcaggctgacacattgtggcctccaagaaaagcacctagagcagctctgcaaggctctgggaggaagctgccacctcggtcacctccacctcgagtgagtggtttgtgtgttggaaggtgggtgggtggggccaattacagtgagttagtgttggtgtttgggtttggtttttaagatttagatcaactgttctttccctgctgaagtcagaaaccccttggagaatctggtgaaagttgtgactcttcctcccaagatacagatcccccatgtctgacacgctcggaggctcacccctggtccctcagaggtccacgaacctcagaataagaacctgggggagaccccagctgcccgtgccagatctgctgagatctggcctggcagcccagggctgtgtccagtttcaggaagttgagtaactggaatgcagggaccatgctgccagcaacccactccccacctgctaatgttctcccctcccttctccccacccccagcttctcaggcaatgctctgggggatgaaggtgcagcccggctggctcagctgctcccagggctgggagctctgcagtccttgaagtgagtagcccgctaggcagagcctctgaggctggggcagggggggagcattctctgtcccatccccctctttcctggggttattgtaaagattaaatcggaaaatgcatgaaaattgcccctaatacaatgtaagttctcggtgaaggctagctaatagatgattcttactcagagagtctgtgactcaataatcccacttctgattcaaggtttcacttctggaacctgtctccgcatctctgaacaggcttctgaggccaccctggggagggcaggtgtgggtgcgaagtatgactaacggctggcagttgttattctggccctggggtgccgggaggggctggggctgttagctggggtatggtcagggtagacagggagggtttgtaccagagaggacactcaagcagggtgcccagggctgccaaggatccctgagtacctggcagagagtgtgtaggaggaatccccaaagtttgcctgcaatggaccagagttcttgatccctaaatgcccttggtgcttttggctcacaaagcaccccctcctcccaggcacttctgggccaaagccagaggagcccaggggagaggtcacaggtcctatattccaggctgtctctgtgaacacgctttgctgtgtgattctgggcaagttacatcccctctccgagtccctggttcccagtcggtaaatacataaattgcaggcgtggcctctgttggtggctacgatctctgaaatgagtgctggggcctaaggaccccctgctcacaccctgtttttgtgcaatgctgggaaggaagggagttgccttggttcctgttcagggcctgcacctgggaaggaaggaaggtctaaccattgcaggcaaattacatgaagactggaggttttagtatgtcctcatgtgaccttcttattagtgtggactcgtgacctggtgctgtgagggtccacactcgccctaccagtgtccccgtgggaggggagtgtagcattaaatagtaaatagaaaacaataacaagttgacaggagaccctgaaagaaaggagacactttgttcctgctttctgcacaagagaccctgcattttcattttgtcctgggtaccacccctcccttatcaggtggagaaaaggaggcccagctccagccagaaagcactcctcagatccatcacagaccgagggacccactgggtgcccatctcagctctgtcaccaacatgtctcataaccttgggctagaccttgattctctctaggactctgtttccccatctccaccatgaggacttgcaaggggtgctctctgaccatcttgggttcagtgggttccgtcatctggaaccagggatccctcccccgccctgtgccctgaccacaaagaggatgtgtttgggtcctgagtgacctccattgtgccacccctgtgatctccagcctcagtgagaacggtttgtccctggatgccgtgttgggtttggttcggtgcttctccactctgcagtggctcttccgcttggacatcaggtgagcgtgcctctccgcccccagccctgcccctgtcccccatcccacaggtcatctgctcccacgtgggccccttgtccaccagtttcatgccaacctgtcatcctcagcaccttgggcagtaccagatctgcagagcatgtgatgggcgtccactgaatgaatgaatgatcaaatgaatgaataagtatggcctcacggatgctcaaatttctccaaattcaccattagagagttcattgactctgcctcactcgttctttggatagtccttagagatttttttttttaggattttttttttaattattatactttaagttctagggtacatgtgcacaacatacaggtttgttacatatgtatacatgtgccatgttggtatgctgcagagacttttaagaaaactgggggccaggcgcggtggctcacgcctgtaatcccagcattttgggaggccaaggtgggcggatcacgtgaggtcaggagtttgagaacagcctggccaacagggtgaaaccctgtctctgctaaaaataccaaaaaaaaaaaaaaaagtatctgggcgtggttgtgagcccttgtagtgccagccgctcaggagtcaggagaatcacttgaacccaggaggcgaaggttgcagtgagctgagatcgtgccactgcactccagcctgggcgacagagtgagactccatctcaaaaaaaaaaagaaaagaaaagaaaactgggagcttcctagttgccactggggactcagggacctgtcttaattgtgggagctgatgagaatataaaaggggaggcaccagccagccaagccaccccaggcactcagggcaccgcatccatgattttcaggggaggtctgcttccctttcccttccctaaggacccccaagaatgggaggtgccacagcagatggaccaggctcagttacttaactgctgcgagctcagagcaggtcccagagcctctccaggcctcagtttcctcatctgtaaaatggagataagaataattactggcctggcacagtggctcaagcctgtaatcccagcactttgggaggccaagacaggaggaggaggatcacctgagcctaggagtttgagaccagcctggacaacatggtgagacccccccatctctacagaaactttaaaaattagccaagcgtgatggcatgcacctacttgggaggctgaggtgggaggattgcttagactcaggagatcgaggctacagtgagttgtgatcacaccattgcactccagcctgggcaacagagcaagactctgtctcaaagaaaaaaaaatgtcaggcacaatggctcacatctgtaattccagcactttgggaggctaaggcaggaggatcgtttgagccatggagtttgagaccagcctgctcaacatggcaaaaccccatctctacaaaaaatacaaaaattagacagtcatggtggggcgttcctgtagtcccagctacttgggaggctgaggcagtaggatcagttgagcccggggaaggttgaggctgcagtgagccatgactgcaccactgcacaccagcctgggcgacagagcaagaccctttcttcgaaacaacaacaaagaagaatttcttacctcattgtttattgtgagaatcaaatgagaaatgtcgatggtgtgctttgcatgtgacttgatacatgtaattgttgcttaatctattccttgtttgctaagaaagcaggccaccccaggccctccttgccctgaccagtctgggttcttgccactgccagggaagttggtctttgaccattttcaaactgctgcttcctctctgcttccagctttgaaagccaacacatcctcctgagaggggacaagacaagcaggtgaggagggaacgctcggggtgggggagtcccctcccgctctggtccccgtctgttggaggtccccccacccccagacccatgctgaccactcagctctcagttaaaccacccaagtccggcacactaggtttaatcaccacttcagtaaccaccgccccccccataaattgtcagtaatcaactgccctgttttccccttggaaggaggcaatgcagatgggaggaagggagggatatggttgggagaggtcccagagcagggcaggtgcccgcagattgctgctgtgtgggaggagacaggagaacatttgtgcttctgcgtttcggggaattttgtagacccaccgctccatacatgtcactgccctttcacgctctgaaggcaggggccgtgggtgctctgaaaaaacattttccccgtcttcgcagtaaacaaccaatactagtttagctcttcatgatgttcccggctgccctctagtgggaccaggcctcttggcctcacttgggagcagtggcagcggacagggtgggcccatgtgcagctggctgggtggagagagtcacagctagtgtgtcaagaaaaggcactgccgtacagatgggctgtcaggagtcaggggtggctcaagcctgggtggtcttgcttcccaggataggatctctgtttctggggaacccccgggttcttgaggcccaaagaactgacgtacagggaggcagaagtcatgtgatgccaagcagtggtcagagaggctctgtcttgggtcctcctgcctgctcacctggacaggaacaagctgctggcttttctaactcaggcttcccttccctgagcctcagtttccccatctgaacaatgagggactgagctaggatctagtgactgcattgtctctgagatgccttccagccctgactttccaagtctgggagtccaatgtgggtgatctgaactttcctttctaaacgatccccctcctaggggtatatgggctgggctgggagtccgagggggtgatctgaactttcctttctaaatgatccccctcctagggatatgtgggccactggatctttgccagacttcccagctgcagccaagttcttagggttccgtcagcgctgcatccccaggagcctctggtactgtcccagcccttcttgtttgggggtaaccataatagggatgaggcgtcagagggggcagagctggcagggggctagggctggggattgggatagagggaagagagggagtttaagagaaaaggaaaagaaagaggcgtgggtgtgaggggtgctgggagttggggagctctggcccctgacgggcagctcagctggcccatgccccgcattctccttggagagaagattccacatttctgtgaagcaaacagagcagctcagccactccctgcctggggtctccatctgctctgggggacacccactttccagaaagaaaggggttggcctgtctccccactaatacactccccatctgcaagctctgccatgagaggctgtgagaccctgacttggccccacctctctctaggcctccagggaagtggaggcaagtgaggccctgggaaggacatttcaatttcactgttagccccagggcaatggggagccacgggggtaacagggagaggcctggtcagatgtgcagtgttaaaatgtgagacacttgtggggcagagagggattaaagggaggcaagagtggaagcccagagggtgttaaatggtcaaggtgagtgaggatggtggcctgggctctggagggggcggtggggaggacttggagagtcactgacaagggcagctgggaactcagggtcctgcactgtcactgtcagggcaggaggattgggggctgcaggggagactcgagagggaagcgagtgccccacaggggaaggggcctgtggcctcccacttagagtgagggatgctgggagaaggatagagcccctggggctagccagggaccctgggctttctctgattccctgccctgcccattgcccctttgcagcctcagtgagtgtcctctggagcccccaagcctcacccgcctctgtgccactctgaaggactgcccgggacccctggaactgcagtaagtaacgaggacacagccccagagggcaccatgtggggatctgcccagtgacctgggagggggcttcttggttagaagacaggtgagtctttctcgatttcttcccaccagccctgccccatgagagtcccctggcctttggtagaaacttggctgtctctcggcagcccccagccttaggcagcgcatgtctcccactgggagatgctgtgctggactggggaagccttcacctgcaccatccactcaactcagggcacctgggagccctgtccacctccaaccccacccctggagcctcaccagggcacccacttgaacctgcctgcatggctggagcgtagcacttctgaaagcccttcctcaaggcacccccactctccttggggttaccacctcactcgccccagaacatctgggtctgtaaccagagactggacctggaatcaggactcttggctcaaaagggatttaactccccgggcctcagcttcttcatctgcacagtggatggtcagcctttccttttattgtcattgtggtgattctattatagtaattaccttaaaataaagaaatccaagacaaaacctgcctcacctaaacaacctcttctctcatcaaatccatgttgtcatgtgtccacaggactgtctactccttgcctatttgcatattcagtttctacctgtttgcagtcataaactagtttcatgcactgtg

SEQ ID NO: 15693 - DNA, 42837 bp, Homo sapiens
ctgagctgcctctgagctcccgaaggatgaggtacagtgatggcctccagccctgtgtgtgattccagccccctcccttcccctgctcagagcctgctcccaaacctgtgcccaggccccacatgctccctgaaggacacctgacctgctgtgtccaggggtcatggcctggcttccctacctcctacctcccctgcccagcccaccccagacagggctcacaaggcagccccgtcaaccaccttcccaagcccaggagaccccactccccttagctccctgacccccagcagctgaggggttgtggagactctgaaaagaggtgaaggggagcactgggctccttctgtcatgatcctggtgcctgggcctgggggctcccatcagcactcttccccccttctctcttggtctttgtctgtcctaatctccctctgtccctctgcctgtttctctcatttcttccctctctcatcgtgtatttctgttttatcagtttatttaactgttatttcagtcttatctgtcttcctctgatctgctctctctctctgaggtctctgtgccttggtttccttccatctgtgtctctgcccaccctctgcctatatgtgacatcctgtgggtgtcgtgtgtgttggtccctctttgtccgtctgtctaggtgccagatacatcccagtccctcctctcctgcaagcctcattctctgcctctgtgtctggggggtgggaaagcggctccttcccgcctctgttcagtggggcatgcagcactgtgtttttgtccctgggcaggctgacacattgtggcctccaagaaaagcacctagagcagctctgcaaggctctgggaggaagctgccacctcggtcacctccacctcgagtgagtggtttgtgtgttggaaggtgggtgggtggggccaattacagtgagttagtgttggtgtttgggtttggtttttaagatttagatcaactgttctttccctgctgaagtcagaaaccccttggagaatctggtgaaagttgtgactcttcctcccaagatacagatcccccatgtctgacacgctcggaggctcacccctggtccctcagaggtccacgaacctcagaataagaacctgggggagaccccagctgcccgtgccagatctgctgagatctggcctggcagcccagggctgtgtccagtttcaggaagttgagtaactggaatgcagggaccatgctgccagcaacccactccccacctgctaatgttctcccctcccttctccccacccccagcttctcaggcaatgctctgggggatgaaggtgcagcccggctggctcagctgctcccagggctgggagctctgcagtccttgaagtgagtagcccgctaggcagagcctctgaggctggggcagggggggagcattctctgtcccatccccctctttcctggggttattgtaaagattaaatcggaaaatgcatgaaaattgcccctaatacaatgtaagttctcggtgaaggctagctaatagatgattcttactcagagagtctgtgactcaataatcccacttctgattcaaggtttcacttctggaacctgtctccgcatctctgaacaggcttctgaggccaccctggggagggcaggtgtgggtgcgaagtatgactaacggctggcagttgttattctggccctggggtgccgggaggggctggggctgttagctggggtatggtcagggtagacagggagggtttgtaccagagaggacactcaagcagggtgcccagggctgccaaggatccctgagtacctggcagagagtgtgtaggaggaatccccaaagtttgcctgcaatggaccagagttcttgatccctaaatgcccttggtgcttttggctcacaaagcaccccctcctcccaggcacttctgggccaaagccagaggagcccaggggagaggtcacaggtcctatattccaggctgtctctgtgaacacgctttgctgtgtgattctgggcaagttacatcccctctccgagtccctggttcccagtcggtaaatacataaattgcaggcgtggcctctgttggtggctacgatctctgaaatgagtgctggggcctaaggaccccctgctcacaccctgtttttgtgcaatgctgggaaggaagggagttgccttggttcctgttcagggcctgcacctgggaaggaaggaaggtctaaccattgcaggcaaattacatgaagactggaggttttagtatgtcctcatgtgaccttcttattagtgtggactcgtgacctggtgctgtgagggtccacactcgccctaccagtgtccccgtgggaggggagtgtagcattaaatagtaaatagaaaacaataacaagttgacaggagaccctgaaagaaaggagacactttgttcctgctttctgcacaagagaccctgcattttcattttgtcctgggtaccacccctcccttatcaggtggagaaaaggaggcccagctccagccagaaagcactcctcagatccatcacagaccgagggacccactgggtgcccatctcagctctgtcaccaacatgtctcataaccttgggctagaccttgattctctctaggactctgtttccccatctccaccatgaggacttgcaaggggtgctctctgaccatcttgggttcagtgggttccgtcatctggaaccagggatccctcccccgccctgtgccctgaccacaaagaggatgtgtttgggtcctgagtgacctccattgtgccacccctgtgatctccagcctcagtgagaacggtttgtccctggatgccgtgttgggtttggttcggtgcttctccactctgcagtggctcttccgcttggacatcaggtgagcgtgcctctccgcccccagccctgcccctgtcccccatcccacaggtcatctgctcccacgtgggccccttgtccaccagtttcatgccaacctgtcatcctcagcaccttgggcagtaccagatctgcagagcatgtgatgggcgtccactgaatgaatgaatgatcaaatgaatgaataagtatggcctcacggatgctcaaatttctccaaattcaccattagagagttcattgactctgcctcactcgttctttggatagtccttagagatttttttttttaggattttttttttaattattatactttaagttctagggtacatgtgcacaacatacaggtttgttacatatgtatacatgtgccatgttggtatgctgcagagacttttaagaaaactgggggccaggcgcggtggctcacgcctgtaatcccagcattttgggaggccaaggtgggcggatcacgtgaggtcaggagtttgagaacagcctggccaacagggtgaaaccctgtctctgctaaaaataccaaaaaaaaaaaaaaaagtatctgggcgtggttgtgagcccttgtagtgccagccgctcaggagtcaggagaatcacttgaacccaggaggcgaaggttgcagtgagctgagatcgtgccactgcactccagcctgggcgacagagtgagactccatctcaaaaaaaaaaagaaaagaaaagaaaactgggagcttcctagttgccactggggactcagggacctgtcttaattgtgggagctgatgagaatataaaaggggaggcaccagccagccaagccaccccaggcactcagggcaccgcatccatgattttcaggggaggtctgcttccctttcccttccctaaggacccccaagaatgggaggtgccacagcagatggaccaggctcagttacttaactgctgcgagctcagagcaggtcccagagcctctccaggcctcagtttcctcatctgtaaaatggagataagaataattactggcctggcacagtggctcaagcctgtaatcccagcactttgggaggccaagacaggaggaggaggatcacctgagcctaggagtttgagaccagcctggacaacatggtgagacccccccatctctacagaaactttaaaaattagccaagcgtgatggcatgcacctacttgggaggctgaggtgggaggattgcttagactcaggagatcgaggctacagtgagttgtgatcacaccattgcactccagcctgggcaacagagcaagactctgtctcaaagaaaaaaaaatgtcaggcacaatggctcacatctgtaattccagcactttgggaggctaaggcaggaggatcgtttgagccatggagtttgagaccagcctgctcaacatggcaaaaccccatctctacaaaaaatacaaaaattagacagtcatggtggggcgttcctgtagtcccagctacttgggaggctgaggcagtaggatcagttgagcccggggaaggttgaggctgcagtgagccatgactgcaccactgcacaccagcctgggcgacagagcaagaccctttcttcgaaacaacaacaaagaagaatttcttacctcattgtttattgtgagaatcaaatgagaaatgtcgatggtgtgctttgcatgtgacttgatacatgtaattgttgcttaatctattccttgtttgctaagaaagcaggccaccccaggccctccttgccctgaccagtctgggttcttgccactgccagggaagttggtctttgaccattttcaaactgctgcttcctctctgcttccagctttgaaagccaacacatcctcctgagaggggacaagacaagcaggtgaggagggaacgctcggggtgggggagtcccctcccgctctggtccccgtctgttggaggtccccccacccccagacccatgctgaccactcagctctcagttaaaccacccaagtccggcacactaggtttaatcaccacttcagtaaccaccgccccccccataaattgtcagtaatcaactgccctgttttccccttggaaggaggcaatgcagatgggaggaagggagggatatggttgggagaggtcccagagcagggcaggtgcccgcagattgctgctgtgtgggaggagacaggagaacatttgtgcttctgcgtttcggggaattttgtagacccaccgctccatacatgtcactgccctttcacgctctgaaggcaggggccgtgggtgctctgaaaaaacattttccccgtcttcgcagtaaacaaccaatactagtttagctcttcatgatgttcccggctgccctctagtgggaccaggcctcttggcctcacttgggagcagtggcagcggacagggtgggcccatgtgcagctggctgggtggagagagtcacagctagtgtgtcaagaaaaggcactgccgtacagatgggctgtcaggagtcaggggtggctcaagcctgggtggtcttgcttcccaggataggatctctgtttctggggaacccccgggttcttgaggcccaaagaactgacgtacagggaggcagaagtcatgtgatgccaagcagtggtcagagaggctctgtcttgggtcctcctgcctgctcacctggacaggaacaagctgctggcttttctaactcaggcttcccttccctgagcctcagtttccccatctgaacaatgagggactgagctaggatctagtgactgcattgtctctgagatgccttccagccctgactttccaagtctgggagtccaatgtgggtgatctgaactttcctttctaaacgatccccctcctaggggtatatgggctgggctgggagtccgagggggtgatctgaactttcctttctaaatgatccccctcctagggatatgtgggccactggatctttgccagacttcccagctgcagccaagttcttagggttccgtcagcgctgcatccccaggagcctctggtactgtcccagcccttcttgtttgggggtaaccataatagggatgaggcgtcagagggggcagagctggcagggggctagggctggggattgggatagagggaagagagggagtttaagagaaaaggaaaagaaagaggcgtgggtgtgaggggtgctgggagttggggagctctggcccctgacgggcagctcagctggcccatgccccgcattctccttggagagaagattccacatttctgtgaagcaaacagagcagctcagccactccctgcctggggtctccatctgctctgggggacacccactttccagaaagaaaggggttggcctgtctccccactaatacactccccatctgcaagctctgccatgagaggctgtgagaccctgacttggccccacctctctctaggcctccagggaagtggaggcaagtgaggccctgggaaggacatttcaatttcactgttagccccagggcaatggggagccacgggggtaacagggagaggcctggtcagatgtgcagtgttaaaatgtgagacacttgtggggcagagagggattaaagggaggcaagagtggaagcccagagggtgttaaatggtcaaggtgagtgaggatggtggcctgggctctggagggggcggtggggaggacttggagagtcactgacaagggcagctgggaactcagggtcctgcactgtcactgtcagggcaggaggattgggggctgcaggggagactcgagagggaagcgagtgccccacaggggaaggggcctgtggcctcccacttagagtgagggatgctgggagaaggatagagcccctggggctagccagggaccctgggctttctctgattccctgccctgcccattgcccctttgcagcctcagtgagtgtcctctggagcccccaagcctcacccgcctctgtgccactctgaaggactgcccgggacccctggaactgcagtaagtaacgaggacacagccccagagggcaccatgtggggatctgcccagtgacctgggagggggcttcttggttagaagacaggtgagtctttctcgatttcttcccaccagccctgccccatgagagtcccctggcctttggtagaaacttggctgtctctcggcagcccccagccttaggcagcgcatgtctcccactgggagatgctgtgctggactggggaagccttcacctgcaccatccactcaactcagggcacctgggagccctgtccacctccaaccccacccctggagcctcaccagggcacccacttgaacctgcctgcatggctggagcgtagcacttctgaaagcccttcctcaaggcacccccactctccttggggttaccacctcactcgccccagaacatctgggtctgtaaccagagactggacctggaatcaggactcttggctcaaaagggatttaactccccgggcctcagcttcttcatctgcacagtggatggtcagcctttccttttattgtcattgtggtgattctattatagtaattaccttaaaataaagaaatccaagacaaaacctgcctcacctaaacaacctcttctctcatcaaatccatgttgtcatgtgtccacaggactgtctactccttgcctatttgcatattcagtttctacctgtttgcagtcataaactagtttcatgcactgtgttttcatagcatctgtgttttccattttgcttcagtcttttttcttgctttctagcccccatctcaaatgcccttccagcccttccaaccagataatccggtttgaccccctggagtgtggccttcccatgtccttctccaggttcaaacatataaccacaaaaccattatcagacctacactattttttttttctgagacagagttttgctcttgttgcccaggctggagtgcaatggcgtgatctcggcttgctgccacctctgcctcctgggttcaagcaattctcctgcctcagcctcctgagtagctgggattacaggcgcccgccatcatgcctggctaatttttgtatttttagtagaggcagggtttcaccatgttggccaggctggtctcgaactcctgacctcaagtgatccaccttcctcagcctcccaaagtgttgggattacaggcttgagccactgcacctggcccagacctaccctattaatggcaattccttaaagtcaaccaatggtcagtggtccctgattgtctcttacctgttttcacagagtatatactgatgccttttaatactaaattgccacagtacgggacgagctgcaagttactccaccacacccttctagagtctagatcaagggtgtccaatcttttggcttccctgggccacattggaagaagaaaaagaattgtcttgggccacacataaaatacactaacactagcgatagctgatgtgctaaaaaaaaaaaacaaaactccaaagaaaaatctcatagtgttttaagaaagtttacgaatttttgttaggccgtattcaaagccatcctaggctgcatgcagcaggccatgtggcttggacaacttggtctagattgaaatccaaactgcttctaggtgttgtgttttgttttgtgtagcactgcagtcagtgctacaaaaagcactcttacgtgatttgactgttaagtacctattgtataccatgcactgggccagatcctgggaacacaaggagactgggatgcgggctctgctggccaaggcaaatcatctgcagaggaagcttaatataaaaagcccactggcggcccggcacggtgactcacgcctataatcccagcactttgggaggccgaggtggctggatcatgaggtcaggagttcgagactagcctggccaacatagtgaaaccccatctctactaaaaatacaaaaattagccaggcatggtggtgcacccctgtaatcccagctactctggaggcaggcaggagacttgcttgaacccgggaggcagagattgtggtgagccaagactgcgccactgtcctccagcctgggcaacagagcaagactctgtctcaaataaataaataaataaataaataaataaataaataaagcccactggcagcactgggcggtctgagcacaggtgggagtttcaggtccccctccattacctgtggttggggaaagtgcaatagtgaatatgaaagcactttgtcaactgtagagtactgtgatcacttgcaggattattgctataaatagtcatcaaggtactcaatgctgaagtccagtgattccccggggttccaccggggaagccagggaagatagattgtggggctccatcccccctccctgaattcaagcactgcaggtctactttgcctgtgtacacatgggcataccatgtgggatgtggtaaagagtaaagattccattgctttaaaaaaaaaaaaaaggagggtgtaatcacctcctttgccaaccagagcccatggtgtatttgggggtctggtgggacaccatacgggatgtgtttctggaaagaccaccctcaataaaggccccagtcctgactgtgcctcaggggcccatgcccagtccctggggcagaaagggtagagttgggcctccagcctgggccctggcagaggctccaacatgaggctgctcctcccgccctaccctgccccccagctcactgagccagttgatgtagggcccctgtactccatgcctcccctccaaacagccagaggagaaagcagcagagatgggccaggcccttggaggccccggagaggggagagggcagcctgcagaggatgaaggaacagaaagagaggaagggggaggtggagaaggcagaaggagaacatagtagaggtctgcgggggttgggaagtggctccaggccccccaggaaggggctgtaggtaaaccccagggaactcagtgtcttgagttgtcctggtcctccatctagagcagagacagcaaggcaggtatctggagtttctcctaaatgcactgggttctgacgaattatctgaacaatgatgagctggttggtctggtgttaatgggcaactagagacccaagccagtccctgtctccttcgctgacctgttgtatgctgaatttccactgtcatatccactcctctgggttaaggcagcattgttttcttttcttttttatttttttgagatagagactcgctctgtcacccaggctggagtgcagtggtacgatcttggctcactgcaacctctgcctcccaggttcaagtgattcccatgcctcagcctcctgagtagctattactacaggtgtgcaccaccacgcctggctaatttttttttcgttttttgtagtagaggtggaatttcaccatgttgcccaggctggtcccagactcctgacctcagatgatccacccacctcagcctcccaaagtgctgcgattacaggcatgagccaccatgcccagctgcattcttttcttaacaaacatgttttgcggaacactaaccttcatggcccttaaaaattaattctgctagtccatttagtttggggaaaagtctgctgtagctccttggaaattcataatgcacagcagcctatcgcagcctcagagaagccctgcagcaaacaaaaccatttaatttggcttaaccccgtatttcccaaacttaaaagaccttcctcttcttccagcctcacggataacccatggacccagtgctgggagggaatgtttcaggtgaccctggttaggtcccatctccagaaggctctggctatgaggccgtgctccctgctttcctggaaggtttcccccacctcatccacctgctttgtttcacagattgtcctgtgagttcctgagtgaccagagcctggagactctactggactgcttacctcaactccctcagctgagcctgctgcagtaagacgagagtttttcctatttcccggttccttgtgctcgtgtttctaaggctcctccatggcaaagctgtacctgccctctaacccctcaaccccccgcctttaccccctccaaccccctctacccgctccattctttccttaggttgttttatcattttacctggcacaactggggactccaatctgcttccagctccaccctaatactttgtcaacctcagggggcgtcgtttgcctcctctgcgtctcagtttcctcatctgacaaatgggattaatattccccgcccattcccccagagttgggactcaaataagttattctaaaatcaccttaagaaatggaagatctgtgacaaatgagctgtccaacttctccccacccacggagggtcacccactcgtagaaaggggctgtacagatgtaggtcctgtacttatcacatgctgctttttaaaggtcaccgtcaaactcgcaaaaagggaatttaagcagaattcccccaaagtattaaaactattttctaatttcagctcagactggttagaattttaaaagtatttaggccatgtgtggtggctcatgcctgtaatcccggcactttgggaggccgaggcgggcagatcacctgaggtcaggagtttgagaccagcctggccaatgtggtgaaaccccgtctctactaaaaatacaaaaattagcccggtgtggtggtgggtgcctgtaattccagctacttgggaggctgaggcaggagaattgcttgaacttgggaggcggaggttgcagtgagccgagatcgcgccattgcactccagcttgggcgacaagagtgaaactccatctcagaaaaaaaaaaagaaaaaaagaaaaagaaagaattttagaaggatttactttaaacagtcttctagtggtgggaggcggggtgggaagcagctgcagctaagatgaaaaaatacagcaggaaagtaaatcataatgttaataacatcggtgcaaaggctggggctctctgggatgtctaagatggctcgcatcacctccaggatctcgcttatgcttgggttttatctgggagggagggaggagacgtgacaacattccaggggcaagtacagcccagctcacagcaccccatggcaccctgtaatagtcccaccctgcccggagataatgagtcagaaaggactcctttggacataaaaggtggcaggttaaaattgaacaggttggaaacctcagaccggagaggaacttctctttgcctaaatcacacagcttcacccctgactcctcgtccgcctttggagtggcgtggccagcctgaccccttgccagggtttaaactttgtagtactcaacgtgtagtgcttgtggccctactgtgggccaggcattgtgtgacgacacagcagaaaaagttgaccatgtccttatcttcttggagctcctcttacaatagtgggagctgaaaaataagtaaagtaaaatcaaataagatgaacttagccagtgataagagaattttctcgggatgtggtgaagagtggctggagaggtgatttagatgtggcagaagccatcagggaacatctctgaggagggatgctgagctgggacctaaaggaagagagagagctcgccttgtgaagagcagggaactgcattccaggcagagggaacggcatgtgtgaggccctgaggcatgattaagcttggtgggctccaggaacagcgcggaaccgagacagccagagcacagtgactggcagggacagtcctaggagaggaggaagagagagatgggctcgggttgggttgcatggggcctggcacccatggggagagtttagacttttgttcctgggaacatgaaagggagaggaataatttgggttttctttctttcttttttgtgggggagggtctcgctctgtcacacaggctggagtgcaatggcgcaatctcggctcactgcaacctccgcctcccaggttcaggcaattcttgtgcctcagcctcccaagtagctgggattacaggcgtgcaccatcatgcccagctaatttttgtatttttagtagagacagagtttaaccatgttgaccatgctggtctcaaactcccgacctcaagtgatccgcccgcctcggcttcccaaagtactgagattacaggcaggagccactgcacccgttcctcatttgggttttcaaaagttcagactgagtgctgggtagagaatggattgggagatacgagtggaaatgagagtgggaagagatgtgtgcagcagggtgaagggtgctgggggctgatcactgctggggtgggatagaagttggtagactcagggtggatcttgagagtggaatttacagacaagctgatagggggattactggatgaggcaaatggaggtgctgaggctgcctctgagggcagagtggacccatctcactttctctaaggcagtggtttccaactgggggtgattttcacccttgggagtcatttggaaatatctggagatatttttggtggtcatgactgcgggtgaggggtgctgctactggcatcgaatgaatagagatctgggatgctgctgaacatcctatagggcacaggagagcccacaacaaagaattattggacctcacatctcaatagtgctaaggtttaaaaactgtgtctgaagggcctgaagcttcccactctctgtgagcaaggactcgcctgtgaaatctgtgcttgcaggtaaaaacaatagtaataataacagcaagcacaggtcccatgcccggcagtgcacctgcatgatgtaattaaatcctcatatacctcgagagtcatacatgacgagtcttgatttccagataaggaaactgaagctcagagaggtgaagtcacttctccaaggtcacacagccaataagcagaactgggactcaaatccaaatctgcctgtccctcagccctatttgtgcctcttgatcccctgcctgcttccctattgccttgctgagctgctagccctccccaccctccctttccttaccctccaggctagccaggttccttgtccactcatcttgccggatctaccccctttccttttcaggctgagccagacgggactgtccccgaaaagccccttcctgctggccaacaccttaagcctgtgtccacgggttaaaaaggtggatctcaggtgggcattcccctgggacagccaggactcgtcctgaagggttgtgcctggagtctggtgggtatgagggggtaggatgaagacagtaggacccaactagaggctgggcttccggaggaggggtgctggccccgtgggggcatcctgaggctgtggccacagctgtctgacccaggtcctgtctgatccaggtccctgcaccatgcaactttgcacttcagatccaacgaggaggaggaaggcgtgtgctgtgggtaagcccccttgaaccatgcctaggcagctagttgatgttggggaccagtagatctgcctcctgggtggccagagcagtatgcagactgcctaccacaaaacattcccctggaacaaccctgcagagggacttgtttcacccagcatgaagaaacacaggtccgggtgggatctactgtgggggtgggagcagtggattctggacacttccagagggtccaagcttgagtggagacccacctggagcccagaggctgtgccctgggctagccaggccggagggggtctcagtggccaaacgccccatcccctgcttgtcccctttacctccgtccagcaggttcacaggctgcagcctcagccaggagcacgtagagtcactctgctggttgctgagcaagtgtaaagacctcagccaggtggagtaagttgagggaggaggaggaaggagaggagcatggacgcatgcctgaggggcactgaagggggtatgagggtccgtgtgtgcacatacactcatgtgtgcctgcctacacctctcaggaccagctgtcagggatgcctgggtcacatacccaaagcttccctgaatcaattttctctctcccgcccccactctcgccatggtggagctagttccatggtgtgccctctgacttgggcagccctcagcctcaagtatgtgcaagctctgctggcagatgggggctaaaacgcaggattcattgttggcccagcaggtggttaaaagtaccggatgactctgcctgaggagggacgcagagccagccagggtggggtcttgcagtctcttgtattgttgagatgtggtatctgcgtggcctgtcttggatattcaaatagtcagcccctgcatgggtggaataataatagctaacagctactgagcactttctccactgttctaagtgcttgacatgttctttttatgtttcccatatccctggatactagtattgttctcattttacagatgagggaactgagacacagagggtgtaagaacttgcccaaggtcacacagctagtaaaatgcagagtccctgctcagacgcattgggaatccagcctaggaccagtgggaaatagagagagcagtccgccaaaaatgccacacaattttcatttctgttgtgatgtggcagagaagaaaaatgtgactgataaaatcatggatttcttttttttttaagacctggggtctcactctgttgcccaggctggagtgcagtggtgcaatgataggtcactgcagcctccaactcctgggctcaagcgatcctcccacctcagcctctggagtagctgggactacaggcacacaccaacatgcctggctaatagtttagttttgtaagagatgaagtctcaccatgttccccaggttggtctcaaacttctgagctcaggtgatcctcagcctcccaggttgctgagattacaggcatgagccgctgtgcttggaatgtattttaaacagatatgaataagaaatatgtctttgagttttttgtttttcattatagagggaaatttttcttttctttctttctttttttttagatggagtctttctctgctgcccaggctggaatgcagtggcgcaatttcggctcactgcaacttccgcctcccaggttcaagcaattctcctgcctcagcctcccaaggagctgagattacaggcatgagccaccatgcctggctaattttggtatttttagtagagacggggtttcaccatgttggccaggctggtcttgaactcctgacctcaggcgatccgcctgcctcgccctcccaaagtgctgggattacagccttgagccaccgcacccagccaatttttcttattttaaagactattttattaagtggcttcataagacagaccaatttttaaatgacgtttctcaggaaaagatgaaattaacaaacatcaaaaatgtcacagacctaggaggaaaatcagatgttccgggacacactggttatattatttctgaaactgtagttaaaactagctgggcgtggtggctcacgcctgtaatcccagcactttgggaggccaaagcgggtggatcacctgaggtcaggagtttgagaccagcctgatcaacatggtgaaaacccgtctctactaaaaatacaaaaataattagccaggcatagtggcacatgcctgtaatcccagctacttgggaggctgaggcaggagaatctcttgaacctgggagacagaggtcgcagtgagccaagatcgtgccattgcactccagcctgggcaacagagcaagactccatctcaaaataaataaataaataaaaccacagaatgctgcaatgaagggaagtaagaaacttcaggtgaggtttccaatattgatattgcattcccagattaaaagaagaaatctatgggtttaatgcatcctgcaaacatttttttttcctgaatttcctctcattcaaaaactgtggatcccaaatgatgccggccaagggcgtggtgaaggcaaattggtttttctttaacccttgaaagcctgctggaggcacctgagctatgagtggtcacccgatatggaagaggaccaagaggatgggtttactgtggtgctggggaggggatagtagcagagaacgtaggagttgctggtcattctagtggtgatggaagggatggtgatggtggtactgggcttggtggtgtagaattgtggtgataatgaaagtggtggtggtgatggtggtaatactggtggtggtgacattggtggtggtggtgatggtggtgatactggtgatggtggtgatggtggtggcgctggtgaccctgacatggggtccagtagcagtgacagtggatgcaggctcctggtgactgaggagcatctcaggctgaggaggcacctctgatccccgccactgctccttaccccctacagtctctcagcaaacctgctgggcgacagcggactcagatgccttctggaatgtctgccgcaggtgcccatctccggtttgcttgagtaagtggaaagcagcataaaggacagatagcaaggaggaaggctcccctaggccaaaagcatgatgggggctccttctgagggcatcccccagagcaccagaggacaaggactgtggagggcaaggggcaattcttcccttgccttcactcccctggccttgggtcctttcctctgtccctcacacccaccatgggcagatcctccaccaaacacccaagagaggctgtgattcgtggcagggtgacacacccctacagccaaactgacctggggacagggaagcaacattccatccccaaccagctgatgcgggattgcagctgcctggctcctggtccatcccgtccctgaaattcttctgacccaatctgtggaacataaatgtggagatgtccctgtggcaggcaaggggccttaggaagtcatccacatggttgccccatctctcccgtgacctgctggagtgacagccagctccaggacaccacttgttgctaggcaactgagcttcgtgctcgggagtccttgacccatgcggggctagagctgccagcctggccttgccagtgcccagaccccagaccacaggggcagcgggcagggtgagtgcagcgctcaaggactcagggtctggtgccagttctgcctgtgtggggatggtatccttctgggcctcagtgtgtccatctggagaatagatgcttagacatggaggcttctcttcttggaaatgacagctggaagggagatggagggggctgggcagggctccaaggaggtcctgccctcactcccattctcatctccatttcccttctagtctgagtcacaacagcatttctcaggaaagtgccctgtacctgctggagacactgccctcctgcccacgtgtccgggaggcctcagtgaagtaaggggatgttggtccccgaaaagcccctttctgctggccaacaggtgcccctggctgatgatgggagaagcaaggcacccacactttgtggccttccatctgggtggcttggagcaacctctgcctttctctgaatctcagggtttcctgggcatgggatcataatttctatcccctgatgcccgggtgccatggggaccatggaggccatggggtgggaaggccaggtattgccatgctcacagaatgagtttgggggtctcctctggttctgaggcctccatcctcccttgtccttgtgggtgcagccccgcttccctctctgtgccctgtgggtgccctaggtgcctaggaagctggcatgtctgggcaccgtgcttccccaggcccttctctctgcagcctgggctctgagcagagcttccggattcacttctccagagaggaccaggctgggaagacactcaggtaatccctgcagggtgatgggacaggggacagagaggggagaggaggctgaccctatggcggcctccatggccccctcttccctgggccctctcctcctttagagagcagcttcaagctcactgcctgggtctgttcctccagatctgcccccgatgccctggtaactccagtctcagccagggccttggcattgaacttgtgcctcttagcccaccatcctaagcccaactcagcccaacattctcttccttgccatgtcctgactacaggccttgaggcttctgagtgtcacggttaaagattttgaagccaactgaaaataaatccctgatctgccacttaccagctatgtggccctggacaagtaaaatggggataataacacaacctaccccttagggttattgtgaggattaaatgagttaataagtataaagtgccaggaaaaggtctggctcatgggagtgctgtcagcagttattgtaactgttattattattattattattattattattattatcattatcattacccctggtagccctgactcactgccacggccagttcctttacatgtcttacttcagctgtgaacagggcctccaaactgatccctgcatcttatcaggcctcctcccctccattcactccacagcccccagagggatcttcacaacacacatctgacagtgcccctctgctactctgtgcccctcagtggctccccattaaccccagggtgaagttcaaagtccctagcatcttctccctcacagtctgatccaactgtcaccttccaccatgttccttcccacctcccccacaccacacacacgccctacacaccaacccatataccacagatacaccaagcacacccaaacacaccacacagcacgcagcacacacaacacacgcacaccacacagcacacacaacacacaaacgcaccacataccatacacataccacatacacacacatacaccacacacaccacacaatacacacaccccacaaaaacaaaccccccacatacatacctggcacattacaaatacagcacacacaccacataatacctacaaataccacatacacaacacacacacacacacacagttcagccataaccttcactatttgctcctagatcaagccctgcctgaagattctctgcctctgctcacaccgcactcagctcaacattctcttccttgccttttctgagataaaattctcccaatcctttaacacccagctcaaacatcagcccctcctggaagtatcccagcagccctgcctcatcagagtgaactgccccgaggttcactgggccctttcacttggctgggcccgtctgctggccacccagggctgagatgcctggacagcagagccccacggagaatcccaggcacacctccctccccagggagctcagccagtgctggtccgggagagtaaggcagtggttaagagcttggggtctgcagtcagactgacctggatggaaaccagattctgcccttctttcttatctgctgtgtgtccttgggttagtcagtttccccacctctaattggtgctatgagaattaaaggagaccctgcgggtaaggcaggaagtcccatgcacccagaggctggcacagtgcctgacctagagtcagcctccctaaataacttactcctaatactttcttacagggggtgtgggaggttcctccccaaagagacaggaagctcccagagcaggagctgcatatttggcctctcaggccctgctccaggcctttgccctcagaggtgggatgctcccccaataggccctcagggaggctgagatgaagctgagcagcagtgcccacaggcctcacccaggctctgccctggctttctgccctcaggctaagtgagtgcagcttccggccagagcacgtgtccaggctggccaccggcttgagcaagtccctgcagctgacggagctcacgtgagtgacccacccagcccgtgaggacagcagaggggtgggggcaccctgccagagccacctcagtgactgacctctgtctccaggctgacccagtgctgcctgggccagaagcagctggccatcctcctgagcttggtggggcgacccgcagggctgttcagcctcaggtacctcctcccccgctgcctccgggaggggccatggcatgaatgggagcaggggtgggcactggagtaagaggcccccaggatcatggccccagtcatttcctgtacccacaaccctgccatctggaccctgagcaaaccctgtccatctgtcccagagactccacaaggcacacagagaaactgtccttccccacactggaggcctgtgctttgggatttaagaaaaaaagaaagaaagaaagaaagaaggtttcagaggatactgaactgaggacaaaaataaactgaaacgaagttcttgtctgtctgttcactatgatcattttaaaacactcagaaaaagaagataccgaagtagaaagaataattttttaaaactcctattcccagaacctaggtttgacagttgttcatactttttttatatttgcttctatttttatttttatttcagctgaagcggtttcaagtaagttatagacctcataatccatcactcctaaatatttcaccgtgaagctccaaaaaataaggacatttttttcagtaatcacagttccatcaggacacctaagaaactcagttagcgattccttagtgtcgggtactacctagtctaatctaaaatgtccccattgtcccccagataagacagctggcttttgggatccaggatctgtcacatctggtctgcatttgcacgggatggcgatggtcttctgactcttctaacctgcggcatcactgcccccatcccctcaccacagctttctgtttcatgtcagtgtctgttgacaaaatcagcaactgtgtgtactgcagactgtcctgctcctgactctggtggctttctcatgatgtcatggcacgtgttcctctaaccccgactttcctggaaactggacgttagatcaaaaggctccatgacattcagtttcatgtttgtgcccaaaaaacttacgtcaccgacagagctgtgcacttctcattgcagcctgtgacaaggcacctaagaactgactgttccccaaaataacctgtaaaaattattataaaatacacataacaaaatttgccatcttaatcatttctaagtgtaccattcaggagtgttaagtacatccacttttttgtacggccaatctccggaactcttttcctcttgcaaaactgaatctctatccccattaaacaacaccccatttcccccctaccccagcccctggcaaccaccattctgctttctgtctctatgaattggactgctctaaatagtttatatgagtggagtcatttgtatttgtctgtatttgtctttttgtgactggctcatttcattgggcataatgtcctctggttcattcatgttgcagcgtgtgtcactgtgtcagactttccttcctttttttttttttttttttttttgagacagagtctcactcttgtcacctgggctggagtgcactggctcgatctcagctcactgcaccctccacctcttgggttcaagcgattctcctgcctcagcctccggagtagctgggattacaggcgcccgccaccacacccagctaatttttttttgtatttttgtagagacagggtttcaccatgttggcgaggctggtctcgaactcctgacctcagatgatctgcccgtttcggccttccaaagtgctgggattacaggcatgagccaccacacccagccctttccttttttaaggctgcataatattccattgtgtggatggaccacattttgtgtatccacttatccatcaattgacacttgggttgtccattcaagtgcccaattgacagtccctgctttctttttttaaatattattttatttcaaaaacaatagagatgaggtctcactgttttgcccaggatgatcttgatctcctgagctcaagtgatcctcccacctcagcctcccaaagtgctaggcgtgagccaccatgcccagccagaaagtcccagctttcaattattttggttatatatccagaattgctagagcacccaaaataactttttttttttgagacggagtctcgctctgttgcccaggttggagtgcagtggtgcgatctcggctcactgcaagctccgcctcctgggttcacgccattctcctgcctcagcctccagagtagctgggactacaggtgcccgccaccacgcctgactaatgttttgtatttttagtagagacggggtttcaccatgttagccaggatggtctcgatctcctgacctcgtgatccccccacctcagcctcccaaagtgctgggattacaggtgtgagccactgcacccagccaaaataacattttcaaataaaacttttcttagtctaaaaataatattggttgggggaagtggcacacgcctgtaatcccaacactttgggaggctgaggtgggcagattgtttgagctcaggcgttcaagaccagcctggacaacatggcaaaaccccatatctacaaaaaataaaaataaaaaaataatatttaatcattgttgaaatgtgcagaaaatccagaaatacataaagaaaatagtgctttaaaaattcagcataactttaaagcagtaatatttgacttaattctcttttttcctactttcaaattaatgcacatgcattgtagaaagtttagaaaatatagaaaattaaagaagacataaaataaaaatcactcatgagaattctatcatcttaaacaaccaccatgaacatttaatatattttcctatgttttccacacatctctctccctgtttctttccacactttttttctccaaatactttcctttttttgaaatgcaaaattgggatcatgttttatatacagtttggtttccttacctttgtgatgtaacattatgtgaatcttttcttaaatctaaaaatatcagtggcccagtgcagtggctcacgcctgtaatcccagcactttgggaggccgaggcaggtggatcacttgaggtcaggagttcaagaccagcctgaccaacatggtgaaaccccatctctactaaaaatacaaaaattagccaggcgtggtggcgcatgcctgtaatcccagctacttgggaggctgaggcaggagaatcgcttgaacccaggaggcagaggttgcagtgatctgagatcatgccattgcactccagtctgggcaacaagagcaaaactctgtctcaaaaataaaataagataagataaaaaaataaaatataaaaatatcatttaaaaaataatattttctgtttggattgtcacaacaatagttgttggaataagggtgatgttaatttccttttttagattgatgcctacttgtataattttatagttttaaaatgagcaaaaaaaactcaaaaagcctctaggtcccccccttgacactcctcccccggccccgtcatgtgtgctgattgtctgctgctcaccttgggggggccttatctgtgtccccttctgtgacagggtgcaggagccgtgggcggacagagccagggttctctccctgttagaagtctgcgcccaggcctcaggcagtgtcactgaaatcaggtgagtccagagaagaggcccctttggaattcttcatctttcataagcattgggacttttccttgaccttccctcatcctgtggggtaatagctgtgtcaccagctagttttccatgtccccagggtagcaggagctcctggggcatatgtgaggggctacacatttgttgggactagtgcagtagtcaagccacagtgtcagaggaagacatccccagaatcaaaacaaagggctattggatccaggcagacatggctgggagtccacgctggttgcttggaagtggccccccagatgcagtaacacacattatggctcttcaaccagaaataacacaatgacacacagagtagcttatagcaaaggttttagcatcccactcagctatgttcagatcccaactcagtcacttactggttggagcccattactgtgtctctctgacctcaacctcctgctcttaaaagagtctaattacggccctttgcagggctgggaggattacaagaactggagcctgtaaagatgtctgctgtactgtcaccagccacacagcctgccctgcttcttccttctctcctccaggagtgagcaaggggatgctctggggactttataatctcccatagccctctccccataagcaccccatgaacataacattcaagtgaaggcagtgagcttagagcgcaaatgcagactccagacacatcccctaccccacccttccaccacactgtggtccttgtgcccctccctcagaaaattctggaactgcccttggatccctctaatggctttctgtcatggtctgaaaaggcttatcaacttattaactttaaattgttgaaaagggccaggcgcggtggctcacgcctgtaaccccagcactttgggaggccgaggcaggaggatcactgaagcccagagttcaaggctgcagtgagctatgatcgtgcccaccactgcacttcagcctgggctacagagcaagaccctgtctctttaaaaaaaaaaaaaaagaaagagaaaaattgttgaaaaggcactacttggggtattgtgtgtgactcacggaagcacctactttccagtcctaagctggtccctggcaggggagaaggggacccaggcaaagtgagagttcagagttggagccgggcagcccaggtgccagctaggccctccggggaaggctgcccgacctcacgttggttactgctcactcctcagcatctccgagacccagcagcagctctgtgtccagctggaatttcctcgccaggaagagaatccagaagctgtggcactcaggtgggacccagcaccagggaccccaaggcaggggctggtgttggggagggggcagggctgcttctgaccaatattcaccaccctgcccagagaccttaggggttcgaagtctttacacaggctacagaggtctgaccaacccacttctgaggcgtttcagccccactccaggccccagtctcagctccagtcacccccatgaactttcagttccccgaacaccatcttgcttagaccttagggcatttgcacaggctgtgctctctgcccagaatgttctcttcacgcctacctgcttcacctgcctaactcctcctcatccctcaggtctcagcttaaatgccaccacctcagggaggccccctggaccccaaggcttagtcaaacacttccattatccactcttatagatccctggattcacagcacctctaaatccatatggcacagtttgggaaattaaaatgtcacccttttgagtggatgcagccctgcatgtgtacattctgggaaatagagcatggtaggatctcagcctcacctcacctcctcggctgtgtgtccttgtgcggtgaacaacctgcacaaccataccagctgccccatctggactcctgcttcctagcacttctcataagtgaatagcaaactgtaggacttcatttgatcagcatttatttacccctacaccataagctccttgcaggcagatactgaatcccacatactggactagatgttccaaaactgtcgtctccctgtctgtgtccaggttggctcactgtgaccttggagcccaccacagccttcttgtcgggcagctgatggagacatgtgccaggctgcagcagctcaggtcagcgcctggaaactctgtgtggggccctgagttctctggttgaccctggtacctactccaggccatgtgtgaccctggcattctcacttccttgtgcaggagaaaatcacacttggccagtggaggggagggagagccccagggtggctcaggggagctcttgggtggccccttctcctctcttggcacccccttctggatgtgatgacctctgaggtgtgtccagcctgaaatcctctagaatatccttggaccttttcagcttgtctcaggttaacctctgtgaggacgatgatgccagttccctgctgctgcagagcctcctgctgtccctctctgagctgaagacatttcggtatgtagacaagacattcactcagtcccctttgcagctctgccctgccctgacacctcccgttattcccagccctgggctcagaggactcttactctgtgtcttactctgtggacacaaaccacaggtggccctggagatgatttttaggggtacctagtcgtaaacatgaccttaggaacattgagccacatggcaagaaagttgttccctttttaacactctttcattgtttttcttttaaaataactgcgaactaacacaaagtttcaagaagactgagaactgctgtgtgccatttacccaaattcacccttagagctgggcgtggtggctcatgtctgtaatcctagcactttgggaggccgaggcaggtggattgcctgagctcaggaattcgagaccaccctggacaacacggtgaaaccccgtctctactaaaatacaaaaaaattagctgggcatggtggtgcatgcctgtaatcccagctaattgggaggctgaggcacaagaattgcttgaacccgggaggctgaggttacagtgagccaagattgtgccactgcactctagcctaggtgacagagcgaggctcggtttccgaaaaaaaaaaaaaagaacaaattcaccctttgccaatctttttccacatttgctcatttcttccctccctccttctttcccacctcccttttctttcactctctccctctctccttttctgaaccatttagaagtaagttgtaatcatgtccctttacccgttaacatttcagcgaatttgctagaaataaggacattctcttccataatccagtaaaattataaaatccaggaaatgtgacattgatacactactattatctcaactacagtttatactccaatctcaccagttctcccaataatgttgcttattgcatttttttcccagttgtggatccaatccaggatcacacgtctcatttagtgtcatctctttagtgtctccttcaatctggaacacgtccttggcccttctttgtctttcatagcattgtctctgacatttacaggccagttattttatagaatgtccttccacttgggtttgtccaatgtttcctcatgtttagagttagagtctgccctttgggcaggaatatcacacaggtgatgctgtgttatcgtgccttccatcggggcacatgatgtgtcagagtcctcgggctagtgatgttaactgtgatcacctgtgacagtggtgtctgccaggtctctccacttgcaaatttactaactttccctttgtaatcaacatagattatgtggggagatactttaagattatgtattaagtcttcctcaaactctcattggcaaattttagcagccgttaataaatcttacttaaatcgatgaatcagcatgacagttgcaaaatgtagctttcctaactttacattttatttccatctaactgattacaccaagaagaaactcttgggctgggaacagtggctcaagcttgtaatcccagcactctgggaggccgaggaggaaaaatcgcttgagcccgggagttcgacaccagcctgagcaacatagcgagaccacccccatctctacaaaaaataaataaataaaataaatgtttaaaaaggaagaaactctttaggacagagagatctttgacacttcttcagtatttgctttaaagatgcagagtttgtaataaacaacagtaactagctaaactacagtgatacctaatcctggcttaagttgtgaagttgctacctgaatgactgcggtttaggaaatactgaactagtccatgcttctgcttccaagctctgtggtggcttaatgagttcatggtggaagagatttacgaagggaaggaggtctcctcacattgcccgccacatccctaccccacatccttgccctctgccaccagcattcagagctcccaagacccagggcggctcctgcctgacctgttgccctttgacccccaccaggctgacctccagctgtgtgagcaccgagggcctcgcccacctggcatctggtctgggccactgccaccacttggaggagctggagtgagttgcagagtggagggattggggacaagtggcccagctgagggtgaggggtggagaagagagcagggcgtttgggagggcaggcaatgagacttcaaccaatgacccttcccctgatgaagtgcagcagttctgggtgtggcctggggaaggaagagcaccacagttttggtctgaatttcgccactgactcacagaggggctgtgggcatggctgttccactctgggctttgattgccttatctatgaaaatggggctcatgagccttgctctgctgggctggctgtgggagtcaggctacggagagggctgaagaacaagagggtgtgtgtgtgtgtgtgtgtccctagtcccccagcttcctctctgcagccttcatccagggcatagtttctcagctgggccagctgtgactatcatgcctacccagagcctgagccctggagctagggatacccatggggaacctggacagcgagggtggcccagggcatgcagatgcagagttggcctcccaggggacagagcaggagaggggagctgacaggacagctcagctccagggctgggcaggctgcgctaacccttgcctctgcctggtcttctgcagcttgtctaacaatcaatttgatgaggagggcaccaaggcgctgatgagggcccttgaggggaaatggatgctaaagaggctggagtaagtagtgatggtggttgtgggtgagtgagtggtgggggtggttaatggatggtggaagtgggtgagtggtggggttggttaatggatggtggaagtgggtgagtggtggggttggttaatggggaatggggtgagtgagtggtgggagtggttaatggggaatgggctgagtgagtggtgggagtggttaatggggaatggggtgagtgagtggtgatggtggttaatggggaagggtgtgagagtggtgatggtggttaatggggaagggggtgagtgagtggtgatggtggttaatggggaagtgttgtgagtgagttgtgttggtggttaatggggaaggagatgagtgagtggtgttggtggttaatggggaagggttgtgagtgagtggtggcgttggttaatggggaagggggtgagtgagtggtgatggtggttaatggggaagagttgtgagtgagtggtgttggtggttaatggggaagggggtgagtgagtggtggggttggttaatggggaagtgttgtgagtgagtggtgatggtgattaatggggaagggttgtgagtgagtggcgttggtggttaatggggaagggagggagtgagtgatgatggtggttaatggggaagggttgtgagtgagttgtggggttggttaatggggaagcgttgtgagtgagtggtgatggttggttaatggggaagggttgtgagtgagtggtgatggtggttaatggggaagggggtgagtgagtggtgttggtggttaatggggaagtgttgtgagtgagtggtgatggtggttaatggggaagggttgtgagtgagtggtgttggtggttaatggggaagggggtgagtgagcgatgatggtggttaatggggaagggttgtgagtgagtggtggggttggttaacggggaagggggtgagtgagtggtggtggtggttaatggggaagggggtgagtgagtggtgttggtggttaatggggaagggggtgggtgagtggtgatggtggttaatgggaagggagtgagtggtgatggtggttaatggggaagggttgtgagtgagtggtgatggtggttaatggggaagggggtgagtaaggggtgggggtggttaatagggaagagttgtgagtgagtggtggggttggttaatggggaagggggtgagtgagggatgacagtggttaatggggaaaggagtgagtgaggggtgatggtgcttagtgctgcatggtcagtgagtagcatgcctaggaacctttgcatgttttgtgaacacaaaccgccatgtttctggatggacccaggtgagctgaatgcccttacatgaccttttactttctattctggatctcagtgccagcaagaaccttggtcataggaaacagaatacacaactcaaagcaatccaagacagaaatatattggcttatgtcatggaaaattacgaggccaatgacttcaggcacagctggatccaggggttctatatttgtcaggcttctctctcacacacttcactctggcccttactctttctctgtccaccttggcttccttctcaggcaggccatccctgcacctgcaggcttactttctctcagcttagtggaaagggagtaccattctctctgtggttacaacaaaaggtcctagactgagtctcactggactagcttgagtcacctgccccaccctaaagcaatcactgtggctgtgagcacaaaatattctcctcactggccagacctgggcgcatgcacaccctatcttctggacttagaggggtggtatttcaggatgtgagtaacagaagaggaaagaaactctgggcagaaaaaaatctacagatgtccactacatttgtctacagttgtttccttggtaactggcagcttttactactctcccccataatttgaagtcatcaaattcttagaaatgccagaaacagcctcagtctaaaagacaggtccccgtcctgcacagattcctgtttagacagtatctggacagaaaatttaacagaatatcttctgcttttcatctcttaactttttctgatgaccaaaaaagttccatctttctagaaatatgtaacaaataacatgaaatgccccggggatgacaccccctgagaaaacttctgttgaacggtttgtgaatttttctccagatttttttttctacatatgttttgaattcagcttgaaagtagccttttgactttttgccccttaacattgaaattcttccgcttgtccctctttgcttgtcctggggagaggatcaggtaaaaggagaagagggattacagagacctttgaccacagggccctcctgtcgtctcactggtctgtttctttgcccactgtccatgtacctgcatctcggctcagccttctggaagcttttatttaggggattggaggcccagtgaggtcattcattggctcattcatgcattcgacaaatatgtactgagctgggcacctgggccggggacaggacagattcatccatgcccctgggggcctttttcttcctcctgatttcccaggcaccatgtgctgctccttacctcctgctgccttagttgccctatctgtaaactgggcataatatcttccctgtccgaaggaaggggatggatcgtcagtgcccggaggtctcttcccatctcagatctgtcatttccaagtgtaactccccacaggcagttaccctcaaatccagtcagcttcttccagctgtatacctgtgatggagtgggtaggagcatggaccctagttaggagcctcactgcctgggttcaactctgggtggggtaactgacacttccagtttgcttggagctttccccattttggcacccaaagtcccacatccaggaaaaactcttctgttctgagccaaccaagacagttgaccatcttttgcttctgcctcttattttattatttatttatttgagacccagtctctctccgttgcccaggctggagtgcagtggcacagtcttggctcactgcaacctccgcctcccgggttcaagcaaccctcctgcctcagcctcccaagtagctggcattacaggcacatgccaccaggcccagctaatttttctatttttagtggagatggggtttcactttgttggccaggctggtctcgaactcctgacctcaggtgattcacccgccttggcctcacaaagtcctgggattacaggcatgagccattgcgcccagccagttctgtttcttaatgtgtgaactcgtgccagtccctcagcctctctgttctttggcctcctcatcttaactttgaggataagagcaatctcccctgctacggttgttgtgagtattaaatgagataatatgtgttacagtcttagagtctggtcagagttcacactctacaagtgctagctattgttattctcctctcctgcctaggctgggggcctctagaagtacaatcgcctgggtcacatatggttggggctcaggaatgggagttctatagtttttggttctgttcctgaagcagccactttgtgtatgaccttaagcaagttctctaactctctgaaccttggtgttcctcacctgtaaaatggggacgataataaacccacctttccagatggccccaagccctgagtttggcccacattttatgatcaatgtgtgaccgccattattacggatcattagtcttggtccatgtggttcagaacatagaactgctgcctgcctgacctcagtaattcatgcagagaaacagcatttggacctcccagtacagttcattttgtagaatttttacactgtgtggatataagtggctgtcttggaggtccctaggcttgctaagcacagaggcctcagacccccagactggacagtgccccacccccagatgtcaagttcacctggcctcctcttctccagcctcagtcaccttctgctgaacagctccaccttggccttgcttactcacagactaagccagatgacctgcctgcagagcctcaggtgagtgaccgagcggccccatgggaatgagtgggaagaaacacttcccactcagttgggaccacatccagggaagcactgaggccacctcccaggggatcctttgcggatccctcccaggcccatccctgtgccctcccaggtgggtgcccactgctcttgccttctaatgccatcagcttcctcctggttacaaaagtggcctaaagggcttaggcccacgtcgtagaacaacccttgaggcacacacacagttcaccctgggctcttgttaaaatgctcattctgattccccaggtctggaattctgcctagactgtgcttttttttttttttttttttttttttttttttttttttttttgagttggggcctcactgtgtggcccaggctggagtgcagtggcaatgcacaggtgcaatcgtgttgcactgcagcctcaaactcctgggcgaacgtgatcctcctgcctcaccctcctaagcagctgggactacaggcctaaggcgttgcacccaaacttagcatttctttttttgtttgtttgtttttgagacagagtttcgctcttgttgcccaggctggagtgcaatggcacaatctcagctcactgcaacctccgcctcccgggttcaagcgattctcctgcctcagcctcccgagtagccgggattataggcatgtgccaccacgcccggctaatttttgtatttttggtagagacagtgtttctccatgttggtcaggctggtcttgaacgtccaacctcaggtgatctgcccacctcggcctcccaaagtgctgggattacaggcgtgagccaccacgcctggcttcagactctgcattttctaacaagcttccgggtggtatcaattctgggggccacggtcagcactttgagtagtgtgggtctagactcagatggggtggccttcctacactccctttgtgatttcactccctgctgctaggataaataaacatgacacttactttcaatgtgatttttcaaaacatgaaatcttgtgactaaaaacaaatccaagcagtgacacaaagcattgctttgtttatatccaagtacacctcctaccccctacctcgggcagagcagagtaggtaggaaatgaggttagagagttccaggaggttatatcatattggaccatttcacccaaaattaatttactgaaaggtgatccattaaagtgtatttatttatttctattttatttttattttttgagacacagtctcactctgtcgcccaggctggagtgcagtggcatgatctcacttcactgcaacctctgcctcctgggttcaagcgattctggtgcctcagccgcccaagtagctgggattacaggtatgcaccaccacgcccagataatttttgtatatttttagtacaaatggggtttcaccatgttggccgggctggtctcgaacccctgacctcaaatgatccacctgcctagactccgaaagtgctgggaatacaggtgtgaaccactgctcccagccccattaaaatttaatttgcaaaataaaagaaagtaaaaacaacatgcaaacaaatacttcccaaggggctaagaccatttgcctcagctatttattgttttttcctacccaggcagagcaaggtcagggctcagtaaagacaataccctgggtttaaggaaaaacctaccatttgcatggatgagaacacatatgcccctgagaactgatctgcgtgaatcagagaatcccacgtgaaagtggcattcagccgggccagcccggagatccctgacacagaggctgaggtgaagcttggcaaagaaatgtagagactcctcctgggccaggggctctggatttgtttccacccagcctgcaagtccctaagtctctggccagtcacagctcactgctggctctcaagttttctcacctggacactggggacaataattcccaccttgctcaccactccccacctgccatgacccccagaagttttgctaccagcatatgaattcctgggcgtgtaaggctttgcaaactgtagagttcttagcacagcacctgcaaaggcctttaagctcctgaaagcctcttggtctattccctgcttttccagactgaacaggaacagtatcggtgatgtcggttgctgccacctttctgaggctctcagggctgccaccagcctagaggagctggagtgagttgcccattctgcccccagacccaggacaattttggccgggaaagatgacaagggcaaggggctacctgagcacgccctttgcttcttcatctcatctccttcacccacttctacactgtgtaaacaacctggggcctagaagcttgggggacccaaagacaggatgtaagagtgtcaattgtagcaagagggatttaggtcagacaatggggagaacatcctaaacagaagccaagggttaggagctgtcactcaacatggggtgatggggctctctgtgtgagtcgaggcccttcctgggacttcagcctccccttctttttctgggagtggggtgtggacaagatgagacggcagaaggctgatgaagctgttttctcccccaagcttgagccacaaccagattggagacgctggtgtccagcacttagctaccatcctgcctgggctgccagagctcaggaagatagagtgagtagccagccctacagaggagggccacaggggtcacacgatggtcctaggagatactggcccctagctgaggccagcatggtaaaatctcccctgcgccaacctcagtgtccaggcagtggggctcggtgacctcctggccctcactgcgggaccttaagccaccccagcccctgctcttctctgggcctttctgcctcattgtctgggtaggtgtgtggtgtcggggggttgtctcttaggccccctgaagcaggggtggcagacccagcagatgtgctggggtgtcggggagagggggcatcagaggacctgatggctgcccccctcccacagcctctcagggaatagcatcagctcagccgggggagtgcagttggcagagtctctcgttctttgcaggcgcctggaggagttgatgtgagtgtctgcccaggtggcctctgccctctgtgccccccaggtccacctggcctcctctcccgcagtgggcacagggcagggcgggggtcccgagtgggcaggcccagtactcaatgctcattcctctcctcttccaggcttggctgcaatgccctgggggatcccacagccctggggctggctcaggagctgccccagcacctgagggtcctacagtgagtggccccctgcccataccatgcagggctggtggggaggagggtcctcgggagcagtgggggggtccaggcccccatcagttgagctgccctgccccaagtcaagcttggcatatacccactctcctgcctgttccttccctgcctctgatgtctgcagcaagaaaatcaggaggcccagcctagtcctggctctgccactggcccctgcctgaccttggccaaacccctgccccttctcagcctcagtttcttcacatgcaaaagaagtacaatgatcccagttcattgtgccctgtgagcgggtccctgagggcgaatgagaaatcctggcagagggcttcgcaggagcacggtgccaatcaacgtggcctcagcacttcacaaatgacctcattgcagccccatggcagcccccagagtcccagagtgctgggaccttgttttttttttttttttttttttttagatggagtctctctctgtcacccaggctggagtgcagtggtgcaacctcggctcactgcaacctccacctcccgggttcaagcaattcttgtgcctcagctaccagagtagctgggattacgagcatgcccaccatgcccagctaatttttgtatttttagtagagacggcatttcaccatattgcccaggctggtcttggactcctggcctcaagtgatccacccacctcagcctccaaaagtgctgggattacaggcgtgagccaccatggctggctggtgctgggacttttatgtgctcccttttccaggcaagggaatgaaggccaggagaggtgtggagaattttccttactcatacacgaaggacccaggtgttgaatttgggatctcagaccccaaagccagggtccttgatacctacccaggtcctgtgtggatggggaattagccagagactgtctacgggctggcactgcagcctgagacaaggctgagggtggggctctggaaacgccagtccctcaggctcctctcaccctctcctctttccccagcctaccattcagccatctgggcccaggtggggccctgagcctggcccaggccctggatggatccccccatttggaagagatcaggtaagtaggggctgcccagcccaggcacggggacagtcctgggcgggtctgggggttcctctcacaggtatctcccctaccctgcagcttggcggaaaacaacctggctggaggggtcctgcgtttctgtatggagctcccgctgctcagacagatagagtaagtagcctcccctgcctgcctaggggaccagtggcaggctgagggcagcccttctctgactgagcctaacacctggggaggcctttgaagtgatagaagccccagggatggtgggggcctggctcaagaaaggaagtctttcctaaaacgcctagcttaccccagaccctggtggctctggaggcaggacctgctagatcccctgactcaaacaacccccatcccatcccatgcccttctccatccccagcctggtttcctgtaagattgacaaccagactgccaagctcctcacctccagcttcacgagctgccctgccctggaagtaatcttgtgagtgattggaagagccctgagctggctgggaaaaggaaaagtcgggaggggtcgggggagttggctccagcctgctgtgtggcctggagctgctcccatcctctctggccagtcctcccatttgtaaatggggaagatcatccttactcagacatcctctcaaagacattttaacacttgagctgcaggtaatgttgggtaaaacagtttaccttcttctgcctttttccccatttgtagattggtgggaggggaggtggaccagatggtctttaaaggtttttggtccaaccttccttttgggaggcaactggatagaccaccttgcctgcttgatgaaacctccatttatgaaccacagttggtagaaacagtggctaaagccaggagaaagccacccccagacctgctggctggccgtgcttggctgtctcttagcaatcagaatcccccagaccttggggctttgcagtgctgcctcatgagtaaactagaattctaggactagcctgggaccctaaccatggtatggaggacaaagctgtttcctaaagaacaggacacaagtgattacgagaagattttagtttgcatcctaaaggtcttaacccttctcattacaccaaagcgaaagtctcagatcagtggtaattcatctttaacacctaacactggattctccctttttaaccaaaagggttaaaaacccaacatcttaggaagggcatatgttccaactagaagttaataccattgtttgtactatatttatttttgtaactaccttctatatggagtctgtaacacaagttttccattgatagtagcaataaaagtttcctttcaagatttttttttttttttttttttgagatggagtctccctctgttacccaggctggagtgcagtggtgcaatctcggctcactgcaacctccacctgccgggttcaagagattctcctgcctcagcctcctgagtagctgggattacaagtgcccaccaccacacccagctaatttttgtatttttagtagagacaggatttcaccatgttggttaggctcgtctcaaacacctgaccttggcctcccaaagtgctgggattacaggcgtgagcaaccacgcccagccaagattaattttttaaagtaagaaaaaagagggggccaatttaaagaaaaatatgatgcatcttaaatacaggaggtacatgtatgtggcaaaaatggcaacatcttgtgaacaacgtcatgattcaaacttgacggggaggggagcagggaggaaggtaacctgcaccctgacgtcttcaggggaggacacacaagcaccctatcaggtggcctctcttgaaaacccttgcccccacgactggcaccctgctttccccattcactgccttgtctccacccctcgacctccttgctctcctgccgctgactttgggacccctaccctgcaggctgtcctggaatctcctcggggatgaggcagctgccgagctggcccaggtgctgccgcagatgggccggctgaagagagtggagtatgaggggccgggggaggaatgggacgggctaaagggggacctacatcccgggaacaccaagaggccactgggtcagtcccctgcctcccagaaagcccttccttgagttgcacactctggcctgttccaagcccctgccaggcttagttccccctgggttctagccttcagccttcctgctgcacctgccaccagtcccctgttgtcttttgggttccctgagaaggtagtgtgggagactgtgtcccctgaccttggcctgaggaagggacctaggaaactctcacacccattctcatggccgtgtttctctttcccctcccctcactgtccactgagaagcctggagaagaatcagatcacagctttgggggcctggctcctggctgaaggactggcccaggggtctagcatccaagtcatccggtaacagaggcctgcaggggcagggatggtgggtgggaggctacaccaacccccagatctaatgggactccctggaggaggcggcagggcctgggctggggattatcaaaggagacttggaccactccaccaagaatttggcagcaagcagacttggatcaaaccccagctctgccacttgccaactgtgtaactttgtagccataactcaacctctctgaaccccaattttctcatctgtgaaatggggatactgatagtatctacctcagagagttgtgaagactaaatgagcatataaagcactgaacccaatgcctggcacatagtaagcacttaaaatggcagctataatcagagccatcacatacagttgtataggttgtgcactgcacaagggcattaaacctaaggggcaccattcacattgtcaacctgctagatttctagcagatgagagtaaagtaccttgttctaccaaaatcatatattatgacaatttcagacagatggaagtaaaacatcttgaagaaagagggtcttttccttatttgcacaaatgtgtcatatgagtgtggccttagctggcatcactatctcccagggaggaaggttgagttggaggactcaggaggcaggtgtggggtacaccctctccctaggtcagctatgctggtctaacacctgcctctgccaggtaactctaggcacagctctacctttttgggcctcagcctcccaatctgcagatacgacagatggcaaagatgggaggatgaatgagtgcctatatctgtgccccacagcctctggaataaccccattccctgcgacatggcccagcacctgaagagccaggagcccaggctggactttgccttctttgacaaccagccccaggccccttggggtacttgatggccccctcaagacctttggaatccagccaagtgatgcacccaaatgatccacctttcgcccactgggataattgactcaggaaagaagagcctcggcagggcgctctgcactccacccaggaggaaggatacgtgtgtcctgctgcagtcctcagggagaacttttttgggaaccaggagctgggtctggacaaaggagtaccctgcattacgtgggatatgtgtgatcaattggggacatgcgacacacaatgagggtgtcatgacaatgcatgacacgtacggttatatgtggcagtgtgaccccttgacatgtggcgttacatgaaagtcagtgtggcacgtgttctgtggcatgggtgctggcatcccaagtagcaggatacatgattgttggtctatatatgacacatgacaaatgtccatgtcacaggactcatggctggccagatgacctcaggctggcccaagatctaatttattaatttttaaagcaaatacatatttatagattgtgtgtatggagcagctaagtcaggaaaagtcttccgcccgagctgggaggggagagtgtccatgcactgaccagtccaggggctcaagggccagggctctggaacaagccagggactcagccattaagtcccctcctgcctcaatcctcagcctacccatctataaacttgatgactcctcccttacttacatactagcttccaaggacaggtggaggtagggccagcctggcgggagtggagaagcccagtctgtcctatgtaagggacaaagccaggtctaatggtactgggtagggggcactgccaagacaataagctaggctactgggtccagctactactttggtgggattcaggtgagtctccatgcacttcacatgttacccagtgttcttgttacttccaaggagaaccaagaatggctctgtcacactcgaagccaggcttgatcaataaacacaatggtattccacgtc

SEQ ID NO: 15694 - DNA, 35088 bp, Homo sapiens
ctgacctgcaccgacctggccaccctgaccaacatcctagagcacagggaggcccccatccacctggattttgatggctgtcccctggagccccactgccctgaggctctggtaggctgtgggcagatagagaatctcaggtgagtaagagtggaggaggaccggggaggggattgggcttttgggggagcagaggccaaccagtctagcaaacctctgccaagaggactggataagaatcttgaatatcagaacataatggcctgcaatgcaagagaggaagctccataccttgacaggacctctggagtccaaatggatcctcctcttgtctgtggtttctggactctcagtctctctgtcaatcatgggctgaaaccacagatccaggctgtctatagaggctggtggactttgggcaagtatatggagcacacacatgcacactgtctaggccagagtttcttcgttcctaaaacgaatctgtaacaatagccaactcatatggtcattgcaagaatgagatgggatggtgcatgaaaaacattttgtagcacagtgcctagcacagagcaaaggctcagtgtgcatattagctagagaaaaggctaggctgcagtaacagagaaacctcctccccaaatacagtaggttaaataatgtagaattttatttctctctcatggaagagtcagaggtaggtggtccaggtcagtggaatggctcagctccacgcagtcatgcaggtacccaggtccctcccattttgctccattatccccttgggaatcctatctgcacagtcaaagctacgtcatgggtatatctgtgctctggcttgggaacaaggaaagagcatggaggaacatgtcaatgcattaaagttcagtcctgaaactaggatacatcccttccactcacattccattggtgagaacatagtcacctggccacactgagctgcaagggaggctgggaaatgtgatctctggctgggaaaccatgttcctcatgatagctctattgctgtagatgaagtggagaatgggctttggtggacgattagaagtctcggccataatatgtatttgttagtactactgtattaagccccatctctctgaggggatggcgatgacttctcagctctgcccagcactgatcctctgacacttcgcttcttcttatggcagctttaagagcaggaagtgtggggatgcctttgcagaagccctctccaggagcttgccgacaatggggaggctgcagatgctggggtgagccaggccttggagctgagaagggtcttcagctggggatgcctggtactctcctccctctccttaatcctacacaaggcagattcctggccccgcccttttcccctcctcgttcctccccaccatctttgcttactctgtaggttagcaggaagtaaaatcactgcccgaggcatcagccacctggtgaaagctttgcctctctgtccacagctgaaagaagtcaggtgagtgatctccaggagggctcactgactggggagatgagccactgcccaggtcccagagtccccctggggcctgcatgttcctccaagtctgaccagtagtttttcagtgagacccagagagggaaggcatcagtccaagtactcagtagggctgagtccaaacccaaggctcccagagtccccagagcaaggcttccttcatctaatattttagactgtcttggaggagcatgagtgttaaggctccctccctctttctgaaatcccaggagaagggatagcagtgcgtaggcaggaatcaggcactgtgggtacacataactacatgaagcaccacacaccttcacatttgttcacacatgtctacacttgcacagaagtacacaggcatatgcaagaatatgcacccacacatgcccactcataggtgtgcacatgtatgcagcgcacacatgcacctttaactacatgtacacattttgatgccagcacactctaactaactaagcttgtatgcacaaatatactcctgccctgtgtctgggactcagtaccatggggaggagtgggaccagtgaccctcctccctggcagaacgctgctagtttatatggcacctttatgacatttagagaaggcaccacttcatccacacagatgcagcctgtcactaaggttcagcacttgttgagtgaaaataataagttggaccacagtccctattgtcgtctcggctgggcatctgtgaaccgtgattaagccaaggttcagaagtactgaacttgttgacatttttcttccctggctattgaaagtgactttaattttgtctttcatcacccaccattgttcttaatcaccctcactcccctcaactcatctgtctccccagctaggaacccaggcaaggctggcttgtgaacaggtggggaaagtgaggtcagagaggaatgcgcttggctcagggctctgggtgagtcagggccacagccgaggctggaagcgatgtctgcagcgtcccagtctagactttactcattgcctggggggcctatcccaggcacatcccaggcataagccctgggagcagggtgctaggtctcctcattgtgcctcatgaagaggccgtcagtctgtcttctagatcccttgagccgccaggcaaaaacttccccataggaacagaatagacccagaattgaggccagcagagggtctttcctcctagccgtgcctgctggaatccggcgagcaggccatcagctctttctgggcccctgtcttatgtctcccacatgagggtggccatcctgtcacttgctaactggggcttgcaagtgccccaaccccagggcaaagggactgggccttggtctcctcgcagttttcgggacaaccagctcagtgaccaggtggtgctgaacattgtggaggttctccctcacctaccacggctccggaagcttgagtaagtgatctttccactgcctctgcagcccagtccctctctatacctgattcaccccactcccttgcaaggcaaggaaggtctggggcccctggggtaggggattccactcctgacacctttgccacaatcttgcagcctgagcagcaacagcatctgcgtgtcaaccctactctgcttggcaagggtggcagtcacgtgtcctaccgtcaggatgcttcaggccaggtgagcagaaggaaagggatcttggccttatgggccttgagaaaagaggaggggaaagtgggatgggaaatggaggaggcccctcgtctgcaggataaatctgtgcataccctactgttttactcacagctttaccttcagaacctagctcaggcttggcacctggtacttggtatatattgaattaatggatggatgaaaagatggatgtatggatggatggctgaaaagatggatgggtggatgaaaagatggatggatgaatggatggctgaaaagatggatgggtggatgaaaagatggatggatggatggatggatggatggctgaaaagatggatgggtggatgaaaagatggatggatggatggatggatggatgaaaagatggatgggtggatgaaaagatggatggatggatggatggatggaaagattgatgggtggatgaaaagatgaatggatggatggatagatgaatggatggatggatagatggctagctgaaaagatggataggtgtgtgaaaagatggatggatggatggatggatggatggatggatggatggatggatggatgaaggaatgagtcaacaagtctacgaagcacaggcatagccaaaggaataattagctgtgtgttgccctccatggtgctgaaccaatatagccagttttgatcatggggtaggttaggtgtcatttttcttactcataaaaatttctattaaaaaaaattcagccgggctcagtggctcatgcctgtaattccaacactttggaaggccaaggcaagaggattacttgagctcaggagttcgagaccaacctgggcaacatagtctctacaaaaaatgaacaaaattaatggggcatggtggtgcatgcctgtggttccagctatttgggaggctgaggtgggaagattgcttgagccgtggaggttgaggctgcagtgaggtgtgaacacaccactgcactccagcctgagtagcagagtgagatctccatctcaaatttaaaaagaaaggaaaaaaaaaaactcacaacattcttaatttttattatatttcttgtgaaaattgtttttctgactttttaaaacactcttgcaggattcatcaagcaaagacataatcagtatttcacatgcctgatttaaaacacttttgctagttccgttatgtttccctgtcaattgcaaaatcagctttatctggatgtttgaacatttggggcagaaaagggtgtgcctgtggtgggtgatgtgctggtttccagtctctgggtttcatggcttggtatctgatcctgcagggaggcggacctcatcttccttctttccccgcccacagagacaactgcagagctacaaaggtaagaagccaagaggcggtgggcctggggccatccttagaagcaacttgggctcaggcagttgaggggaaaggtgaccaagagactaggaagagctggggtatgggaattcttcctgctactgctgcactgaggaatgaattactgcttaggttggcaaaggattttaacttcctctagcgtgtccagaccacatctggtccctgtggaaggaagcatccccagaagactcagaggaaggcaaacccttggggagaacataaagatactgttagactggcattactagatggtgaaaactctggaaaagcccttacaactgaaaaaagacagggagggcaattatggtacctacatcttagggttgttctgagaattaaatgagttactacacttaaggagtttagagcactgttggcatgcagtgggcagtcaaatgctggctattccagctgtgcatggattccagcttggccagtcttggatgggctgagaaaagggagctgcttttccctaaaagaccatcccaactgtgctctaccacactttgctctcctggctaagactcagagacagatgtatgtatgcccctgagcaatctctttcccttctctggatctcgattccttgcttgtataatgacctggtagtgtaggaccaatgttgctgggtgcggtggctcatgcctgtaatcctagcactttggaacgccaagcacgagaatctcttgattccaggtgttcaagaccagcctgggcaacatagcaagaccccatctctaaaaaaaaaaggcaggcgtggtggtgcacacctgtagtcccagctactcaagatgctgacgttgggaggatcgcttgagcctgggagcttgagccatgatcacaccactgtactccagcctgggtgacagagagggactctgtctcaaaaaatgacccactaggaccagtgtcactttcttttccctctaactgcttaaagctgtgatgctcagtaggatagccactagccccatatggctatttcaatttaaataaattaaaattttaatgctatttcaatttaaataaattaaaattttaatgctattttaatttaaataaattaaaattaagtaaaatgaaattttcagttcattagtcacattagctatatttcaactgctcagtggccataggtggctagtggctcccatagcaagtggtacagatgccaggacatttccatcattgcagaaagttctattaaacaggctggcatggtggctcatgtctgtaaccccagcactttgagaggctgagggggcaggatcgcttgaagctaggagttcaagaccagcctgggcaacaaagtgagacccccatctctacaaaaaaaaaaaaaaaatagctgggcatggtgattcactcctatagtaccagttactcaggaagccaaggtgggaggatcacttgagcccaggagtttgaggctgcagtgaactgggatagagccactgcactccagcttggggactgagtgggaccctgtctctaaaaaaaaaaaaatggttagcaccaatccaaaaagtctgtgaaacctggctcatgatgtcctagcttccctgcatcccctaacgctccctcagcccagtgggagagagtctgtggtttaccatagcctggactcactgcatacagctcatgctcctcgccttctgaaccacagacagcacatccacaaatggagaccatcacatcatcgacaatagcagcttctgtttactaaccttcgattttacacctatgctgggtacttggacatacattgtctcattcaatccttcaggtacctatgtgctagatgttgtcatccgttttagaaaagagaaaagggagccgactgcagtgatttgcccaaggccacatggctatacatggcagagccaaaatttgaataaaggttccatttgacctcaaacctgttgcccctcctgctctgctgaatcacatcttgagcatctgcaagcagtctcctttgttaccgactcactttgggttgtgcttcagggtcttcagcctctagaagccaaggaaagaggcttgatccaccaggccctagatgcctgagcccaggccaatgcttgatttgttcttgccagagctccagacctgcaggaaagtgacggccagaggaaaggggctcagagcagaagcttgacgctcaggtaccttggagggatctattgccttaggagagggatatgatatgggggaaagtccgaggcaagggagagcaggggcagggaggataaagggaaaagcagatgagggacagggaaaggattagccgggtgtggtgcccatcctggatagcccatcctggcttgaataaggagcatctgtcataataacaatagctgcaacttaatggaaccggctatctatatgccgggcattgcactagatgttttacatccattacctcactgtaattcctttagaatctctgtgaagtacacattattattcccctttgagggaggaggaaactgagtctcagacaggttaagtcccttgctcaagatcacccagctactaagaggtgtggctaggattagacccaggtctgtgggccccctgactcccccagcattggaagctggaggggccatggagtaggggctgtttgccctgagcccttctgtcccccactcctacccaaggctgcagaagtgtcagctccaggtccacgatgcggaggccctcatagccctgctccaggaaggccctcacctggaggaagtggagtgagtatcacgggaagccctggcgtaggagccaggaaaggaggttggagagggtgggcagggcctcgcctttgggtgggtggtgtgggggaggggcatgctgcctcatgaagaatttgggggaatcagatcattgtaacagctgctactattcagcacttgtcccgggtcaggtgctgtgctagggactgtacatgcctcctcgcattcactcctcacatctctgtgatgtaagcactgttactgtcctcattttatagaggaggaagttaagctgcagaaagataaacttgctcaaggccacacaggtaggaagagtctaggctagggttcaagcccagacagtctggctcgcagcctcatcctcataaccactgctacctctcttgctgagatctgccaagtagaaaccccaccacacctgggtctgccttccaaaccacagtccctcagggctccccccacccccttcatccttctcccagagtagagtgggataaccttctcttttcgggatggagaaattcccatggcgtccagcccctggctgaagccaataagagtagtgcttggggatggacggaggctctgtcacgaccctaggaggggcgcccctccaggaaacctccaagtgaacatgaaggcagatgatggaacgccaggatgtgttctgggtcgagtggccccacctcagggtaagacggataggggtgagggttgtcgtggtgatcacctcttgatcctggacctcgtcccattgggagaaccaggacagaattagaaggtggttttttaacaagctcacacacttctacctgcctcaccagcactgagcatgcccctccccgagtgccatcacctgcagaagcagccccatcacccgcctggttacgcagccacctcctagcccccttgcccttctcccacatttagtccctccagatggacctactggtagcgctcaaaactatcctcttttcctccacctttctagtccaacccaccctcatctcttacctggatgaccccctcgccttgccttccttgctggcttccctgctttcaccctggccacttccacctggcagagagtagatcacttttcactgatgcctgcccccttcactccttcccactgctcaggataaaacccacattctaaactcccaggtggtccagaaccctgcccccagcctcctaaaccccatctgaccccatccttccactcaatctccaatccagacacactggctctctttcaggtcctcatatgtgttatgccacagggcctttgaatgtactgcttctaccaccaggaacacccttcctccatctctcccccaaccttttacctactgaactcccagttatttcagcaagtagcttaagcaacaaataagccatccccgactcccagactaggtcagatgcccccataatcatgaagtttatcacaaaaagcaattatgtaacttgcagcataaaggaagagttgagggtggggccttgaaggcaggctgcctgggttcaaatccaggttctccctcgagcaagtgccttaactttactctgcacttaaccactctgcacttgagtttactcatcagtaaggtgaggataattacagtgcccacgtcatcggcactatgaggatgaaataggccaatagtcatagaagaacctaggatgttgccaggcatgtggtatggagtctgtcgatttcagttattatcaaggttcattcctgagagtgacactttgactaaagttagcaaaggaggagtaagtgatggggattgagggaggactccagccccacaatacagtgcattgggccccccgtctcagcctctcagggaaccagctggaagatgaaggctgtcggctgatggcagaggctgcatcccagctgcacatcgccaggaagctggagtgagttgtccaccccaccgctgggtaccagggaaggccctgtagagccccaggaggtccccgtgttcgtaatcagcagtaagggtgctgatccactgccacccctgcttcctcccaactccagcaaagtcaagatggtttgaccatgccttgccttcacctccggcatgagccactgtcttagtccaatcatctagcacccttacatgtgtaaaatgcgttcattatacatcagtggcttgcattccaattcatctttgtagctgccctggagcacggtggggtggggtgttgcactggggaggtgtcagggtgggtgggatgttgcactgtggaggtgtcatgctggggtgctagggtagggagtggtgtgttcctgtggggatacactgttggggtgaggggtggtgagatggaaaggtaggctattaggctgctgggtgtgctgtggtgttgcatggggtgagggtgatgtttgggtgggggtgtcttgggggtcttaggatcaagtgtgggtcgggtttggggagtgttgagattgggtagcagtggtttggggcctcagctttggatttcaatcttcgctctgtcacttagtagcattgtgaacctgggaaagtaattgaatgtctctgggcctcggtttcccctctgtaaaatgggatcacatgaaaccatatatgtacaaagccttttgtacagagtctggtatagtcagggctcagaaaatggtggttattttacagatgagaaaactgggggtcagagaggtgaaaacactgagttcttgctgtcaagctggacaactttattttccaaatgggatgggggtgtcatgcattttttggcttactcacacgcaccagaatcctttgagatcccctggcaagggacctaggacatccaggagtgacagccagcaagctgctgagccacagggaggggctagagctggctggggctgggtacctcagccacatgccaacggctgccttctcctgctctccacagcctcagtaacaacgggctttctgtggccggggtgcattgtgtgctgagggccgtgagtgcgtgctggaccctggcagagctgcacatcaggtgggagctccctcagaccacggtacccatccccccccccatcatgctctctctgaagcccttggaattccttctgggcccaggccttgggacgggcagaagatgctgctgctgtcccacccagaccccgttacagccggcacccctcttcctagctgctgtggatataggctgctcatggtttatacctctggagaactacccttggctgataagaaccagagacgcctggcagggtacaacccccactttcccctaacctagagtggccaatgacagaggcagagggcacaactctccagcccaaactctccagtgggacaaagctccctgggagactaggccaaggacttgctccgtttggcttccctcagtcccttactgtttctcctgagagcagaccgtcagttcatgatgtgcgcaactgacaagtgacatgcgaccccctaccccactcacagacccaggctctgccactagggaacccaatcctatttctgtaagtctcgccgttgagtatggggaggtgaggacagatgatgattaatgtcaactcagttcccactcggaggaaagcctcattctcaacccagtagggtggtccctgctttaaacacccctcaagggaggagagggaaaccgattcacccaaaaggtagattaggggaccttggttcactgtatatgatgattcaataaagggtccctagtgcattccaagcgatgccctgttcacttccaggaacttatactaaataaattatcacgattgtgcaaacacatttagctgtagggatgttcacctcagtattggttataataggaaaaaaaaagaaaatagctggaatgtttaaccgagggatattagttagactaagttacttccagagagaactcagtggaaccatagaaaaaaaaatgataatataggtgcagtttcaatatggaggggtgacggggagttattaagtaaacataaagaaatttctttagagacaggatcttgctctgttaccaaggctggagtacagtgacacaatcacagctcactgtaacctccaaatcctgggctcagcaatccatctctcttagtctcccaaagtgctgggattacagtcatgagtcactatgcctggcaattttttttatttttagtagagagagggtcttgctatattgaccaggctgttctcaaactcccgagctcatgtgatcctcctgccctggcctcccaaagagcaaggattataggtatgaaccactgcaccaggccaaacataaaaattttaactcattatcttaaaagattataaaagattataataaagcttttcaagatatgcaatggcagaaagaatggtataatctgggccaggtgctgtggctcatgctgtaaacccagcactttgggaggctgaggcagggggatcacctgaggtcaggagttcaagaccagcctggccaataggatgaaaccccgtctctactaaaaatacaaaaactagctgggcatggtggcgtgcacctgtaattccagctactcaggaggctgaggcaggagaatcgctggaacctgggaggcggaggttgcagtgagccgagatcatgccactgcactccagcctgggagacagagcaagactctgtctcaaattaaaaaaaaaaaaaaaaaaagagagagcatggtatatataatctgttcccatcaataatgatcaagtattaataattatttgtcatccctgcttctagcccttaaaaaactaatgtttaaaaagagaatctatagtttaatcccatgtttgtaaaacaaaaattattgcactagaaaatggaaggtttgaaggactcactccaaaggttaccaggggtaatccacacatactttgagcacagacagaacactgactagcagagagaggggtttcagtctggggctaaaagagagaacacagaatttgttttcttttaagacttgccaggaaatggggcttacttaggcaatagatacatttgtgaaatatctgtggtagaaagatttcagccctccaaaagctcagaggaagtcagaggggagtcagaggaagtggctgcagctggaggcagggggatggaacttgagaggtcctcccgggccaggggtaaaaagtgacaggccgggcacggtggctcacacctatcatcccagcactttgggaagcaaaggtgggaggatcacctgagcccagaagttcgagaccagagtagacaacatagactgtctctacatacttttttttttaattagctgggcctgatggcacaagcctgtaatcccagctactcaggaggctgaagtgggaggattgcttgagcccaggaggtggaggcttcagtgagccatgattgcaccactgcacaccagcttgggcaacagactgagaccttctctcaaaaagaaatagtaacagggagccaataacctctcgcttcctcacccctcttttgtcttcacagcctgcagcacaaaactgtgatcttcatgtttgcccaggagccagaggagcagaaggggccccaggagaggtagggcccgatttcaccccaactccatgctcagtcagggacattcccctctctaccctccacagctgggcagtgccagtcagtcaactgccagggtgacctggacaaattcacggaagagcgggaagtgagcaggcttggcaaaggatgcagccccaaagggggagggtccaaatccagaccacctccgcctctcatggtgcctgaaaggagccccagtgtgtaggatatagacagcaggccagggcaggagttgggtagccagagggggattccgggagactagagccctccagcttaaacccaggggattgcctggcctgtagctctggtcctggtcggaacttctgtatccctttcacacaaggacccattagggtcctggattgccccagcctagcgcatgggtagagactcagctctttgctcccggagcccacccacaatctcttctgtagagtctggactactgaaggctcgattccagctggggctgacatctctgaagcacagatgaggaggaggatgagattaatgataatagcagtcaaggtcaattgagtacttgccatgtatgcaccaagcaccaaactaaggcagttcacatacagtctcccattgagaggctgtgatttgtccagggtcacacaaccaggaagtggagaagccaaattggcaccaaggtctgattgactctaggtggaggatagggctcgatggtggaaggccaggctgaggatggattctggagatggcggacatggcctttgctcagcctggccttggtgatgtccctccagggctgcatttcttgacagcctcatgctccagatgccctctgagctgcctctgagctcccgaaggatgaggtacagtgatggcctccagccctgtgtgtgattccagccccctcccttcccctgctcagagcctgctcccaaacctgtgcccaggccccacatgctccctgaaggacacctgacctgctgtgtccaggggtcatggcctggcttccctacctcctacctcccctgcccagcccaccccagacagggctcacaaggcagccccgtcaaccaccttcccaagcccaggagaccccactccccttagctccctgacccccagcagctgaggggttgtggagactctgaaaagaggtgaaggggagcactgggctccttctgtcatgatcctggtgcctgggcctgggggctcccatcagcactcttccccccttctctcttggtctttgtctgtcctaatctccctctgtccctctgcctgtttctctcatttcttccctctctcatcgtgtatttctgttttatcagtttatttaactgttatttcagtcttatctgtcttcctctgatctgctctctctctctgaggtctctgtgccttggtttccttccatctgtgtctctgcccaccctctgcctatatgtgacatcctgtgggtgtcgtgtgtgttggtccctctttgtccgtctgtctaggtgccagatacatcccagtccctcctctcctgcaagcctcattctctgcctctgtgtctggggggtgggaaagcggctccttcccgcctctgttcagtggggcatgcagcactgtgtttttgtccctgggcaggctgacacattgtggcctccaagaaaagcacctagagcagctctgcaaggctctgggaggaagctgccacctcggtcacctccacctcgagtgagtggtttgtgtgttggaaggtgggtgggtggggccaattacagtgagttagtgttggtgtttgggtttggtttttaagatttagatcaactgttctttccctgctgaagtcagaaaccccttggagaatctggtgaaagttgtgactcttcctcccaagatacagatcccccatgtctgacacgctcggaggctcacccctggtccctcagaggtccacgaacctcagaataagaacctgggggagaccccagctgcccgtgccagatctgctgagatctggcctggcagcccagggctgtgtccagtttcaggaagttgagtaactggaatgcagggaccatgctgccagcaacccactccccacctgctaatgttctcccctcccttctccccacccccagcttctcaggcaatgctctgggggatgaaggtgcagcccggctggctcagctgctcccagggctgggagctctgcagtccttgaagtgagtagcccgctaggcagagcctctgaggctggggcagggggggagcattctctgtcccatccccctctttcctggggttattgtaaagattaaatcggaaaatgcatgaaaattgcccctaatacaatgtaagttctcggtgaaggctagctaatagatgattcttactcagagagtctgtgactcaataatcccacttctgattcaaggtttcacttctggaacctgtctccgcatctctgaacaggcttctgaggccaccctggggagggcaggtgtgggtgcgaagtatgactaacggctggcagttgttattctggccctggggtgccgggaggggctggggctgttagctggggtatggtcagggtagacagggagggtttgtaccagagaggacactcaagcagggtgcccagggctgccaaggatccctgagtacctggcagagagtgtgtaggaggaatccccaaagtttgcctgcaatggaccagagttcttgatccctaaatgcccttggtgcttttggctcacaaagcaccccctcctcccaggcacttctgggccaaagccagaggagcccaggggagaggtcacaggtcctatattccaggctgtctctgtgaacacgctttgctgtgtgattctgggcaagttacatcccctctccgagtccctggttcccagtcggtaaatacataaattgcaggcgtggcctctgttggtggctacgatctctgaaatgagtgctggggcctaaggaccccctgctcacaccctgtttttgtgcaatgctgggaaggaagggagttgccttggttcctgttcagggcctgcacctgggaaggaaggaaggtctaaccattgcaggcaaattacatgaagactggaggttttagtatgtcctcatgtgaccttcttattagtgtggactcgtgacctggtgctgtgagggtccacactcgccctaccagtgtccccgtgggaggggagtgtagcattaaatagtaaatagaaaacaataacaagttgacaggagaccctgaaagaaaggagacactttgttcctgctttctgcacaagagaccctgcattttcattttgtcctgggtaccacccctcccttatcaggtggagaaaaggaggcccagctccagccagaaagcactcctcagatccatcacagaccgagggacccactgggtgcccatctcagctctgtcaccaacatgtctcataaccttgggctagaccttgattctctctaggactctgtttccccatctccaccatgaggacttgcaaggggtgctctctgaccatcttgggttcagtgggttccgtcatctggaaccagggatccctcccccgccctgtgccctgaccacaaagaggatgtgtttgggtcctgagtgacctccattgtgccacccctgtgatctccagcctcagtgagaacggtttgtccctggatgccgtgttgggtttggttcggtgcttctccactctgcagtggctcttccgcttggacatcaggtgagcgtgcctctccgcccccagccctgcccctgtcccccatcccacaggtcatctgctcccacgtgggccccttgtccaccagtttcatgccaacctgtcatcctcagcaccttgggcagtaccagatctgcagagcatgtgatgggcgtccactgaatgaatgaatgatcaaatgaatgaataagtatggcctcacggatgctcaaatttctccaaattcaccattagagagttcattgactctgcctcactcgttctttggatagtccttagagatttttttttttaggattttttttttaattattatactttaagttctagggtacatgtgcacaacatacaggtttgttacatatgtatacatgtgccatgttggtatgctgcagagacttttaagaaaactgggggccaggcgcggtggctcacgcctgtaatcccagcattttgggaggccaaggtgggcggatcacgtgaggtcaggagtttgagaacagcctggccaacagggtgaaaccctgtctctgctaaaaataccaaaaaaaaaaaaaaaagtatctgggcgtggttgtgagcccttgtagtgccagccgctcaggagtcaggagaatcacttgaacccaggaggcgaaggttgcagtgagctgagatcgtgccactgcactccagcctgggcgacagagtgagactccatctcaaaaaaaaaaagaaaagaaaagaaaactgggagcttcctagttgccactggggactcagggacctgtcttaattgtgggagctgatgagaatataaaaggggaggcaccagccagccaagccaccccaggcactcagggcaccgcatccatgattttcaggggaggtctgcttccctttcccttccctaaggacccccaagaatgggaggtgccacagcagatggaccaggctcagttacttaactgctgcgagctcagagcaggtcccagagcctctccaggcctcagtttcctcatctgtaaaatggagataagaataattactggcctggcacagtggctcaagcctgtaatcccagcactttgggaggccaagacaggaggaggaggatcacctgagcctaggagtttgagaccagcctggacaacatggtgagacccccccatctctacagaaactttaaaaattagccaagcgtgatggcatgcacctacttgggaggctgaggtgggaggattgcttagactcaggagatcgaggctacagtgagttgtgatcacaccattgcactccagcctgggcaacagagcaagactctgtctcaaagaaaaaaaaatgtcaggcacaatggctcacatctgtaattccagcactttgggaggctaaggcaggaggatcgtttgagccatggagtttgagaccagcctgctcaacatggcaaaaccccatctctacaaaaaatacaaaaattagacagtcatggtggggcgttcctgtagtcccagctacttgggaggctgaggcagtaggatcagttgagcccggggaaggttgaggctgcagtgagccatgactgcaccactgcacaccagcctgggcgacagagcaagaccctttcttcgaaacaacaacaaagaagaatttcttacctcattgtttattgtgagaatcaaatgagaaatgtcgatggtgtgctttgcatgtgacttgatacatgtaattgttgcttaatctattccttgtttgctaagaaagcaggccaccccaggccctccttgccctgaccagtctgggttcttgccactgccagggaagttggtctttgaccattttcaaactgctgcttcctctctgcttccagctttgaaagccaacacatcctcctgagaggggacaagacaagcaggtgaggagggaacgctcggggtgggggagtcccctcccgctctggtccccgtctgttggaggtccccccacccccagacccatgctgaccactcagctctcagttaaaccacccaagtccggcacactaggtttaatcaccacttcagtaaccaccgccccccccataaattgtcagtaatcaactgccctgttttccccttggaaggaggcaatgcagatgggaggaagggagggatatggttgggagaggtcccagagcagggcaggtgcccgcagattgctgctgtgtgggaggagacaggagaacatttgtgcttctgcgtttcggggaattttgtagacccaccgctccatacatgtcactgccctttcacgctctgaaggcaggggccgtgggtgctctgaaaaaacattttccccgtcttcgcagtaaacaaccaatactagtttagctcttcatgatgttcccggctgccctctagtgggaccaggcctcttggcctcacttgggagcagtggcagcggacagggtgggcccatgtgcagctggctgggtggagagagtcacagctagtgtgtcaagaaaaggcactgccgtacagatgggctgtcaggagtcaggggtggctcaagcctgggtggtcttgcttcccaggataggatctctgtttctggggaacccccgggttcttgaggcccaaagaactgacgtacagggaggcagaagtcatgtgatgccaagcagtggtcagagaggctctgtcttgggtcctcctgcctgctcacctggacaggaacaagctgctggcttttctaactcaggcttcccttccctgagcctcagtttccccatctgaacaatgagggactgagctaggatctagtgactgcattgtctctgagatgccttccagccctgactttccaagtctgggagtccaatgtgggtgatctgaactttcctttctaaacgatccccctcctaggggtatatgggctgggctgggagtccgagggggtgatctgaactttcctttctaaatgatccccctcctagggatatgtgggccactggatctttgccagacttcccagctgcagccaagttcttagggttccgtcagcgctgcatccccaggagcctctggtactgtcccagcccttcttgtttgggggtaaccataatagggatgaggcgtcagagggggcagagctggcagggggctagggctggggattgggatagagggaagagagggagtttaagagaaaaggaaaagaaagaggcgtgggtgtgaggggtgctgggagttggggagctctggcccctgacgggcagctcagctggcccatgccccgcattctccttggagagaagattccacatttctgtgaagcaaacagagcagctcagccactccctgcctggggtctccatctgctctgggggacacccactttccagaaagaaaggggttggcctgtctccccactaatacactccccatctgcaagctctgccatgagaggctgtgagaccctgacttggccccacctctctctaggcctccagggaagtggaggcaagtgaggccctgggaaggacatttcaatttcactgttagccccagggcaatggggagccacgggggtaacagggagaggcctggtcagatgtgcagtgttaaaatgtgagacacttgtggggcagagagggattaaagggaggcaagagtggaagcccagagggtgttaaatggtcaaggtgagtgaggatggtggcctgggctctggagggggcggtggggaggacttggagagtcactgacaagggcagctgggaactcagggtcctgcactgtcactgtcagggcaggaggattgggggctgcaggggagactcgagagggaagcgagtgccccacaggggaaggggcctgtggcctcccacttagagtgagggatgctgggagaaggatagagcccctggggctagccagggaccctgggctttctctgattccctgccctgcccattgcccctttgcagcctcagtgagtgtcctctggagcccccaagcctcacccgcctctgtgccactctgaaggactgcccgggacccctggaactgcagtaagtaacgaggacacagccccagagggcaccatgtggggatctgcccagtgacctgggagggggcttcttggttagaagacaggtgagtctttctcgatttcttcccaccagccctgccccatgagagtcccctggcctttggtagaaacttggctgtctctcggcagcccccagccttaggcagcgcatgtctcccactgggagatgctgtgctggactggggaagccttcacctgcaccatccactcaactcagggcacctgggagccctgtccacctccaaccccacccctggagcctcaccagggcacccacttgaacctgcctgcatggctggagcgtagcacttctgaaagcccttcctcaaggcacccccactctccttggggttaccacctcactcgccccagaacatctgggtctgtaaccagagactggacctggaatcaggactcttggctcaaaagggatttaactccccgggcctcagcttcttcatctgcacagtggatggtcagcctttccttttattgtcattgtggtgattctattatagtaattaccttaaaataaagaaatccaagacaaaacctgcctcacctaaacaacctcttctctcatcaaatccatgttgtcatgtgtccacaggactgtctactccttgcctatttgcatattcagtttctacctgtttgcagtcataaactagtttcatgcactgtgttttcatagcatctgtgttttccattttgcttcagtcttttttcttgctttctagcccccatctcaaatgcccttccagcccttccaaccagataatccggtttgaccccctggagtgtggccttcccatgtccttctccaggttcaaacatataaccacaaaaccattatcagacctacactattttttttttctgagacagagttttgctcttgttgcccaggctggagtgcaatggcgtgatctcggcttgctgccacctctgcctcctgggttcaagcaattctcctgcctcagcctcctgagtagctgggattacaggcgcccgccatcatgcctggctaatttttgtatttttagtagaggcagggtttcaccatgttggccaggctggtctcgaactcctgacctcaagtgatccaccttcctcagcctcccaaagtgttgggattacaggcttgagccactgcacctggcccagacctaccctattaatggcaattccttaaagtcaaccaatggtcagtggtccctgattgtctcttacctgttttcacagagtatatactgatgccttttaatactaaattgccacagtacgggacgagctgcaagttactccaccacacccttctagagtctagatcaagggtgtccaatcttttggcttccctgggccacattggaagaagaaaaagaattgtcttgggccacacataaaatacactaacactagcgatagctgatgtgctaaaaaaaaaaaacaaaactccaaagaaaaatctcatagtgttttaagaaagtttacgaatttttgttaggccgtattcaaagccatcctaggctgcatgcagcaggccatgtggcttggacaacttggtctagattgaaatccaaactgcttctaggtgttgtgttttgttttgtgtagcactgcagtcagtgctacaaaaagcactcttacgtgatttgactgttaagtacctattgtataccatgcactgggccagatcctgggaacacaaggagactgggatgcgggctctgctggccaaggcaaatcatctgcagaggaagcttaatataaaaagcccactggcggcccggcacggtgactcacgcctataatcccagcactttgggaggccgaggtggctggatcatgaggtcaggagttcgagactagcctggccaacatagtgaaaccccatctctactaaaaatacaaaaattagccaggcatggtggtgcacccctgtaatcccagctactctggaggcaggcaggagacttgcttgaacccgggaggcagagattgtggtgagccaagactgcgccactgtcctccagcctgggcaacagagcaagactctgtctcaaataaataaataaataaataaataaataaataaataaagcccactggcagcactgggcggtctgagcacaggtgggagtttcaggtccccctccattacctgtggttggggaaagtgcaatagtgaatatgaaagcactttgtcaactgtagagtactgtgatcacttgcaggattattgctataaatagtcatcaaggtactcaatgctgaagtccagtgattccccggggttccaccggggaagccagggaagatagattgtggggctccatcccccctccctgaattcaagcactgcaggtctactttgcctgtgtacacatgggcataccatgtgggatgtggtaaagagtaaagattccattgctttaaaaaaaaaaaaaaggagggtgtaatcacctcctttgccaaccagagcccatggtgtatttgggggtctggtgggacaccatacgggatgtgtttctggaaagaccaccctcaataaaggccccagtcctgactgtgcctcaggggcccatgcccagtccctggggcagaaagggtagagttgggcctccagcctgggccctggcagaggctccaacatgaggctgctcctcccgccctaccctgccccccagctcactgagccagttgatgtagggcccctgtactccatgcctcccctccaaacagccagaggagaaagcagcagagatgggccaggcccttggaggccccggagaggggagagggcagcctgcagaggatgaaggaacagaaagagaggaagggggaggtggagaaggcagaaggagaacatagtagaggtctgcgggggttgggaagtggctccaggccccccaggaaggggctgtaggtaaaccccagggaactcagtgtcttgagttgtcctggtcctccatctagagcagagacagcaaggcaggtatctggagtttctcctaaatgcactgggttctgacgaattatctgaacaatgatgagctggttggtctggtgttaatgggcaactagagacccaagccagtccctgtctccttcgctgacctgttgtatgctgaatttccactgtcatatccactcctctgggttaaggcagcattgttttcttttcttttttatttttttgagatagagactcgctctgtcacccaggctggagtgcagtggtacgatcttggctcactgcaacctctgcctcccaggttcaagtgattcccatgcctcagcctcctgagtagctattactacaggtgtgcaccaccacgcctggctaatttttttttcgttttttgtagtagaggtggaatttcaccatgttgcccaggctggtcccagactcctgacctcagatgatccacccacctcagcctcccaaagtgctgcgattacaggcatgagccaccatgcccagctgcattcttttcttaacaaacatgttttgcggaacactaaccttcatggcccttaaaaattaattctgctagtccatttagtttggggaaaagtctgctgtagctccttggaaattcataatgcacagcagcctatcgcagcctcagagaagccctgcagcaaacaaaaccatttaatttggcttaaccccgtatttcccaaacttaaaagaccttcctcttcttccagcctcacggataacccatggacccagtgctgggagggaatgtttcaggtgaccctggttaggtcccatctccagaaggctctggctatgaggccgtgctccctgctttcctggaaggtttcccccacctcatccacctgctttgtttcacagattgtcctgtgagttcctgagtgaccagagcctggagactctactggactgcttacctcaactccctcagctgagcctgctgcagtaagacgagagtttttcctatttcccggttccttgtgctcgtgtttctaaggctcctccatggcaaagctgtacctgccctctaacccctcaaccccccgcctttaccccctccaaccccctctacccgctccattctttccttaggttgttttatcattttacctggcacaactggggactccaatctgcttccagctccaccctaatactttgtcaacctcagggggcgtcgtttgcctcctctgcgtctcagtttcctcatctgacaaatgggattaatattccccgcccattcccccagagttgggactcaaataagttattctaaaatcaccttaagaaatggaagatctgtgacaaatgagctgtccaacttctccccacccacggagggtcacccactcgtagaaaggggctgtacagatgtaggtcctgtacttatcacatgctgctttttaaaggtcaccgtcaaactcgcaaaaagggaatttaagcagaattcccccaaagtattaaaactattttctaatttcagctcagactggttagaattttaaaagtatttaggccatgtgtggtggctcatgcctgtaatcccggcactttgggaggccgaggcgggcagatcacctgaggtcaggagtttgagaccagcctggccaatgtggtgaaaccccgtctctactaaaaatacaaaaattagcccggtgtggtggtgggtgcctgtaattccagctacttgggaggctgaggcaggagaattgcttgaacttgggaggcggaggttgcagtgagccgagatcgcgccattgcactccagcttgggcgacaagagtgaaactccatctcagaaaaaaaaaaagaaaaaaagaaaaagaaagaattttagaaggatttactttaaacagtcttctagtggtgggaggcggggtgggaagcagctgcagctaagatgaaaaaatacagcaggaaagtaaatcataatgttaataacatcggtgcaaaggctggggctctctgggatgtctaagatggctcgcatcacctccaggatctcgcttatgcttgggttttatctgggagggagggaggagacgtgacaacattccaggggcaagtacagcccagctcacagcaccccatggcaccctgtaatagtcccaccctgcccggagataatgagtcagaaaggactcctttggacataaaaggtggcaggttaaaattgaacaggttggaaacctcagaccggagaggaacttctctttgcctaaatcacacagcttcacccctgactcctcgtccgcctttggagtggcgtggccagcctgaccccttgccagggtttaaactttgtagtactcaacgtgtagtgcttgtggccctactgtgggccaggcattgtgtgacgacacagcagaaaaagttgaccatgtccttatcttcttggagctcctcttacaatagtgggagctgaaaaataagtaaagtaaaatcaaataagatgaacttagccagtgataagagaattttctcgggatgtggtgaagagtggctggagaggtgatttagatgtggcagaagccatcagggaacatctctgaggagggatgctgagctgggacctaaaggaagagagagagctcgccttgtgaagagcagggaactgcattccaggcagagggaacggcatgtgtgaggccctgaggcatgattaagcttggtgggctccaggaacagcgcggaaccgagacagccagagcacagtgactggcagggacagtcctaggagaggaggaagagagagatgggctcgggttgggttgcatggggcctggcacccatggggagagtttagacttttgttcctgggaacatgaaagggagaggaataatttgggttttctttctttcttttttgtgggggagggtctcgctctgtcacacaggctggagtgcaatggcgcaatctcggctcactgcaacctccgcctcccaggttcaggcaattcttgtgcctcagcctcccaagtagctgggattacaggcgtgcaccatcatgcccagctaatttttgtatttttagtagagacagagtttaaccatgttgaccatgctggtctcaaactcccgacctcaagtgatccgcccgcctcggcttcccaaagtactgagattacaggcaggagccactgcacccgttcctcatttgggttttcaaaagttcagactgagtgctgggtagagaatggattgggagatacgagtggaaatgagagtgggaagagatgtgtgcagcagggtgaagggtgctgggggctgatcactgctggggtgggatagaagttggtagactcagggtggatcttgagagtggaatttacagacaagctgatagggggattactggatgaggcaaatggaggtgctgaggctgcctctgagggcagagtggacccatctcactttctctaaggcagtggtttccaactgggggtgattttcacccttgggagtcatttggaaatatctggagatatttttggtggtcatgactgcgggtgaggggtgctgctactggcatcgaatgaatagagatctgggatgctgctgaacatcctatagggcacaggagagcccacaacaaagaattattggacctcacatctcaatagtgctaaggtttaaaaactgtgtctgaagggcctgaagcttcccactctctgtgagcaaggactcgcctgtgaaatctgtgcttgcaggtaaaaacaatagtaataataacagcaagcacaggtcccatgcccggcagtgcacctgcatgatgtaattaaatcctcatatacctcgagagtcatacatgacgagtcttgatttccagataaggaaactgaagctcagagaggtgaagtcacttctccaaggtcacacagccaataagcagaactgggactcaaatccaaatctgcctgtccctcagccctatttgtgcctcttgatcccctgcctgcttccctattgccttgctgagctgctagccctccccaccctccctttccttaccctccaggctagccaggttccttgtccactcatcttgccggatctaccccctttccttttcaggctgagccagacgggactgtccccgaaaagccccttcctgctggccaacaccttaagcctgtgtccacgggttaaaaaggtggatctcaggtgggcattcccctgggacagccaggactcgtcctgaagggttgtgcctggagtctggtgggtatgagggggtaggatgaagacagtaggacccaactagaggctgggcttccggaggaggggtgctggccccgtgggggcatcctgaggctgtggccacagctgtctgacccaggtcctgtctgatccaggtccctgcaccatgcaactttgcacttcagatccaacgaggaggaggaaggcgtgtgctgtgggtaagcccccttgaaccatgcctaggcagctagttgatgttggggaccagtagatctgcctcctgggtggccagagcagtatgcagactgcctaccacaaaacattcccctggaacaaccctgcagagggacttgtttcacccagcatgaagaaacacaggtccgggtgggatctactgtgggggtgggagcagtggattctggacacttccagagggtccaagcttgagtggagacccacctggagcccagaggctgtgccctgggctagccaggccggagggggtctcagtggccaaacgccccatcccctgcttgtcccctttacctccgtccagcaggttcacaggctgcagcctcagccaggagcacgtagagtcactctgctggttgctgagcaagtgtaaagacctcagccaggtggagtaagttgagggaggaggaggaaggagaggagcatggacgcatgcctgaggggcactgaagggggtatgagggtccgtgtgtgcacatacactcatgtgtgcctgcctacacctctcaggaccagctgtcagggatgcctgggtcacatacccaaagcttccctgaatcaattttctctctcccgcccccactctcgccatggtggagctagttccatggtgtgccctctgacttgggcagccctcagcctcaagtatgtgcaagctctgctggcagatgggggctaaaacgcaggattcattgttggcccagcaggtggttaaaagtaccggatgactctgcctgaggagggacgcagagccagccagggtggggtcttgcagtctcttgtattgttgagatgtggtatctgcgtggcctgtcttggatattcaaatagtcagcccctgcatgggtggaataataatagctaacagctactgagcactttctccactgttctaagtgcttgacatgttctttttatgtttcccatatccctggatactagtattgttctcattttacagatgagggaactgagacacagagggtgtaagaacttgcccaaggtcacacagctagtaaaatgcagagtccctgctcagacgcattgggaatccagcctaggaccagtgggaaatagagagagcagtccgccaaaaatgccacacaattttcatttctgttgtgatgtggcagagaagaaaaatgtgactgataaaatcatggatttcttttttttttaagacctggggtctcactctgttgcccaggctggagtgcagtggtgcaatgataggtcactgcagcctccaactcctgggctcaagcgatcctcccacctcagcctctggagtagctgggactacaggcacacaccaacatgcctggctaatagtttagttttgtaagagatgaagtctcaccatgttccccaggttggtctcaaacttctgagctcaggtgatcctcagcctcccaggttgctgagattacaggcatgagccgctgtgcttggaatgtattttaaacagatatgaataagaaatatgtctttgagttttttgtttttcattatagagggaaatttttcttttctttctttctttttttttagatggagtctttctctgctgcccaggctggaatgcagtggcgcaatttcggctcactgcaacttccgcctcccaggttcaagcaattctcctgcctcagcctcccaaggagctgagattacaggcatgagccaccatgcctggctaattttggtatttttagtagagacggggtttcaccatgttggccaggctggtcttgaactcctgacctcaggcgatccgcctgcctcgccctcccaaagtgctgggattacagccttgagccaccgcacccagccaatttttcttattttaaagactattttattaagtggcttcataagacagaccaatttttaaatgacgtttctcaggaaaagatgaaattaacaaacatcaaaaatgtcacagacctaggaggaaaatcagatgttccgggacacactggttatattatttctgaaactgtagttaaaactagctgggcgtggtggctcacgcctgtaatcccagcactttgggaggccaaagcgggtggatcacctgaggtcaggagtttgagaccagcctgatcaacatggtgaaaacccgtctctactaaaaatacaaaaataattagccaggcatagtggcacatgcctgtaatcccagctacttgggaggctgaggcaggagaatctcttgaacctgggagacagaggtcgcagtgagccaagatcgtgccattgcactccagcctgggcaacagagcaagactccatctcaaaataaataaataaataaaaccacagaatgctgcaatgaagggaagtaagaaacttcaggtgaggtttccaatattgatattgcattcccagattaaaagaagaaatctatgggtttaatgcatcctgcaaacatttttttttcctgaatttcctctcattcaaaaactgtggatcccaaatgatgccggccaagggcgtggtgaaggcaaattggtttttctttaacccttgaaagcctgctggaggcacctgagctatgagtggtcacccgatatggaagaggaccaagaggatgggtttactgtggtgctggggaggggatagtagcagagaacgtaggagttgctggtcattctagtggtgatggaagggatggtgatggtggtactgggcttggtggtgtagaattgtggtgataatgaaagtggtggtggtgatggtggtaatactggtggtggtgacattggtggtggtggtgatggtggtgatactggtgatggtggtgatggtggtggcgctggtgaccctgacatggggtccagtagcagtgacagtggatgcaggctcctggtgactgaggagcatctcaggctgaggaggcacctctgatccccgccactgctccttaccccctacagtctctcagcaaacctgctgggcgacagcggactcagatgccttctggaatgtctgccgcaggtgcccatctccggtttgcttgagtaagtggaaagcagcataaaggacagatagcaaggaggaaggctcccctaggccaaaagcatgatgggggctccttctgagggcatcccccagagcaccagaggacaaggactgtggagggcaaggggcaattcttcccttgccttcactcccctggccttgggtcctttcctctgtccctcacacccaccatgggcagatcctccaccaaacacccaagagaggctgtgattcgtggcagggtgacacacccctacagccaaactgacctggggacagggaagcaacattccatccccaaccagctgatgcgggattgcagctgcctggctcctggtccatcccgtccctgaaattcttctgacccaatctgtggaacataaatgtggagatgtccctgtggcaggcaaggggccttaggaagtcatccacatggttgccccatctctcccgtgacctgctggagtgacagccagctccaggacaccacttgttgctaggcaactgagcttcgtgctcgggagtccttgacccatgcggggctagagctgccagcctggccttgccagtgcccagaccccagaccacaggggcagcgggcagggtgagtgcagcgctcaaggactcagggtctggtgccagttctgcctgtgtggggatggtatccttctgggcctcagtgtgtccatctggagaatagatgcttagacatggaggcttctcttcttggaaatgacagctggaagggagatggagggggctgggcagggctccaaggaggtcctgccctcactcccattctcatctccatttcccttctagtctgagtcacaacagcatttctcaggaaagtgccctgtacctgctggagacactgccctcctgcccacgtgtccgggaggcctcagtgaagtaaggggatgttggtccccgaaaagcccctttctgctggccaacaggtgcccctggctgatgatgggagaagcaaggcacccacactttgtggccttccatctgggtggcttggagcaacctctgcctttctctgaatctcagggtttcctgggcatgggatcataatttctatcccctgatgcccgggtgccatggggaccatggaggccatggggtgggaaggccaggtattgccatgctcacagaatgagtttgggggtctcctctggttctgaggcctccatcctcccttgtccttgtgggtgcagccccgcttccctctctgtgccctgtgggtgccctaggtgcctaggaagctggcatgtctgggcaccgtgcttccccaggcccttctctctgcagcctgggctctgagcagagcttccggattcacttctccagagaggaccaggctgggaagacactcaggtaatccctgcagggtgatgggacaggggacagagaggggagaggaggctgaccctatggcggcctccatggccccctcttccctgggccctctcctcctttagagagcagcttcaagctcactgcctgggtctgttcctccagatctgcccccgatgccctggtaactccagtctcagccagggccttggcattgaacttgtgcctcttagcccaccatcctaagcccaactcagcccaacattctcttccttgccatgtcctgactacaggccttgaggcttctgagtgtcacggttaaagattttgaagccaactgaaaataaatccctgatctgccacttaccagctatgtggccctggacaagtaaaatggggataataacacaacctaccccttagggttattgtgaggattaaatgagttaataagtataaagtgccaggaaaaggtctggctcatgggagtgctgtcagcagttattgtaactgttattattattattattattattattattattatcattatcattacccctggtagccctgactcactgccacggccagttcctttacatgtcttacttcagctgtgaacagggcctccaaactgatccctgcatcttatcaggcctcctcccctccattcactccacagcccccagagggatcttcacaacacacatctgacagtgcccctctgctactctgtgcccctcagtggctccccattaaccccagggtgaagttcaaagtccctagcatcttctccctcacagtctgatccaactgtcaccttccaccatgttccttcccacctcccccacaccacacacacgccctacacaccaacccatataccacagatacaccaagcacacccaaacacaccacacagcacgcagcacacacaacacacgcacaccacacagcacacacaacacacaaacgcaccacataccatacacataccacatacacacacatacaccacacacaccacacaatacacacaccccacaaaaacaaaccccccacatacatacctggcacattacaaatacagcacacacaccacataatacctacaaataccacatacacaacacacacacacacacacagttcagccataaccttcactatttgctcctagatcaagccctgcctgaagattctctgcctctgctcacaccgcactcagctcaacattctcttccttgccttttctgagataaaattctcccaatcctttaacacccagctcaaacatcagcccctcctggaagtatcccagcagccctgcctcatcagagtgaactgccccgaggttcactgggccctttcacttggctgggcccgtctgctggccacccagggctgagatgcctggacagcagagccccacggagaatcccaggcacacctccctccccagggagctcagccagtgctggtccgggagagtaaggcagtggttaagagcttggggtctgcagtcagactgacctggatggaaaccagattctgcccttctttcttatctgctgtgtgtccttgggttagtcagtttccccacctctaattggtgctatgagaattaaaggagaccctgcgggtaaggcaggaagtcccatgcacccagaggctggcacagtgcctgacctagagtcagcctccctaaataacttactcctaatactttcttacagggggtgtgggaggttcctccccaaagagacaggaagctcccagagcaggagctgcatatttggcctctcaggccctgctccaggcctttgccctcagaggtgggatgctcccccaataggccctcagggaggctgagatgaagctgagcagcagtgcccacaggcctcacccaggctctgccctggctttctgccctcaggctaagtgagtgcagcttccggccagagcacgtgtccaggctggccaccggcttgagcaagtccctgcagctgacggagctcacgtgagtgacccacccagcccgtgaggacagcagaggggtgggggcaccctgccagagccacctcagtgactgacctctgtctccaggctgacccagtgctgcctgggccagaagcagctggccatcctcctgagcttggtggggcgacccgcagggctgttcagcctcaggtacctcctcccccgctgcctccgggaggggccatggcatgaatgggagcaggggtgggcactggagtaagaggcccccaggatcatggccccagtcatttcctgtacccacaaccctgccatctggaccctgagcaaaccctgtccatctgtcccagagactccacaaggcacacagagaaactgtccttccccacactggaggcctgtgctttgggatttaagaaaaaaagaaagaaagaaagaaagaaggtttcagaggata

SEQ ID NO: 15695 - DNA, 57758 bp, Homo sapiens
gtccgagctcctttttgatctgtacctgagccctgaatcggaccacgacactgtcttccagtacctggagaagaacgctgaccaagtcctgctgatctttgatgggctagatgaggccctccagcctatgggtcctgatggcccaggcccagtcctcacccttttctcccatctctgcaatgggaccctcctgcctggctgccgggtgatggctacctcccgtccagggaagctgcctgcctgcctgcctgcagaggcagccatggtccacatgttgggctttgatgggccacgggtggaagaatatgtgaatcacttcttcagcgcccagccatcgcgggagggggccctggtggagttacagacaaatggacgtctccgaagcctgtgtgcggtgcccgcactgtgccaagtcgcctgtctctgcctccaccatctgcttcctgaccacgccccaggccagtctgtggccctcctgcccaacatgactcagctctatatgcagatggtgctcgccctcagcccccctgggcacttgcccacctcgtccctactggacctgggggaggtggccctgaggggcctggagacagggaaggttatcttctatgcaaaagatattgctccacccttgatagcttttggggccactcacagcctgctgacttccttctgcgtctgcacaggccctgggcaccagcagacaggctatgctttcacccacctcagcctgcaggagtttcttgctgccctgcacctgatggccagccccaaggtgaacaaagacacacttacccagtatgttaccctccattcccgctgggtacagcggaccaaagctagactgggcctctcagaccacctccccaccttcctggcgggcctggcatcctgcacctgccgccccttccttagccacctggcgcagggcaatgaggactgtgtgggtgccaagcaggctgctgtagtgcaggtgttgaagaagttggccacccgcaagctcacagggccaaaggttgtagagctgtgtcactgtgtggatgagacacaggagcctgagctggccagtctcaccgcacaaagcctcccctatcaactgcccttccacaatttcccactgacctgcaccgacctggccaccctgaccaacatcctagagcacagggaggcccccatccacctggattttgatggctgtcccctggagccccactgccctgaggctctggtaggctgtgggcagatagagaatctcaggtgagtaagagtggaggaggaccggggaggggattgggcttttgggggagcagaggccaaccagtctagcaaacctctgccaagaggactggataagaatcttgaatatcagaacataatggcctgcaatgcaagagaggaagctccataccttgacaggacctctggagtccaaatggatcctcctcttgtctgtggtttctggactctcagtctctctgtcaatcatgggctgaaaccacagatccaggctgtctatagaggctggtggactttgggcaagtatatggagcacacacatgcacactgtctaggccagagtttcttcgttcctaaaacgaatctgtaacaatagccaactcatatggtcattgcaagaatgagatgggatggtgcatgaaaaacattttgtagcacagtgcctagcacagagcaaaggctcagtgtgcatattagctagagaaaaggctaggctgcagtaacagagaaacctcctccccaaatacagtaggttaaataatgtagaattttatttctctctcatggaagagtcagaggtaggtggtccaggtcagtggaatggctcagctccacgcagtcatgcaggtacccaggtccctcccattttgctccattatccccttgggaatcctatctgcacagtcaaagctacgtcatgggtatatctgtgctctggcttgggaacaaggaaagagcatggaggaacatgtcaatgcattaaagttcagtcctgaaactaggatacatcccttccactcacattccattggtgagaacatagtcacctggccacactgagctgcaagggaggctgggaaatgtgatctctggctgggaaaccatgttcctcatgatagctctattgctgtagatgaagtggagaatgggctttggtggacgattagaagtctcggccataatatgtatttgttagtactactgtattaagccccatctctctgaggggatggcgatgacttctcagctctgcccagcactgatcctctgacacttcgcttcttcttatggcagctttaagagcaggaagtgtggggatgcctttgcagaagccctctccaggagcttgccgacaatggggaggctgcagatgctggggtgagccaggccttggagctgagaagggtcttcagctggggatgcctggtactctcctccctctccttaatcctacacaaggcagattcctggccccgcccttttcccctcctcgttcctccccaccatctttgcttactctgtaggttagcaggaagtaaaatcactgcccgaggcatcagccacctggtgaaagctttgcctctctgtccacagctgaaagaagtcaggtgagtgatctccaggagggctcactgactggggagatgagccactgcccaggtcccagagtccccctggggcctgcatgttcctccaagtctgaccagtagtttttcagtgagacccagagagggaaggcatcagtccaagtactcagtagggctgagtccaaacccaaggctcccagagtccccagagcaaggcttccttcatctaatattttagactgtcttggaggagcatgagtgttaaggctccctccctctttctgaaatcccaggagaagggatagcagtgcgtaggcaggaatcaggcactgtgggtacacataactacatgaagcaccacacaccttcacatttgttcacacatgtctacacttgcacagaagtacacaggcatatgcaagaatatgcacccacacatgcccactcataggtgtgcacatgtatgcagcgcacacatgcacctttaactacatgtacacattttgatgccagcacactctaactaactaagcttgtatgcacaaatatactcctgccctgtgtctgggactcagtaccatggggaggagtgggaccagtgaccctcctccctggcagaacgctgctagtttatatggcacctttatgacatttagagaaggcaccacttcatccacacagatgcagcctgtcactaaggttcagcacttgttgagtgaaaataataagttggaccacagtccctattgtcgtctcggctgggcatctgtgaaccgtgattaagccaaggttcagaagtactgaacttgttgacatttttcttccctggctattgaaagtgactttaattttgtctttcatcacccaccattgttcttaatcaccctcactcccctcaactcatctgtctccccagctaggaacccaggcaaggctggcttgtgaacaggtggggaaagtgaggtcagagaggaatgcgcttggctcagggctctgggtgagtcagggccacagccgaggctggaagcgatgtctgcagcgtcccagtctagactttactcattgcctggggggcctatcccaggcacatcccaggcataagccctgggagcagggtgctaggtctcctcattgtgcctcatgaagaggccgtcagtctgtcttctagatcccttgagccgccaggcaaaaacttccccataggaacagaatagacccagaattgaggccagcagagggtctttcctcctagccgtgcctgctggaatccggcgagcaggccatcagctctttctgggcccctgtcttatgtctcccacatgagggtggccatcctgtcacttgctaactggggcttgcaagtgccccaaccccagggcaaagggactgggccttggtctcctcgcagttttcgggacaaccagctcagtgaccaggtggtgctgaacattgtggaggttctccctcacctaccacggctccggaagcttgagtaagtgatctttccactgcctctgcagcccagtccctctctatacctgattcaccccactcccttgcaaggcaaggaaggtctggggcccctggggtaggggattccactcctgacacctttgccacaatcttgcagcctgagcagcaacagcatctgcgtgtcaaccctactctgcttggcaagggtggcagtcacgtgtcctaccgtcaggatgcttcaggccaggtgagcagaaggaaagggatcttggccttatgggccttgagaaaagaggaggggaaagtgggatgggaaatggaggaggcccctcgtctgcaggataaatctgtgcataccctactgttttactcacagctttaccttcagaacctagctcaggcttggcacctggtacttggtatatattgaattaatggatggatgaaaagatggatgtatggatggatggctgaaaagatggatgggtggatgaaaagatggatggatgaatggatggctgaaaagatggatgggtggatgaaaagatggatggatggatggatggatggatggctgaaaagatggatgggtggatgaaaagatggatggatggatggatggatggatgaaaagatggatgggtggatgaaaagatggatggatggatggatggatggaaagattgatgggtggatgaaaagatgaatggatggatggatagatgaatggatggatggatagatggctagctgaaaagatggataggtgtgtgaaaagatggatggatggatggatggatggatggatggatggatggatggatggatgaaggaatgagtcaacaagtctacgaagcacaggcatagccaaaggaataattagctgtgtgttgccctccatggtgctgaaccaatatagccagttttgatcatggggtaggttaggtgtcatttttcttactcataaaaatttctattaaaaaaaattcagccgggctcagtggctcatgcctgtaattccaacactttggaaggccaaggcaagaggattacttgagctcaggagttcgagaccaacctgggcaacatagtctctacaaaaaatgaacaaaattaatggggcatggtggtgcatgcctgtggttccagctatttgggaggctgaggtgggaagattgcttgagccgtggaggttgaggctgcagtgaggtgtgaacacaccactgcactccagcctgagtagcagagtgagatctccatctcaaatttaaaaagaaaggaaaaaaaaaaactcacaacattcttaatttttattatatttcttgtgaaaattgtttttctgactttttaaaacactcttgcaggattcatcaagcaaagacataatcagtatttcacatgcctgatttaaaacacttttgctagttccgttatgtttccctgtcaattgcaaaatcagctttatctggatgtttgaacatttggggcagaaaagggtgtgcctgtggtgggtgatgtgctggtttccagtctctgggtttcatggcttggtatctgatcctgcagggaggcggacctcatcttccttctttccccgcccacagagacaactgcagagctacaaaggtaagaagccaagaggcggtgggcctggggccatccttagaagcaacttgggctcaggcagttgaggggaaaggtgaccaagagactaggaagagctggggtatgggaattcttcctgctactgctgcactgaggaatgaattactgcttaggttggcaaaggattttaacttcctctagcgtgtccagaccacatctggtccctgtggaaggaagcatccccagaagactcagaggaaggcaaacccttggggagaacataaagatactgttagactggcattactagatggtgaaaactctggaaaagcccttacaactgaaaaaagacagggagggcaattatggtacctacatcttagggttgttctgagaattaaatgagttactacacttaaggagtttagagcactgttggcatgcagtgggcagtcaaatgctggctattccagctgtgcatggattccagcttggccagtcttggatgggctgagaaaagggagctgcttttccctaaaagaccatcccaactgtgctctaccacactttgctctcctggctaagactcagagacagatgtatgtatgcccctgagcaatctctttcccttctctggatctcgattccttgcttgtataatgacctggtagtgtaggaccaatgttgctgggtgcggtggctcatgcctgtaatcctagcactttggaacgccaagcacgagaatctcttgattccaggtgttcaagaccagcctgggcaacatagcaagaccccatctctaaaaaaaaaaggcaggcgtggtggtgcacacctgtagtcccagctactcaagatgctgacgttgggaggatcgcttgagcctgggagcttgagccatgatcacaccactgtactccagcctgggtgacagagagggactctgtctcaaaaaatgacccactaggaccagtgtcactttcttttccctctaactgcttaaagctgtgatgctcagtaggatagccactagccccatatggctatttcaatttaaataaattaaaattttaatgctatttcaatttaaataaattaaaattttaatgctattttaatttaaataaattaaaattaagtaaaatgaaattttcagttcattagtcacattagctatatttcaactgctcagtggccataggtggctagtggctcccatagcaagtggtacagatgccaggacatttccatcattgcagaaagttctattaaacaggctggcatggtggctcatgtctgtaaccccagcactttgagaggctgagggggcaggatcgcttgaagctaggagttcaagaccagcctgggcaacaaagtgagacccccatctctacaaaaaaaaaaaaaaaatagctgggcatggtgattcactcctatagtaccagttactcaggaagccaaggtgggaggatcacttgagcccaggagtttgaggctgcagtgaactgggatagagccactgcactccagcttggggactgagtgggaccctgtctctaaaaaaaaaaaaatggttagcaccaatccaaaaagtctgtgaaacctggctcatgatgtcctagcttccctgcatcccctaacgctccctcagcccagtgggagagagtctgtggtttaccatagcctggactcactgcatacagctcatgctcctcgccttctgaaccacagacagcacatccacaaatggagaccatcacatcatcgacaatagcagcttctgtttactaaccttcgattttacacctatgctgggtacttggacatacattgtctcattcaatccttcaggtacctatgtgctagatgttgtcatccgttttagaaaagagaaaagggagccgactgcagtgatttgcccaaggccacatggctatacatggcagagccaaaatttgaataaaggttccatttgacctcaaacctgttgcccctcctgctctgctgaatcacatcttgagcatctgcaagcagtctcctttgttaccgactcactttgggttgtgcttcagggtcttcagcctctagaagccaaggaaagaggcttgatccaccaggccctagatgcctgagcccaggccaatgcttgatttgttcttgccagagctccagacctgcaggaaagtgacggccagaggaaaggggctcagagcagaagcttgacgctcaggtaccttggagggatctattgccttaggagagggatatgatatgggggaaagtccgaggcaagggagagcaggggcagggaggataaagggaaaagcagatgagggacagggaaaggattagccgggtgtggtgcccatcctggatagcccatcctggcttgaataaggagcatctgtcataataacaatagctgcaacttaatggaaccggctatctatatgccgggcattgcactagatgttttacatccattacctcactgtaattcctttagaatctctgtgaagtacacattattattcccctttgagggaggaggaaactgagtctcagacaggttaagtcccttgctcaagatcacccagctactaagaggtgtggctaggattagacccaggtctgtgggccccctgactcccccagcattggaagctggaggggccatggagtaggggctgtttgccctgagcccttctgtcccccactcctacccaaggctgcagaagtgtcagctccaggtccacgatgcggaggccctcatagccctgctccaggaaggccctcacctggaggaagtggagtgagtatcacgggaagccctggcgtaggagccaggaaaggaggttggagagggtgggcagggcctcgcctttgggtgggtggtgtgggggaggggcatgctgcctcatgaagaatttgggggaatcagatcattgtaacagctgctactattcagcacttgtcccgggtcaggtgctgtgctagggactgtacatgcctcctcgcattcactcctcacatctctgtgatgtaagcactgttactgtcctcattttatagaggaggaagttaagctgcagaaagataaacttgctcaaggccacacaggtaggaagagtctaggctagggttcaagcccagacagtctggctcgcagcctcatcctcataaccactgctacctctcttgctgagatctgccaagtagaaaccccaccacacctgggtctgccttccaaaccacagtccctcagggctccccccacccccttcatccttctcccagagtagagtgggataaccttctcttttcgggatggagaaattcccatggcgtccagcccctggctgaagccaataagagtagtgcttggggatggacggaggctctgtcacgaccctaggaggggcgcccctccaggaaacctccaagtgaacatgaaggcagatgatggaacgccaggatgtgttctgggtcgagtggccccacctcagggtaagacggataggggtgagggttgtcgtggtgatcacctcttgatcctggacctcgtcccattgggagaaccaggacagaattagaaggtggttttttaacaagctcacacacttctacctgcctcaccagcactgagcatgcccctccccgagtgccatcacctgcagaagcagccccatcacccgcctggttacgcagccacctcctagcccccttgcccttctcccacatttagtccctccagatggacctactggtagcgctcaaaactatcctcttttcctccacctttctagtccaacccaccctcatctcttacctggatgaccccctcgccttgccttccttgctggcttccctgctttcaccctggccacttccacctggcagagagtagatcacttttcactgatgcctgcccccttcactccttcccactgctcaggataaaacccacattctaaactcccaggtggtccagaaccctgcccccagcctcctaaaccccatctgaccccatccttccactcaatctccaatccagacacactggctctctttcaggtcctcatatgtgttatgccacagggcctttgaatgtactgcttctaccaccaggaacacccttcctccatctctcccccaaccttttacctactgaactcccagttatttcagcaagtagcttaagcaacaaataagccatccccgactcccagactaggtcagatgcccccataatcatgaagtttatcacaaaaagcaattatgtaacttgcagcataaaggaagagttgagggtggggccttgaaggcaggctgcctgggttcaaatccaggttctccctcgagcaagtgccttaactttactctgcacttaaccactctgcacttgagtttactcatcagtaaggtgaggataattacagtgcccacgtcatcggcactatgaggatgaaataggccaatagtcatagaagaacctaggatgttgccaggcatgtggtatggagtctgtcgatttcagttattatcaaggttcattcctgagagtgacactttgactaaagttagcaaaggaggagtaagtgatggggattgagggaggactccagccccacaatacagtgcattgggccccccgtctcagcctctcagggaaccagctggaagatgaaggctgtcggctgatggcagaggctgcatcccagctgcacatcgccaggaagctggagtgagttgtccaccccaccgctgggtaccagggaaggccctgtagagccccaggaggtccccgtgttcgtaatcagcagtaagggtgctgatccactgccacccctgcttcctcccaactccagcaaagtcaagatggtttgaccatgccttgccttcacctccggcatgagccactgtcttagtccaatcatctagcacccttacatgtgtaaaatgcgttcattatacatcagtggcttgcattccaattcatctttgtagctgccctggagcacggtggggtggggtgttgcactggggaggtgtcagggtgggtgggatgttgcactgtggaggtgtcatgctggggtgctagggtagggagtggtgtgttcctgtggggatacactgttggggtgaggggtggtgagatggaaaggtaggctattaggctgctgggtgtgctgtggtgttgcatggggtgagggtgatgtttgggtgggggtgtcttgggggtcttaggatcaagtgtgggtcgggtttggggagtgttgagattgggtagcagtggtttggggcctcagctttggatttcaatcttcgctctgtcacttagtagcattgtgaacctgggaaagtaattgaatgtctctgggcctcggtttcccctctgtaaaatgggatcacatgaaaccatatatgtacaaagccttttgtacagagtctggtatagtcagggctcagaaaatggtggttattttacagatgagaaaactgggggtcagagaggtgaaaacactgagttcttgctgtcaagctggacaactttattttccaaatgggatgggggtgtcatgcattttttggcttactcacacgcaccagaatcctttgagatcccctggcaagggacctaggacatccaggagtgacagccagcaagctgctgagccacagggaggggctagagctggctggggctgggtacctcagccacatgccaacggctgccttctcctgctctccacagcctcagtaacaacgggctttctgtggccggggtgcattgtgtgctgagggccgtgagtgcgtgctggaccctggcagagctgcacatcaggtgggagctccctcagaccacggtacccatccccccccccatcatgctctctctgaagcccttggaattccttctgggcccaggccttgggacgggcagaagatgctgctgctgtcccacccagaccccgttacagccggcacccctcttcctagctgctgtggatataggctgctcatggtttatacctctggagaactacccttggctgataagaaccagagacgcctggcagggtacaacccccactttcccctaacctagagtggccaatgacagaggcagagggcacaactctccagcccaaactctccagtgggacaaagctccctgggagactaggccaaggacttgctccgtttggcttccctcagtcccttactgtttctcctgagagcagaccgtcagttcatgatgtgcgcaactgacaagtgacatgcgaccccctaccccactcacagacccaggctctgccactagggaacccaatcctatttctgtaagtctcgccgttgagtatggggaggtgaggacagatgatgattaatgtcaactcagttcccactcggaggaaagcctcattctcaacccagtagggtggtccctgctttaaacacccctcaagggaggagagggaaaccgattcacccaaaaggtagattaggggaccttggttcactgtatatgatgattcaataaagggtccctagtgcattccaagcgatgccctgttcacttccaggaacttatactaaataaattatcacgattgtgcaaacacatttagctgtagggatgttcacctcagtattggttataataggaaaaaaaaagaaaatagctggaatgtttaaccgagggatattagttagactaagttacttccagagagaactcagtggaaccatagaaaaaaaaatgataatataggtgcagtttcaatatggaggggtgacggggagttattaagtaaacataaagaaatttctttagagacaggatcttgctctgttaccaaggctggagtacagtgacacaatcacagctcactgtaacctccaaatcctgggctcagcaatccatctctcttagtctcccaaagtgctgggattacagtcatgagtcactatgcctggcaattttttttatttttagtagagagagggtcttgctatattgaccaggctgttctcaaactcccgagctcatgtgatcctcctgccctggcctcccaaagagcaaggattataggtatgaaccactgcaccaggccaaacataaaaattttaactcattatcttaaaagattataaaagattataataaagcttttcaagatatgcaatggcagaaagaatggtataatctgggccaggtgctgtggctcatgctgtaaacccagcactttgggaggctgaggcagggggatcacctgaggtcaggagttcaagaccagcctggccaataggatgaaaccccgtctctactaaaaatacaaaaactagctgggcatggtggcgtgcacctgtaattccagctactcaggaggctgaggcaggagaatcgctggaacctgggaggcggaggttgcagtgagccgagatcatgccactgcactccagcctgggagacagagcaagactctgtctcaaattaaaaaaaaaaaaaaaaaaagagagagcatggtatatataatctgttcccatcaataatgatcaagtattaataattatttgtcatccctgcttctagcccttaaaaaactaatgtttaaaaagagaatctatagtttaatcccatgtttgtaaaacaaaaattattgcactagaaaatggaaggtttgaaggactcactccaaaggttaccaggggtaatccacacatactttgagcacagacagaacactgactagcagagagaggggtttcagtctggggctaaaagagagaacacagaatttgttttcttttaagacttgccaggaaatggggcttacttaggcaatagatacatttgtgaaatatctgtggtagaaagatttcagccctccaaaagctcagaggaagtcagaggggagtcagaggaagtggctgcagctggaggcagggggatggaacttgagaggtcctcccgggccaggggtaaaaagtgacaggccgggcacggtggctcacacctatcatcccagcactttgggaagcaaaggtgggaggatcacctgagcccagaagttcgagaccagagtagacaacatagactgtctctacatacttttttttttaattagctgggcctgatggcacaagcctgtaatcccagctactcaggaggctgaagtgggaggattgcttgagcccaggaggtggaggcttcagtgagccatgattgcaccactgcacaccagcttgggcaacagactgagaccttctctcaaaaagaaatagtaacagggagccaataacctctcgcttcctcacccctcttttgtcttcacagcctgcagcacaaaactgtgatcttcatgtttgcccaggagccagaggagcagaaggggccccaggagaggtagggcccgatttcaccccaactccatgctcagtcagggacattcccctctctaccctccacagctgggcagtgccagtcagtcaactgccagggtgacctggacaaattcacggaagagcgggaagtgagcaggcttggcaaaggatgcagccccaaagggggagggtccaaatccagaccacctccgcctctcatggtgcctgaaaggagccccagtgtgtaggatatagacagcaggccagggcaggagttgggtagccagagggggattccgggagactagagccctccagcttaaacccaggggattgcctggcctgtagctctggtcctggtcggaacttctgtatccctttcacacaaggacccattagggtcctggattgccccagcctagcgcatgggtagagactcagctctttgctcccggagcccacccacaatctcttctgtagagtctggactactgaaggctcgattccagctggggctgacatctctgaagcacagatgaggaggaggatgagattaatgataatagcagtcaaggtcaattgagtacttgccatgtatgcaccaagcaccaaactaaggcagttcacatacagtctcccattgagaggctgtgatttgtccagggtcacacaaccaggaagtggagaagccaaattggcaccaaggtctgattgactctaggtggaggatagggctcgatggtggaaggccaggctgaggatggattctggagatggcggacatggcctttgctcagcctggccttggtgatgtccctccagggctgcatttcttgacagcctcatgctccagatgccctctgagctgcctctgagctcccgaaggatgaggtacagtgatggcctccagccctgtgtgtgattccagccccctcccttcccctgctcagagcctgctcccaaacctgtgcccaggccccacatgctccctgaaggacacctgacctgctgtgtccaggggtcatggcctggcttccctacctcctacctcccctgcccagcccaccccagacagggctcacaaggcagccccgtcaaccaccttcccaagcccaggagaccccactccccttagctccctgacccccagcagctgaggggttgtggagactctgaaaagaggtgaaggggagcactgggctccttctgtcatgatcctggtgcctgggcctgggggctcccatcagcactcttccccccttctctcttggtctttgtctgtcctaatctccctctgtccctctgcctgtttctctcatttcttccctctctcatcgtgtatttctgttttatcagtttatttaactgttatttcagtcttatctgtcttcctctgatctgctctctctctctgaggtctctgtgccttggtttccttccatctgtgtctctgcccaccctctgcctatatgtgacatcctgtgggtgtcgtgtgtgttggtccctctttgtccgtctgtctaggtgccagatacatcccagtccctcctctcctgcaagcctcattctctgcctctgtgtctggggggtgggaaagcggctccttcccgcctctgttcagtggggcatgcagcactgtgtttttgtccctgggcaggctgacacattgtggcctccaagaaaagcacctagagcagctctgcaaggctctgggaggaagctgccacctcggtcacctccacctcgagtgagtggtttgtgtgttggaaggtgggtgggtggggccaattacagtgagttagtgttggtgtttgggtttggtttttaagatttagatcaactgttctttccctgctgaagtcagaaaccccttggagaatctggtgaaagttgtgactcttcctcccaagatacagatcccccatgtctgacacgctcggaggctcacccctggtccctcagaggtccacgaacctcagaataagaacctgggggagaccccagctgcccgtgccagatctgctgagatctggcctggcagcccagggctgtgtccagtttcaggaagttgagtaactggaatgcagggaccatgctgccagcaacccactccccacctgctaatgttctcccctcccttctccccacccccagcttctcaggcaatgctctgggggatgaaggtgcagcccggctggctcagctgctcccagggctgggagctctgcagtccttgaagtgagtagcccgctaggcagagcctctgaggctggggcagggggggagcattctctgtcccatccccctctttcctggggttattgtaaagattaaatcggaaaatgcatgaaaattgcccctaatacaatgtaagttctcggtgaaggctagctaatagatgattcttactcagagagtctgtgactcaataatcccacttctgattcaaggtttcacttctggaacctgtctccgcatctctgaacaggcttctgaggccaccctggggagggcaggtgtgggtgcgaagtatgactaacggctggcagttgttattctggccctggggtgccgggaggggctggggctgttagctggggtatggtcagggtagacagggagggtttgtaccagagaggacactcaagcagggtgcccagggctgccaaggatccctgagtacctggcagagagtgtgtaggaggaatccccaaagtttgcctgcaatggaccagagttcttgatccctaaatgcccttggtgcttttggctcacaaagcaccccctcctcccaggcacttctgggccaaagccagaggagcccaggggagaggtcacaggtcctatattccaggctgtctctgtgaacacgctttgctgtgtgattctgggcaagttacatcccctctccgagtccctggttcccagtcggtaaatacataaattgcaggcgtggcctctgttggtggctacgatctctgaaatgagtgctggggcctaaggaccccctgctcacaccctgtttttgtgcaatgctgggaaggaagggagttgccttggttcctgttcagggcctgcacctgggaaggaaggaaggtctaaccattgcaggcaaattacatgaagactggaggttttagtatgtcctcatgtgaccttcttattagtgtggactcgtgacctggtgctgtgagggtccacactcgccctaccagtgtccccgtgggaggggagtgtagcattaaatagtaaatagaaaacaataacaagttgacaggagaccctgaaagaaaggagacactttgttcctgctttctgcacaagagaccctgcattttcattttgtcctgggtaccacccctcccttatcaggtggagaaaaggaggcccagctccagccagaaagcactcctcagatccatcacagaccgagggacccactgggtgcccatctcagctctgtcaccaacatgtctcataaccttgggctagaccttgattctctctaggactctgtttccccatctccaccatgaggacttgcaaggggtgctctctgaccatcttgggttcagtgggttccgtcatctggaaccagggatccctcccccgccctgtgccctgaccacaaagaggatgtgtttgggtcctgagtgacctccattgtgccacccctgtgatctccagcctcagtgagaacggtttgtccctggatgccgtgttgggtttggttcggtgcttctccactctgcagtggctcttccgcttggacatcaggtgagcgtgcctctccgcccccagccctgcccctgtcccccatcccacaggtcatctgctcccacgtgggccccttgtccaccagtttcatgccaacctgtcatcctcagcaccttgggcagtaccagatctgcagagcatgtgatgggcgtccactgaatgaatgaatgatcaaatgaatgaataagtatggcctcacggatgctcaaatttctccaaattcaccattagagagttcattgactctgcctcactcgttctttggatagtccttagagatttttttttttaggattttttttttaattattatactttaagttctagggtacatgtgcacaacatacaggtttgttacatatgtatacatgtgccatgttggtatgctgcagagacttttaagaaaactgggggccaggcgcggtggctcacgcctgtaatcccagcattttgggaggccaaggtgggcggatcacgtgaggtcaggagtttgagaacagcctggccaacagggtgaaaccctgtctctgctaaaaataccaaaaaaaaaaaaaaaagtatctgggcgtggttgtgagcccttgtagtgccagccgctcaggagtcaggagaatcacttgaacccaggaggcgaaggttgcagtgagctgagatcgtgccactgcactccagcctgggcgacagagtgagactccatctcaaaaaaaaaaagaaaagaaaagaaaactgggagcttcctagttgccactggggactcagggacctgtcttaattgtgggagctgatgagaatataaaaggggaggcaccagccagccaagccaccccaggcactcagggcaccgcatccatgattttcaggggaggtctgcttccctttcccttccctaaggacccccaagaatgggaggtgccacagcagatggaccaggctcagttacttaactgctgcgagctcagagcaggtcccagagcctctccaggcctcagtttcctcatctgtaaaatggagataagaataattactggcctggcacagtggctcaagcctgtaatcccagcactttgggaggccaagacaggaggaggaggatcacctgagcctaggagtttgagaccagcctggacaacatggtgagacccccccatctctacagaaactttaaaaattagccaagcgtgatggcatgcacctacttgggaggctgaggtgggaggattgcttagactcaggagatcgaggctacagtgagttgtgatcacaccattgcactccagcctgggcaacagagcaagactctgtctcaaagaaaaaaaaatgtcaggcacaatggctcacatctgtaattccagcactttgggaggctaaggcaggaggatcgtttgagccatggagtttgagaccagcctgctcaacatggcaaaaccccatctctacaaaaaatacaaaaattagacagtcatggtggggcgttcctgtagtcccagctacttgggaggctgaggcagtaggatcagttgagcccggggaaggttgaggctgcagtgagccatgactgcaccactgcacaccagcctgggcgacagagcaagaccctttcttcgaaacaacaacaaagaagaatttcttacctcattgtttattgtgagaatcaaatgagaaatgtcgatggtgtgctttgcatgtgacttgatacatgtaattgttgcttaatctattccttgtttgctaagaaagcaggccaccccaggccctccttgccctgaccagtctgggttcttgccactgccagggaagttggtctttgaccattttcaaactgctgcttcctctctgcttccagctttgaaagccaacacatcctcctgagaggggacaagacaagcaggtgaggagggaacgctcggggtgggggagtcccctcccgctctggtccccgtctgttggaggtccccccacccccagacccatgctgaccactcagctctcagttaaaccacccaagtccggcacactaggtttaatcaccacttcagtaaccaccgccccccccataaattgtcagtaatcaactgccctgttttccccttggaaggaggcaatgcagatgggaggaagggagggatatggttgggagaggtcccagagcagggcaggtgcccgcagattgctgctgtgtgggaggagacaggagaacatttgtgcttctgcgtttcggggaattttgtagacccaccgctccatacatgtcactgccctttcacgctctgaaggcaggggccgtgggtgctctgaaaaaacattttccccgtcttcgcagtaaacaaccaatactagtttagctcttcatgatgttcccggctgccctctagtgggaccaggcctcttggcctcacttgggagcagtggcagcggacagggtgggcccatgtgcagctggctgggtggagagagtcacagctagtgtgtcaagaaaaggcactgccgtacagatgggctgtcaggagtcaggggtggctcaagcctgggtggtcttgcttcccaggataggatctctgtttctggggaacccccgggttcttgaggcccaaagaactgacgtacagggaggcagaagtcatgtgatgccaagcagtggtcagagaggctctgtcttgggtcctcctgcctgctcacctggacaggaacaagctgctggcttttctaactcaggcttcccttccctgagcctcagtttccccatctgaacaatgagggactgagctaggatctagtgactgcattgtctctgagatgccttccagccctgactttccaagtctgggagtccaatgtgggtgatctgaactttcctttctaaacgatccccctcctaggggtatatgggctgggctgggagtccgagggggtgatctgaactttcctttctaaatgatccccctcctagggatatgtgggccactggatctttgccagacttcccagctgcagccaagttcttagggttccgtcagcgctgcatccccaggagcctctggtactgtcccagcccttcttgtttgggggtaaccataatagggatgaggcgtcagagggggcagagctggcagggggctagggctggggattgggatagagggaagagagggagtttaagagaaaaggaaaagaaagaggcgtgggtgtgaggggtgctgggagttggggagctctggcccctgacgggcagctcagctggcccatgccccgcattctccttggagagaagattccacatttctgtgaagcaaacagagcagctcagccactccctgcctggggtctccatctgctctgggggacacccactttccagaaagaaaggggttggcctgtctccccactaatacactccccatctgcaagctctgccatgagaggctgtgagaccctgacttggccccacctctctctaggcctccagggaagtggaggcaagtgaggccctgggaaggacatttcaatttcactgttagccccagggcaatggggagccacgggggtaacagggagaggcctggtcagatgtgcagtgttaaaatgtgagacacttgtggggcagagagggattaaagggaggcaagagtggaagcccagagggtgttaaatggtcaaggtgagtgaggatggtggcctgggctctggagggggcggtggggaggacttggagagtcactgacaagggcagctgggaactcagggtcctgcactgtcactgtcagggcaggaggattgggggctgcaggggagactcgagagggaagcgagtgccccacaggggaaggggcctgtggcctcccacttagagtgagggatgctgggagaaggatagagcccctggggctagccagggaccctgggctttctctgattccctgccctgcccattgcccctttgcagcctcagtgagtgtcctctggagcccccaagcctcacccgcctctgtgccactctgaaggactgcccgggacccctggaactgcagtaagtaacgaggacacagccccagagggcaccatgtggggatctgcccagtgacctgggagggggcttcttggttagaagacaggtgagtctttctcgatttcttcccaccagccctgccccatgagagtcccctggcctttggtagaaacttggctgtctctcggcagcccccagccttaggcagcgcatgtctcccactgggagatgctgtgctggactggggaagccttcacctgcaccatccactcaactcagggcacctgggagccctgtccacctccaaccccacccctggagcctcaccagggcacccacttgaacctgcctgcatggctggagcgtagcacttctgaaagcccttcctcaaggcacccccactctccttggggttaccacctcactcgccccagaacatctgggtctgtaaccagagactggacctggaatcaggactcttggctcaaaagggatttaactccccgggcctcagcttcttcatctgcacagtggatggtcagcctttccttttattgtcattgtggtgattctattatagtaattaccttaaaataaagaaatccaagacaaaacctgcctcacctaaacaacctcttctctcatcaaatccatgttgtcatgtgtccacaggactgtctactccttgcctatttgcatattcagtttctacctgtttgcagtcataaactagtttcatgcactgtgttttcatagcatctgtgttttccattttgcttcagtcttttttcttgctttctagcccccatctcaaatgcccttccagcccttccaaccagataatccggtttgaccccctggagtgtggccttcccatgtccttctccaggttcaaacatataaccacaaaaccattatcagacctacactattttttttttctgagacagagttttgctcttgttgcccaggctggagtgcaatggcgtgatctcggcttgctgccacctctgcctcctgggttcaagcaattctcctgcctcagcctcctgagtagctgggattacaggcgcccgccatcatgcctggctaatttttgtatttttagtagaggcagggtttcaccatgttggccaggctggtctcgaactcctgacctcaagtgatccaccttcctcagcctcccaaagtgttgggattacaggcttgagccactgcacctggcccagacctaccctattaatggcaattccttaaagtcaaccaatggtcagtggtccctgattgtctcttacctgttttcacagagtatatactgatgccttttaatactaaattgccacagtacgggacgagctgcaagttactccaccacacccttctagagtctagatcaagggtgtccaatcttttggcttccctgggccacattggaagaagaaaaagaattgtcttgggccacacataaaatacactaacactagcgatagctgatgtgctaaaaaaaaaaaacaaaactccaaagaaaaatctcatagtgttttaagaaagtttacgaatttttgttaggccgtattcaaagccatcctaggctgcatgcagcaggccatgtggcttggacaacttggtctagattgaaatccaaactgcttctaggtgttgtgttttgttttgtgtagcactgcagtcagtgctacaaaaagcactcttacgtgatttgactgttaagtacctattgtataccatgcactgggccagatcctgggaacacaaggagactgggatgcgggctctgctggccaaggcaaatcatctgcagaggaagcttaatataaaaagcccactggcggcccggcacggtgactcacgcctataatcccagcactttgggaggccgaggtggctggatcatgaggtcaggagttcgagactagcctggccaacatagtgaaaccccatctctactaaaaatacaaaaattagccaggcatggtggtgcacccctgtaatcccagctactctggaggcaggcaggagacttgcttgaacccgggaggcagagattgtggtgagccaagactgcgccactgtcctccagcctgggcaacagagcaagactctgtctcaaataaataaataaataaataaataaataaataaataaagcccactggcagcactgggcggtctgagcacaggtgggagtttcaggtccccctccattacctgtggttggggaaagtgcaatagtgaatatgaaagcactttgtcaactgtagagtactgtgatcacttgcaggattattgctataaatagtcatcaaggtactcaatgctgaagtccagtgattccccggggttccaccggggaagccagggaagatagattgtggggctccatcccccctccctgaattcaagcactgcaggtctactttgcctgtgtacacatgggcataccatgtgggatgtggtaaagagtaaagattccattgctttaaaaaaaaaaaaaaggagggtgtaatcacctcctttgccaaccagagcccatggtgtatttgggggtctggtgggacaccatacgggatgtgtttctggaaagaccaccctcaataaaggccccagtcctgactgtgcctcaggggcccatgcccagtccctggggcagaaagggtagagttgggcctccagcctgggccctggcagaggctccaacatgaggctgctcctcccgccctaccctgccccccagctcactgagccagttgatgtagggcccctgtactccatgcctcccctccaaacagccagaggagaaagcagcagagatgggccaggcccttggaggccccggagaggggagagggcagcctgcagaggatgaaggaacagaaagagaggaagggggaggtggagaaggcagaaggagaacatagtagaggtctgcgggggttgggaagtggctccaggccccccaggaaggggctgtaggtaaaccccagggaactcagtgtcttgagttgtcctggtcctccatctagagcagagacagcaaggcaggtatctggagtttctcctaaatgcactgggttctgacgaattatctgaacaatgatgagctggttggtctggtgttaatgggcaactagagacccaagccagtccctgtctccttcgctgacctgttgtatgctgaatttccactgtcatatccactcctctgggttaaggcagcattgttttcttttcttttttatttttttgagatagagactcgctctgtcacccaggctggagtgcagtggtacgatcttggctcactgcaacctctgcctcccaggttcaagtgattcccatgcctcagcctcctgagtagctattactacaggtgtgcaccaccacgcctggctaatttttttttcgttttttgtagtagaggtggaatttcaccatgttgcccaggctggtcccagactcctgacctcagatgatccacccacctcagcctcccaaagtgctgcgattacaggcatgagccaccatgcccagctgcattcttttcttaacaaacatgttttgcggaacactaaccttcatggcccttaaaaattaattctgctagtccatttagtttggggaaaagtctgctgtagctccttggaaattcataatgcacagcagcctatcgcagcctcagagaagccctgcagcaaacaaaaccatttaatttggcttaaccccgtatttcccaaacttaaaagaccttcctcttcttccagcctcacggataacccatggacccagtgctgggagggaatgtttcaggtgaccctggttaggtcccatctccagaaggctctggctatgaggccgtgctccctgctttcctggaaggtttcccccacctcatccacctgctttgtttcacagattgtcctgtgagttcctgagtgaccagagcctggagactctactggactgcttacctcaactccctcagctgagcctgctgcagtaagacgagagtttttcctatttcccggttccttgtgctcgtgtttctaaggctcctccatggcaaagctgtacctgccctctaacccctcaaccccccgcctttaccccctccaaccccctctacccgctccattctttccttaggttgttttatcattttacctggcacaactggggactccaatctgcttccagctccaccctaatactttgtcaacctcagggggcgtcgtttgcctcctctgcgtctcagtttcctcatctgacaaatgggattaatattccccgcccattcccccagagttgggactcaaataagttattctaaaatcaccttaagaaatggaagatctgtgacaaatgagctgtccaacttctccccacccacggagggtcacccactcgtagaaaggggctgtacagatgtaggtcctgtacttatcacatgctgctttttaaaggtcaccgtcaaactcgcaaaaagggaatttaagcagaattcccccaaagtattaaaactattttctaatttcagctcagactggttagaattttaaaagtatttaggccatgtgtggtggctcatgcctgtaatcccggcactttgggaggccgaggcgggcagatcacctgaggtcaggagtttgagaccagcctggccaatgtggtgaaaccccgtctctactaaaaatacaaaaattagcccggtgtggtggtgggtgcctgtaattccagctacttgggaggctgaggcaggagaattgcttgaacttgggaggcggaggttgcagtgagccgagatcgcgccattgcactccagcttgggcgacaagagtgaaactccatctcagaaaaaaaaaaagaaaaaaagaaaaagaaagaattttagaaggatttactttaaacagtcttctagtggtgggaggcggggtgggaagcagctgcagctaagatgaaaaaatacagcaggaaagtaaatcataatgttaataacatcggtgcaaaggctggggctctctgggatgtctaagatggctcgcatcacctccaggatctcgcttatgcttgggttttatctgggagggagggaggagacgtgacaacattccaggggcaagtacagcccagctcacagcaccccatggcaccctgtaatagtcccaccctgcccggagataatgagtcagaaaggactcctttggacataaaaggtggcaggttaaaattgaacaggttggaaacctcagaccggagaggaacttctctttgcctaaatcacacagcttcacccctgactcctcgtccgcctttggagtggcgtggccagcctgaccccttgccagggtttaaactttgtagtactcaacgtgtagtgcttgtggccctactgtgggccaggcattgtgtgacgacacagcagaaaaagttgaccatgtccttatcttcttggagctcctcttacaatagtgggagctgaaaaataagtaaagtaaaatcaaataagatgaacttagccagtgataagagaattttctcgggatgtggtgaagagtggctggagaggtgatttagatgtggcagaagccatcagggaacatctctgaggagggatgctgagctgggacctaaaggaagagagagagctcgccttgtgaagagcagggaactgcattccaggcagagggaacggcatgtgtgaggccctgaggcatgattaagcttggtgggctccaggaacagcgcggaaccgagacagccagagcacagtgactggcagggacagtcctaggagaggaggaagagagagatgggctcgggttgggttgcatggggcctggcacccatggggagagtttagacttttgttcctgggaacatgaaagggagaggaataatttgggttttctttctttcttttttgtgggggagggtctcgctctgtcacacaggctggagtgcaatggcgcaatctcggctcactgcaacctccgcctcccaggttcaggcaattcttgtgcctcagcctcccaagtagctgggattacaggcgtgcaccatcatgcccagctaatttttgtatttttagtagagacagagtttaaccatgttgaccatgctggtctcaaactcccgacctcaagtgatccgcccgcctcggcttcccaaagtactgagattacaggcaggagccactgcacccgttcctcatttgggttttcaaaagttcagactgagtgctgggtagagaatggattgggagatacgagtggaaatgagagtgggaagagatgtgtgcagcagggtgaagggtgctgggggctgatcactgctggggtgggatagaagttggtagactcagggtggatcttgagagtggaatttacagacaagctgatagggggattactggatgaggcaaatggaggtgctgaggctgcctctgagggcagagtggacccatctcactttctctaaggcagtggtttccaactgggggtgattttcacccttgggagtcatttggaaatatctggagatatttttggtggtcatgactgcgggtgaggggtgctgctactggcatcgaatgaatagagatctgggatgctgctgaacatcctatagggcacaggagagcccacaacaaagaattattggacctcacatctcaatagtgctaaggtttaaaaactgtgtctgaagggcctgaagcttcccactctctgtgagcaaggactcgcctgtgaaatctgtgcttgcaggtaaaaacaatagtaataataacagcaagcacaggtcccatgcccggcagtgcacctgcatgatgtaattaaatcctcatatacctcgagagtcatacatgacgagtcttgatttccagataaggaaactgaagctcagagaggtgaagtcacttctccaaggtcacacagccaataagcagaactgggactcaaatccaaatctgcctgtccctcagccctatttgtgcctcttgatcccctgcctgcttccctattgccttgctgagctgctagccctccccaccctccctttccttaccctccaggctagccaggttccttgtccactcatcttgccggatctaccccctttccttttcaggctgagccagacgggactgtccccgaaaagccccttcctgctggccaacaccttaagcctgtgtccacgggttaaaaaggtggatctcaggtgggcattcccctgggacagccaggactcgtcctgaagggttgtgcctggagtctggtgggtatgagggggtaggatgaagacagtaggacccaactagaggctgggcttccggaggaggggtgctggccccgtgggggcatcctgaggctgtggccacagctgtctgacccaggtcctgtctgatccaggtccctgcaccatgcaactttgcacttcagatccaacgaggaggaggaaggcgtgtgctgtgggtaagcccccttgaaccatgcctaggcagctagttgatgttggggaccagtagatctgcctcctgggtggccagagcagtatgcagactgcctaccacaaaacattcccctggaacaaccctgcagagggacttgtttcacccagcatgaagaaacacaggtccgggtgggatctactgtgggggtgggagcagtggattctggacacttccagagggtccaagcttgagtggagacccacctggagcccagaggctgtgccctgggctagccaggccggagggggtctcagtggccaaacgccccatcccctgcttgtcccctttacctccgtccagcaggttcacaggctgcagcctcagccaggagcacgtagagtcactctgctggttgctgagcaagtgtaaagacctcagccaggtggagtaagttgagggaggaggaggaaggagaggagcatggacgcatgcctgaggggcactgaagggggtatgagggtccgtgtgtgcacatacactcatgtgtgcctgcctacacctctcaggaccagctgtcagggatgcctgggtcacatacccaaagcttccctgaatcaattttctctctcccgcccccactctcgccatggtggagctagttccatggtgtgccctctgacttgggcagccctcagcctcaagtatgtgcaagctctgctggcagatgggggctaaaacgcaggattcattgttggcccagcaggtggttaaaagtaccggatgactctgcctgaggagggacgcagagccagccagggtggggtcttgcagtctcttgtattgttgagatgtggtatctgcgtggcctgtcttggatattcaaatagtcagcccctgcatgggtggaataataatagctaacagctactgagcactttctccactgttctaagtgcttgacatgttctttttatgtttcccatatccctggatactagtattgttctcattttacagatgagggaactgagacacagagggtgtaagaacttgcccaaggtcacacagctagtaaaatgcagagtccctgctcagacgcattgggaatccagcctaggaccagtgggaaatagagagagcagtccgccaaaaatgccacacaattttcatttctgttgtgatgtggcagagaagaaaaatgtgactgataaaatcatggatttcttttttttttaagacctggggtctcactctgttgcccaggctggagtgcagtggtgcaatgataggtcactgcagcctccaactcctgggctcaagcgatcctcccacctcagcctctggagtagctgggactacaggcacacaccaacatgcctggctaatagtttagttttgtaagagatgaagtctcaccatgttccccaggttggtctcaaacttctgagctcaggtgatcctcagcctcccaggttgctgagattacaggcatgagccgctgtgcttggaatgtattttaaacagatatgaataagaaatatgtctttgagttttttgtttttcattatagagggaaatttttcttttctttctttctttttttttagatggagtctttctctgctgcccaggctggaatgcagtggcgcaatttcggctcactgcaacttccgcctcccaggttcaagcaattctcctgcctcagcctcccaaggagctgagattacaggcatgagccaccatgcctggctaattttggtatttttagtagagacggggtttcaccatgttggccaggctggtcttgaactcctgacctcaggcgatccgcctgcctcgccctcccaaagtgctgggattacagccttgagccaccgcacccagccaatttttcttattttaaagactattttattaagtggcttcataagacagaccaatttttaaatgacgtttctcaggaaaagatgaaattaacaaacatcaaaaatgtcacagacctaggaggaaaatcagatgttccgggacacactggttatattatttctgaaactgtagttaaaactagctgggcgtggtggctcacgcctgtaatcccagcactttgggaggccaaagcgggtggatcacctgaggtcaggagtttgagaccagcctgatcaacatggtgaaaacccgtctctactaaaaatacaaaaataattagccaggcatagtggcacatgcctgtaatcccagctacttgggaggctgaggcaggagaatctcttgaacctgggagacagaggtcgcagtgagccaagatcgtgccattgcactccagcctgggcaacagagcaagactccatctcaaaataaataaataaataaaaccacagaatgctgcaatgaagggaagtaagaaacttcaggtgaggtttccaatattgatattgcattcccagattaaaagaagaaatctatgggtttaatgcatcctgcaaacatttttttttcctgaatttcctctcattcaaaaactgtggatcccaaatgatgccggccaagggcgtggtgaaggcaaattggtttttctttaacccttgaaagcctgctggaggcacctgagctatgagtggtcacccgatatggaagaggaccaagaggatgggtttactgtggtgctggggaggggatagtagcagagaacgtaggagttgctggtcattctagtggtgatggaagggatggtgatggtggtactgggcttggtggtgtagaattgtggtgataatgaaagtggtggtggtgatggtggtaatactggtggtggtgacattggtggtggtggtgatggtggtgatactggtgatggtggtgatggtggtggcgctggtgaccctgacatggggtccagtagcagtgacagtggatgcaggctcctggtgactgaggagcatctcaggctgaggaggcacctctgatccccgccactgctccttaccccctacagtctctcagcaaacctgctgggcgacagcggactcagatgccttctggaatgtctgccgcaggtgcccatctccggtttgcttgagtaagtggaaagcagcataaaggacagatagcaaggaggaaggctcccctaggccaaaagcatgatgggggctccttctgagggcatcccccagagcaccagaggacaaggactgtggagggcaaggggcaattcttcccttgccttcactcccctggccttgggtcctttcctctgtccctcacacccaccatgggcagatcctccaccaaacacccaagagaggctgtgattcgtggcagggtgacacacccctacagccaaactgacctggggacagggaagcaacattccatccccaaccagctgatgcgggattgcagctgcctggctcctggtccatcccgtccctgaaattcttctgacccaatctgtggaacataaatgtggagatgtccctgtggcaggcaaggggccttaggaagtcatccacatggttgccccatctctcccgtgacctgctggagtgacagccagctccaggacaccacttgttgctaggcaactgagcttcgtgctcgggagtccttgacccatgcggggctagagctgccagcctggccttgccagtgcccagaccccagaccacaggggcagcgggcagggtgagtgcagcgctcaaggactcagggtctggtgccagttctgcctgtgtggggatggtatccttctgggcctcagtgtgtccatctggagaatagatgcttagacatggaggcttctcttcttggaaatgacagctggaagggagatggagggggctgggcagggctccaaggaggtcctgccctcactcccattctcatctccatttcccttctagtctgagtcacaacagcatttctcaggaaagtgccctgtacctgctggagacactgccctcctgcccacgtgtccgggaggcctcagtgaagtaaggggatgttggtccccgaaaagcccctttctgctggccaacaggtgcccctggctgatgatgggagaagcaaggcacccacactttgtggccttccatctgggtggcttggagcaacctctgcctttctctgaatctcagggtttcctgggcatgggatcataatttctatcccctgatgcccgggtgccatggggaccatggaggccatggggtgggaaggccaggtattgccatgctcacagaatgagtttgggggtctcctctggttctgaggcctccatcctcccttgtccttgtgggtgcagccccgcttccctctctgtgccctgtgggtgccctaggtgcctaggaagctggcatgtctgggcaccgtgcttccccaggcccttctctctgcagcctgggctctgagcagagcttccggattcacttctccagagaggaccaggctgggaagacactcaggtaatccctgcagggtgatgggacaggggacagagaggggagaggaggctgaccctatggcggcctccatggccccctcttccctgggccctctcctcctttagagagcagcttcaagctcactgcctgggtctgttcctccagatctgcccccgatgccctggtaactccagtctcagccagggccttggcattgaacttgtgcctcttagcccaccatcctaagcccaactcagcccaacattctcttccttgccatgtcctgactacaggccttgaggcttctgagtgtcacggttaaagattttgaagccaactgaaaataaatccctgatctgccacttaccagctatgtggccctggacaagtaaaatggggataataacacaacctaccccttagggttattgtgaggattaaatgagttaataagtataaagtgccaggaaaaggtctggctcatgggagtgctgtcagcagttattgtaactgttattattattattattattattattattattatcattatcattacccctggtagccctgactcactgccacggccagttcctttacatgtcttacttcagctgtgaacagggcctccaaactgatccctgcatcttatcaggcctcctcccctccattcactccacagcccccagagggatcttcacaacacacatctgacagtgcccctctgctactctgtgcccctcagtggctccccattaaccccagggtgaagttcaaagtccctagcatcttctccctcacagtctgatccaactgtcaccttccaccatgttccttcccacctcccccacaccacacacacgccctacacaccaacccatataccacagatacaccaagcacacccaaacacaccacacagcacgcagcacacacaacacacgcacaccacacagcacacacaacacacaaacgcaccacataccatacacataccacatacacacacatacaccacacacaccacacaatacacacaccccacaaaaacaaaccccccacatacatacctggcacattacaaatacagcacacacaccacataatacctacaaataccacatacacaacacacacacacacacacagttcagccataaccttcactatttgctcctagatcaagccctgcctgaagattctctgcctctgctcacaccgcactcagctcaacattctcttccttgccttttctgagataaaattctcccaatcctttaacacccagctcaaacatcagcccctcctggaagtatcccagcagccctgcctcatcagagtgaactgccccgaggttcactgggccctttcacttggctgggcccgtctgctggccacccagggctgagatgcctggacagcagagccccacggagaatcccaggcacacctccctccccagggagctcagccagtgctggtccgggagagtaaggcagtggttaagagcttggggtctgcagtcagactgacctggatggaaaccagattctgcccttctttcttatctgctgtgtgtccttgggttagtcagtttccccacctctaattggtgctatgagaattaaaggagaccctgcgggtaaggcaggaagtcccatgcacccagaggctggcacagtgcctgacctagagtcagcctccctaaataacttactcctaatactttcttacagggggtgtgggaggttcctccccaaagagacaggaagctcccagagcaggagctgcatatttggcctctcaggccctgctccaggcctttgccctcagaggtgggatgctcccccaataggccctcagggaggctgagatgaagctgagcagcagtgcccacaggcctcacccaggctctgccctggctttctgccctcaggctaagtgagtgcagcttccggccagagcacgtgtccaggctggccaccggcttgagcaagtccctgcagctgacggagctcacgtgagtgacccacccagcccgtgaggacagcagaggggtgggggcaccctgccagagccacctcagtgactgacctctgtctccaggctgacccagtgctgcctgggccagaagcagctggccatcctcctgagcttggtggggcgacccgcagggctgttcagcctcaggtacctcctcccccgctgcctccgggaggggccatggcatgaatgggagcaggggtgggcactggagtaagaggcccccaggatcatggccccagtcatttcctgtacccacaaccctgccatctggaccctgagcaaaccctgtccatctgtcccagagactccacaaggcacacagagaaactgtccttccccacactggaggcctgtgctttgggatttaagaaaaaaagaaagaaagaaagaaagaaggtttcagaggatactgaactgaggacaaaaataaactgaaacgaagttcttgtctgtctgttcactatgatcattttaaaacactcagaaaaagaagataccgaagtagaaagaataattttttaaaactcctattcccagaacctaggtttgacagttgttcatactttttttatatttgcttctatttttatttttatttcagctgaagcggtttcaagtaagttatagacctcataatccatcactcctaaatatttcaccgtgaagctccaaaaaataaggacatttttttcagtaatcacagttccatcaggacacctaagaaactcagttagcgattccttagtgtcgggtactacctagtctaatctaaaatgtccccattgtcccccagataagacagctggcttttgggatccaggatctgtcacatctggtctgcatttgcacgggatggcgatggtcttctgactcttctaacctgcggcatcactgcccccatcccctcaccacagctttctgtttcatgtcagtgtctgttgacaaaatcagcaactgtgtgtactgcagactgtcctgctcctgactctggtggctttctcatgatgtcatggcacgtgttcctctaaccccgactttcctggaaactggacgttagatcaaaaggctccatgacattcagtttcatgtttgtgcccaaaaaacttacgtcaccgacagagctgtgcacttctcattgcagcctgtgacaaggcacctaagaactgactgttccccaaaataacctgtaaaaattattataaaatacacataacaaaatttgccatcttaatcatttctaagtgtaccattcaggagtgttaagtacatccacttttttgtacggccaatctccggaactcttttcctcttgcaaaactgaatctctatccccattaaacaacaccccatttcccccctaccccagcccctggcaaccaccattctgctttctgtctctatgaattggactgctctaaatagtttatatgagtggagtcatttgtatttgtctgtatttgtctttttgtgactggctcatttcattgggcataatgtcctctggttcattcatgttgcagcgtgtgtcactgtgtcagactttccttcctttttttttttttttttttttttgagacagagtctcactcttgtcacctgggctggagtgcactggctcgatctcagctcactgcaccctccacctcttgggttcaagcgattctcctgcctcagcctccggagtagctgggattacaggcgcccgccaccacacccagctaatttttttttgtatttttgtagagacagggtttcaccatgttggcgaggctggtctcgaactcctgacctcagatgatctgcccgtttcggccttccaaagtgctgggattacaggcatgagccaccacacccagccctttccttttttaaggctgcataatattccattgtgtggatggaccacattttgtgtatccacttatccatcaattgacacttgggttgtccattcaagtgcccaattgacagtccctgctttctttttttaaatattattttatttcaaaaacaatagagatgaggtctcactgttttgcccaggatgatcttgatctcctgagctcaagtgatcctcccacctcagcctcccaaagtgctaggcgtgagccaccatgcccagccagaaagtcccagctttcaattattttggttatatatccagaattgctagagcacccaaaataactttttttttttgagacggagtctcgctctgttgcccaggttggagtgcagtggtgcgatctcggctcactgcaagctccgcctcctgggttcacgccattctcctgcctcagcctccagagtagctgggactacaggtgcccgccaccacgcctgactaatgttttgtatttttagtagagacggggtttcaccatgttagccaggatggtctcgatctcctgacctcgtgatccccccacctcagcctcccaaagtgctgggattacaggtgtgagccactgcacccagccaaaataacattttcaaataaaacttttcttagtctaaaaataatattggttgggggaagtggcacacgcctgtaatcccaacactttgggaggctgaggtgggcagattgtttgagctcaggcgttcaagaccagcctggacaacatggcaaaaccccatatctacaaaaaataaaaataaaaaaataatatttaatcattgttgaaatgtgcagaaaatccagaaatacataaagaaaatagtgctttaaaaattcagcataactttaaagcagtaatatttgacttaattctcttttttcctactttcaaattaatgcacatgcattgtagaaagtttagaaaatatagaaaattaaagaagacataaaataaaaatcactcatgagaattctatcatcttaaacaaccaccatgaacatttaatatattttcctatgttttccacacatctctctccctgtttctttccacactttttttctccaaatactttcctttttttgaaatgcaaaattgggatcatgttttatatacagtttggtttccttacctttgtgatgtaacattatgtgaatcttttcttaaatctaaaaatatcagtggcccagtgcagtggctcacgcctgtaatcccagcactttgggaggccgaggcaggtggatcacttgaggtcaggagttcaagaccagcctgaccaacatggtgaaaccccatctctactaaaaatacaaaaattagccaggcgtggtggcgcatgcctgtaatcccagctacttgggaggctgaggcaggagaatcgcttgaacccaggaggcagaggttgcagtgatctgagatcatgccattgcactccagtctgggcaacaagagcaaaactctgtctcaaaaataaaataagataagataaaaaaataaaatataaaaatatcatttaaaaaataatattttctgtttggattgtcacaacaatagttgttggaataagggtgatgttaatttccttttttagattgatgcctacttgtataattttatagttttaaaatgagcaaaaaaaactcaaaaagcctctaggtcccccccttgacactcctcccccggccccgtcatgtgtgctgattgtctgctgctcaccttgggggggccttatctgtgtccccttctgtgacagggtgcaggagccgtgggcggacagagccagggttctctccctgttagaagtctgcgcccaggcctcaggcagtgtcactgaaatcaggtgagtccagagaagaggcccctttggaattcttcatctttcataagcattgggacttttccttgaccttccctcatcctgtggggtaatagctgtgtcaccagctagttttccatgtccccagggtagcaggagctcctggggcatatgtgaggggctacacatttgttgggactagtgcagtagtcaagccacagtgtcagaggaagacatccccagaatcaaaacaaagggctattggatccaggcagacatggctgggagtccacgctggttgcttggaagtggccccccagatgcagtaacacacattatggctcttcaaccagaaataacacaatgacacacagagtagcttatagcaaaggttttagcatcccactcagctatgttcagatcccaactcagtcacttactggttggagcccattactgtgtctctctgacctcaacctcctgctcttaaaagagtctaattacggccctttgcagggctgggaggattacaagaactggagcctgtaaagatgtctgctgtactgtcaccagccacacagcctgccctgcttcttccttctctcctccaggagtgagcaaggggatgctctggggactttataatctcccatagccctctccccataagcaccccatgaacataacattcaagtgaaggcagtgagcttagagcgcaaatgcagactccagacacatcccctaccccacccttccaccacactgtggtccttgtgcccctccctcagaaaattctggaactgcccttggatccctctaatggctttctgtcatggtctgaaaaggcttatcaacttattaactttaaattgttgaaaagggccaggcgcggtggctcacgcctgtaaccccagcactttgggaggccgaggcaggaggatcactgaagcccagagttcaaggctgcagtgagctatgatcgtgcccaccactgcacttcagcctgggctacagagcaagaccctgtctctttaaaaaaaaaaaaaaagaaagagaaaaattgttgaaaaggcactacttggggtattgtgtgtgactcacggaagcacctactttccagtcctaagctggtccctggcaggggagaaggggacccaggcaaagtgagagttcagagttggagccgggcagcccaggtgccagctaggccctccggggaaggctgcccgacctcacgttggttactgctcactcctcagcatctccgagacccagcagcagctctgtgtccagctggaatttcctcgccaggaagagaatccagaagctgtggcactcaggtgggacccagcaccagggaccccaaggcaggggctggtgttggggagggggcagggctgcttctgaccaatattcaccaccctgcccagagaccttaggggttcgaagtctttacacaggctacagaggtctgaccaacccacttctgaggcgtttcagccccactccaggccccagtctcagctccagtcacccccatgaactttcagttccccgaacaccatcttgcttagaccttagggcatttgcacaggctgtgctctctgcccagaatgttctcttcacgcctacctgcttcacctgcctaactcctcctcatccctcaggtctcagcttaaatgccaccacctcagggaggccccctggaccccaaggcttagtcaaacacttccattatccactcttatagatccctggattcacagcacctctaaatccatatggcacagtttgggaaattaaaatgtcacccttttgagtggatgcagccctgcatgtgtacattctgggaaatagagcatggtaggatctcagcctcacctcacctcctcggctgtgtgtccttgtgcggtgaacaacctgcacaaccataccagctgccccatctggactcctgcttcctagcacttctcataagtgaatagcaaactgtaggacttcatttgatcagcatttatttacccctacaccataagctccttgcaggcagatactgaatcccacatactggactagatgttccaaaactgtcgtctccctgtctgtgtccaggttggctcactgtgaccttggagcccaccacagccttcttgtcgggcagctgatggagacatgtgccaggctgcagcagctcaggtcagcgcctggaaactctgtgtggggccctgagttctctggttgaccctggtacctactccaggccatgtgtgaccctggcattctcacttccttgtgcaggagaaaatcacacttggccagtggaggggagggagagccccagggtggctcaggggagctcttgggtggccccttctcctctcttggcacccccttctggatgtgatgacctctgaggtgtgtccagcctgaaatcctctagaatatccttggaccttttcagcttgtctcaggttaacctctgtgaggacgatgatgccagttccctgctgctgcagagcctcctgctgtccctctctgagctgaagacatttcggtatgtagacaagacattcactcagtcccctttgcagctctgccctgccctgacacctcccgttattcccagccctgggctcagaggactcttactctgtgtcttactctgtggacacaaaccacaggtggccctggagatgatttttaggggtacctagtcgtaaacatgaccttaggaacattgagccacatggcaagaaagttgttccctttttaacactctttcattgtttttcttttaaaataactgcgaactaacacaaagtttcaagaagactgagaactgctgtgtgccatttacccaaattcacccttagagctgggcgtggtggctcatgtctgtaatcctagcactttgggaggccgaggcaggtggattgcctgagctcaggaattcgagaccaccctggacaacacggtgaaaccccgtctctactaaaatacaaaaaaattagctgggcatggtggtgcatgcctgtaatcccagctaattgggaggctgaggcacaagaattgcttgaacccgggaggctgaggttacagtgagccaagattgtgccactgcactctagcctaggtgacagagcgaggctcggtttccgaaaaaaaaaaaaaagaacaaattcaccctttgccaatctttttccacatttgctcatttcttccctccctccttctttcccacctcccttttctttcactctctccctctctccttttctgaaccatttagaagtaagttgtaatcatgtccctttacccgttaacatttcagcgaatttgctagaaataaggacattctcttccataatccagtaaaattataaaatccaggaaatgtgacattgatacactactattatctcaactacagtttatactccaatctcaccagttctcccaataatgttgcttattgcatttttttcccagttgtggatccaatccaggatcacacgtctcatttagtgtcatctctttagtgtctccttcaatctggaacacgtccttggcccttctttgtctttcatagcattgtctctgacatttacaggccagttattttatagaatgtccttccacttgggtttgtccaatgtttcctcatgtttagagttagagtctgccctttgggcaggaatatcacacaggtgatgctgtgttatcgtgccttccatcggggcacatgatgtgtcagagtcctcgggctagtgatgttaactgtgatcacctgtgacagtggtgtctgccaggtctctccacttgcaaatttactaactttccctttgtaatcaacatagattatgtggggagatactttaagattatgtattaagtcttcctcaaactctcattggcaaattttagcagccgttaataaatcttacttaaatcgatgaatcagcatgacagttgcaaaatgtagctttcctaactttacattttatttccatctaactgattacaccaagaagaaactcttgggctgggaacagtggctcaagcttgtaatcccagcactctgggaggccgaggaggaaaaatcgcttgagcccgggagttcgacaccagcctgagcaacatagcgagaccacccccatctctacaaaaaataaataaataaaataaatgtttaaaaaggaagaaactctttaggacagagagatctttgacacttcttcagtatttgctttaaagatgcagagtttgtaataaacaacagtaactagctaaactacagtgatacctaatcctggcttaagttgtgaagttgctacctgaatgactgcggtttaggaaatactgaactagtccatgcttctgcttccaagctctgtggtggcttaatgagttcatggtggaagagatttacgaagggaaggaggtctcctcacattgcccgccacatccctaccccacatccttgccctctgccaccagcattcagagctcccaagacccagggcggctcctgcctgacctgttgccctttgacccccaccaggctgacctccagctgtgtgagcaccgagggcctcgcccacctggcatctggtctgggccactgccaccacttggaggagctggagtgagttgcagagtggagggattggggacaagtggcccagctgagggtgaggggtggagaagagagcagggcgtttgggagggcaggcaatgagacttcaaccaatgacccttcccctgatgaagtgcagcagttctgggtgtggcctggggaaggaagagcaccacagttttggtctgaatttcgccactgactcacagaggggctgtgggcatggctgttccactctgggctttgattgccttatctatgaaaatggggctcatgagccttgctctgctgggctggctgtgggagtcaggctacggagagggctgaagaacaagagggtgtgtgtgtgtgtgtgtgtccctagtcccccagcttcctctctgcagccttcatccagggcatagtttctcagctgggccagctgtgactatcatgcctacccagagcctgagccctggagctagggatacccatggggaacctggacagcgagggtggcccagggcatgcagatgcagagttggcctcccaggggacagagcaggagaggggagctgacaggacagctcagctccagggctgggcaggctgcgctaacccttgcctctgcctggtcttctgcagcttgtctaacaatcaatttgatgaggagggcaccaaggcgctgatgagggcccttgaggggaaatggatgctaaagaggctggagtaagtagtgatggtggttgtgggtgagtgagtggtgggggtggttaatggatggtggaagtgggtgagtggtggggttggttaatggatggtggaagtgggtgagtggtggggttggttaatggggaatggggtgagtgagtggtgggagtggttaatggggaatgggctgagtgagtggtgggagtggttaatggggaatggggtgagtgagtggtgatggtggttaatggggaagggtgtgagagtggtgatggtggttaatggggaagggggtgagtgagtggtgatggtggttaatggggaagtgttgtgagtgagttgtgttggtggttaatggggaaggagatgagtgagtggtgttggtggttaatggggaagggttgtgagtgagtggtggcgttggttaatggggaagggggtgagtgagtggtgatggtggttaatggggaagagttgtgagtgagtggtgttggtggttaatggggaagggggtgagtgagtggtggggttggttaatggggaagtgttgtgagtgagtggtgatggtgattaatggggaagggttgtgagtgagtggcgttggtggttaatggggaagggagggagtgagtgatgatggtggttaatggggaagggttgtgagtgagttgtggggttggttaatggggaagcgttgtgagtgagtggtgatggttggttaatggggaagggttgtgagtgagtggtgatggtggttaatggggaagggggtgagtgagtggtgttggtggttaatggggaagtgttgtgagtgagtggtgatggtggttaatggggaagggttgtgagtgagtggtgttggtggttaatggggaagggggtgagtgagcgatgatggtggttaatggggaagggttgtgagtgagtggtggggttggttaacggggaagggggtgagtgagtggtggtggtggttaatggggaagggggtgagtgagtggtgttggtggttaatggggaagggggtgggtgagtggtgatggtggttaatgggaagggagtgagtggtgatggtggttaatggggaagggttgtgagtgagtggtgatggtggttaatggggaagggggtgagtaaggggtgggggtggttaatagggaagagttgtgagtgagtggtggggttggttaatggggaagggggtgagtgagggatgacagtggttaatggggaaaggagtgagtgaggggtgatggtgcttagtgctgcatggtcagtgagtagcatgcctaggaacctttgcatgttttgtgaacacaaaccgccatgtttctggatggacccaggtgagctgaatgcccttacatgaccttttactttctattctggatctcagtgccagcaagaaccttggtcataggaaacagaatacacaactcaaagcaatccaagacagaaatatattggcttatgtcatggaaaattacgaggccaatgacttcaggcacagctggatccaggggttctatatttgtcaggcttctctctcacacacttcactctggcccttactctttctctgtccaccttggcttccttctcaggcaggccatccctgcacctgcaggcttactttctctcagcttagtggaaagggagtaccattctctctgtggttacaacaaaaggtcctagactgagtctcactggactagcttgagtcacctgccccaccctaaagcaatcactgtggctgtgagcacaaaatattctcctcactggccagacctgggcgcatgcacaccctatcttctggacttagaggggtggtatttcaggatgtgagtaacagaagaggaaagaaactctgggcagaaaaaaatctacagatgtccactacatttgtctacagttgtttccttggtaactggcagcttttactactctcccccataatttgaagtcatcaaattcttagaaatgccagaaacagcctcagtctaaaagacaggtccccgtcctgcacagattcctgtttagacagtatctggacagaaaatttaacagaatatcttctgcttttcatctcttaactttttctgatgaccaaaaaagttccatctttctagaaatatgtaacaaataacatgaaatgccccggggatgacaccccctgagaaaacttctgttgaacggtttgtgaatttttctccagatttttttttctacatatgttttgaattcagcttgaaagtagccttttgactttttgccccttaacattgaaattcttccgcttgtccctctttgcttgtcctggggagaggatcaggtaaaaggagaagagggattacagagacctttgaccacagggccctcctgtcgtctcactggtctgtttctttgcccactgtccatgtacctgcatctcggctcagccttctggaagcttttatttaggggattggaggcccagtgaggtcattcattggctcattcatgcattcgacaaatatgtactgagctgggcacctgggccggggacaggacagattcatccatgcccctgggggcctttttcttcctcctgatttcccaggcaccatgtgctgctccttacctcctgctgccttagttgccctatctgtaaactgggcataatatcttccctgtccgaaggaaggggatggatcgtcagtgcccggaggtctcttcccatctcagatctgtcatttccaagtgtaactccccacaggcagttaccctcaaatccagtcagcttcttccagctgtatacctgtgatggagtgggtaggagcatggaccctagttaggagcctcactgcctgggttcaactctgggtggggtaactgacacttccagtttgcttggagctttccccattttggcacccaaagtcccacatccaggaaaaactcttctgttctgagccaaccaagacagttgaccatcttttgcttctgcctcttattttattatttatttatttgagacccagtctctctccgttgcccaggctggagtgcagtggcacagtcttggctcactgcaacctccgcctcccgggttcaagcaaccctcctgcctcagcctcccaagtagctggcattacaggcacatgccaccaggcccagctaatttttctatttttagtggagatggggtttcactttgttggccaggctggtctcgaactcctgacctcaggtgattcacccgccttggcctcacaaagtcctgggattacaggcatgagccattgcgcccagccagttctgtttcttaatgtgtgaactcgtgccagtccctcagcctctctgttctttggcctcctcatcttaactttgaggataagagcaatctcccctgctacggttgttgtgagtattaaatgagataatatgtgttacagtcttagagtctggtcagagttcacactctacaagtgctagctattgttattctcctctcctgcctaggctgggggcctctagaagtacaatcgcctgggtcacatatggttggggctcaggaatgggagttctatagtttttggttctgttcctgaagcagccactttgtgtatgaccttaagcaagttctctaactctctgaaccttggtgttcctcacctgtaaaatggggacgataataaacccacctttccagatggccccaagccctgagtttggcccacattttatgatcaatgtgtgaccgccattattacggatcattagtcttggtccatgtggttcagaacatagaactgctgcctgcctgacctcagtaattcatgcagagaaacagcatttggacctcccagtacagttcattttgtagaatttttacactgtgtggatataagtggctgtcttggaggtccctaggcttgctaagcacagaggcctcagacccccagactggacagtgccccacccccagatgtcaagttcacctggcctcctcttctccagcctcagtcaccttctgctgaacagctccaccttggccttgcttactcacagactaagccagatgacctgcctgcagagcctcaggtgagtgaccgagcggccccatgggaatgagtgggaagaaacacttcccactcagttgggaccacatccagggaagcactgaggccacctcccaggggatcctttgcggatccctcccaggcccatccctgtgccctcccaggtgggtgcccactgctcttgccttctaatgccatcagcttcctcctggttacaaaagtggcctaaagggcttaggcccacgtcgtagaacaacccttgaggcacacacacagttcaccctgggctcttgttaaaatgctcattctgattccccaggtctggaattctgcctagactgtgcttttttttttttttttttttttttttttttttttttttttttgagttggggcctcactgtgtggcccaggctggagtgcagtggcaatgcacaggtgcaatcgtgttgcactgcagcctcaaactcctgggcgaacgtgatcctcctgcctcaccctcctaagcagctgggactacaggcctaaggcgttgcacccaaacttagcatttctttttttgtttgtttgtttttgagacagagtttcgctcttgttgcccaggctggagtgcaatggcacaatctcagctcactgcaacctccgcctcccgggttcaagcgattctcctgcctcagcctcccgagtagccgggattataggcatgtgccaccacgcccggctaatttttgtatttttggtagagacagtgtttctccatgttggtcaggctggtcttgaacgtccaacctcaggtgatctgcccacctcggcctcccaaagtgctgggattacaggcgtgagccaccacgcctggcttcagactctgcattttctaacaagcttccgggtggtatcaattctgggggccacggtcagcactttgagtagtgtgggtctagactcagatggggtggccttcctacactccctttgtgatttcactccctgctgctaggataaataaacatgacacttactttcaatgtgatttttcaaaacatgaaatcttgtgactaaaaacaaatccaagcagtgacacaaagcattgctttgtttatatccaagtacacctcctaccccctacctcgggcagagcagagtaggtaggaaatgaggttagagagttccaggaggttatatcatattggaccatttcacccaaaattaatttactgaaaggtgatccattaaagtgtatttatttatttctattttatttttattttttgagacacagtctcactctgtcgcccaggctggagtgcagtggcatgatctcacttcactgcaacctctgcctcctgggttcaagcgattctggtgcctcagccgcccaagtagctgggattacaggtatgcaccaccacgcccagataatttttgtatatttttagtacaaatggggtttcaccatgttggccgggctggtctcgaacccctgacctcaaatgatccacctgcctagactccgaaagtgctgggaatacaggtgtgaaccactgctcccagccccattaaaatttaatttgcaaaataaaagaaagtaaaaacaacatgcaaacaaatacttcccaaggggctaagaccatttgcctcagctatttattgttttttcctacccaggcagagcaaggtcagggctcagtaaagacaataccctgggtttaaggaaaaacctaccatttgcatggatgagaacacatatgcccctgagaactgatctgcgtgaatcagagaatcccacgtgaaagtggcattcagccgggccagcccggagatccctgacacagaggctgaggtgaagcttggcaaagaaatgtagagactcctcctgggccaggggctctggatttgtttccacccagcctgcaagtccctaagtctctggccagtcacagctcactgctggctctcaagttttctcacctggacactggggacaataattcccaccttgctcaccactccccacctgccatgacccccagaagttttgctaccagcatatgaattcctgggcgtgtaaggctttgcaaactgtagagttcttagcacagcacctgcaaaggcctttaagctcctgaaagcctcttggtctattccctgcttttccagactgaacaggaacagtatcggtgatgtcggttgctgccacctttctgaggctctcagggctgccaccagcctagaggagctggagtgagttgcccattctgcccccagacccaggacaattttggccgggaaagatgacaagggcaaggggctacctgagcacgccctttgcttcttcatctcatctccttcacccacttctacactgtgtaaacaacctggggcctagaagcttgggggacccaaagacaggatgtaagagtgtcaattgtagcaagagggatttaggtcagacaatggggagaacatcctaaacagaagccaagggttaggagctgtcactcaacatggggtgatggggctctctgtgtgagtcgaggcccttcctgggacttcagcctccccttctttttctgggagtggggtgtggacaagatgagacggcagaaggctgatgaagctgttttctcccccaagcttgagccacaaccagattggagacgctggtgtccagcacttagctaccatcctgcctgggctgccagagctcaggaagatagagtgagtagccagccctacagaggagggccacaggggtcacacgatggtcctaggagatactggcccctagctgaggccagcatggtaaaatctcccctgcgccaacctcagtgtccaggcagtggggctcggtgacctcctggccctcactgcgggaccttaagccaccccagcccctgctcttctctgggcctttctgcctcattgtctgggtaggtgtgtggtgtcggggggttgtctcttaggccccctgaagcaggggtggcagacccagcagatgtgctggggtgtcggggagagggggcatcagaggacctgatggctgcccccctcccacagcctctcagggaatagcatcagctcagccgggggagtgcagttggcagagtctctcgttctttgcaggcgcctggaggagttgatgtgagtgtctgcccaggtggcctctgccctctgtgccccccaggtccacctggcctcctctcccgcagtgggcacagggcagggcgggggtcccgagtgggcaggcccagtactcaatgctcattcctctcctcttccaggcttggctgcaatgccctgggggatcccacagccctggggctggctcaggagctgccccagcacctgagggtcctacagtgagtggccccctgcccataccatgcagggctggtggggaggagggtcctcgggagcagtgggggggtccaggcccccatcagttgagctgccctgccccaagtcaagcttggcatatacccactctcctgcctgttccttccctgcctctgatgtctgcagcaagaaaatcaggaggcccagcctagtcctggctctgccactggcccctgcctgaccttggccaaacccctgccccttctcagcctcagtttcttcacatgcaaaagaagtacaatgatcccagttcattgtgccctgtgagcgggtccctgagggcgaatgagaaatcctggcagagggcttcgcaggagcacggtgccaatcaacgtggcctcagcacttcacaaatgacctcattgcagccccatggcagcccccagagtcccagagtgctgggaccttgttttttttttttttttttttttttagatggagtctctctctgtcacccaggctggagtgcagtggtgcaacctcggctcactgcaacctccacctcccgggttcaagcaattcttgtgcctcagctaccagagtagctgggattacgagcatgcccaccatgcccagctaatttttgtatttttagtagagacggcatttcaccatattgcccaggctggtcttggactcctggcctcaagtgatccacccacctcagcctccaaaagtgctgggattacaggcgtgagccaccatggctggctggtgctgggacttttatgtgctcccttttccaggcaagggaatgaaggccaggagaggtgtggagaattttccttactcatacacgaaggacccaggtgttgaatttgggatctcagaccccaaagccagggtccttgatacctacccaggtcctgtgtggatggggaattagccagagactgtctacgggctggcactgcagcctgagacaaggctgagggtggggctctggaaacgccagtccctcaggctcctctcaccctctcctctttccccagcctaccattcagccatctgggcccaggtggggccctgagcctggcccaggccctggatggatccccccatttggaagagatcaggtaagtaggggctgcccagcccaggcacggggacagtcctgggcgggtctgggggttcctctcacaggtatctcccctaccctgcagcttggcggaaaacaacctggctggaggggtcctgcgtttctgtatggagctcccgctgctcagacagatagagtaagtagcctcccctgcctgcctaggggaccagtggcaggctgagggcagcccttctctgactgagcctaacacctggggaggcctttgaagtgatagaagccccagggatggtgggggcctggctcaagaaaggaagtctttcctaaaacgcctagcttaccccagaccctggtggctctggaggcaggacctgctagatcccctgactcaaacaacccccatcccatcccatgcccttctccatccccagcctggtttcctgtaagattgacaaccagactgccaagctcctcacctccagcttcacgagctgccctgccctggaagtaatcttgtgagtgattggaagagccctgagctggctgggaaaaggaaaagtcgggaggggtcgggggagttggctccagcctgctgtgtggcctggagctgctcccatcctctctggccagtcctcccatttgtaaatggggaagatcatccttactcagacatcctctcaaagacattttaacacttgagctgcaggtaatgttgggtaaaacagtttaccttcttctgcctttttccccatttgtagattggtgggaggggaggtggaccagatggtctttaaaggtttttggtccaaccttccttttgggaggcaactggatagaccaccttgcctgcttgatgaaacctccatttatgaaccacagttggtagaaacagtggctaaagccaggagaaagccacccccagacctgctggctggccgtgcttggctgtctcttagcaatcagaatcccccagaccttggggctttgcagtgctgcctcatgagtaaactagaattctaggactagcctgggaccctaaccatggtatggaggacaaagctgtttcctaaagaacaggacacaagtgattacgagaagattttagtttgcatcctaaaggtcttaacccttctcattacaccaaagcgaaagtctcagatcagtggtaattcatctttaacacctaacactggattctccctttttaaccaaaagggttaaaaacccaacatcttaggaagggcatatgttccaactagaagttaataccattgtttgtactatatttatttttgtaactaccttctatatggagtctgtaacacaagttttccattgatagtagcaataaaagtttcctttcaagatttttttttttttttttttttgagatggagtctccctctgttacccaggctggagtgcagtggtgcaatctcggctcactgcaacctccacctgccgggttcaagagattctcctgcctcagcctcctgagtagctgggattacaagtgcccaccaccacacccagctaatttttgtatttttagtagagacaggatttcaccatgttggttaggctcgtctcaaacacctgaccttggcctcccaaagtgctgggattacaggcgtgagcaaccacgcccagccaagattaattttttaaagtaagaaaaaagagggggccaatttaaagaaaaatatgatgcatcttaaatacaggaggtacatgtatgtggcaaaaatggcaacatcttgtgaacaacgtcatgattcaaacttgacggggaggggagcagggaggaaggtaacctgcaccctgacgtcttcaggggaggacacacaagcaccctatcaggtggcctctcttgaaaacccttgcccccacgactggcaccctgctttccccattcactgccttgtctccacccctcgacctccttgctctcctgccgctgactttgggacccctaccctgcaggctgtcctggaatctcctcggggatgaggcagctgccgagctggcccaggtgctgccgcagatgggccggctgaagagagtggagtatgaggggccgggggaggaatgggacgggctaaagggggacctacatcccgggaacaccaagaggccactgggtcagtcccctgcctcccagaaagcccttccttgagttgcacactctggcctgttccaagcccctgccaggcttagttccccctgggttctagccttcagccttcctgctgcacctgccaccagtcccctgttgtcttttgggttccctgagaaggtagtgtgggagactgtgtcccctgaccttggcctgaggaagggacctaggaaactctcacacccattctcatggccgtgtttctctttcccctcccctcactgtccactgagaagcctggagaagaatcagatcacagctttgggggcctggctcctggctgaaggactggcccaggggtctagcatccaagtcatccggtaacagaggcctgcaggggcagggatggtgggtgggaggctacaccaacccccagatctaatgggactccctggaggaggcggcagggcctgggctggggattatcaaaggagacttggaccactccaccaagaatttggcagcaagcagacttggatcaaaccccagctctgccacttgccaactgtgtaactttgtagccataactcaacctctctgaaccccaattttctcatctgtgaaatggggatactgatagtatctacctcagagagttgtgaagactaaatgagcatataaagcactgaacccaatgcctggcacatagtaagcacttaaaatggcagctataatcagagccatcacatacagttgtataggttgtgcactgcacaagggcattaaacctaaggggcaccattcacattgtcaacctgctagatttctagcagatgagagtaaagtaccttgttctaccaaaatcatatattatgacaatttcagacagatggaagtaaaacatcttgaagaaagagggtcttttccttatttgcacaaatgtgtcatatgagtgtggccttagctggcatcactatctcccagggaggaaggttgagttggaggactcaggaggcaggtgtggggtacaccctctccctaggtcagctatgctggtctaacacctgcctctgccaggtaactctaggcacagctctacctttttgggcctcagcctcccaatctgcagatacgacagatggcaaagatgggaggatgaatgagtgcctatatctgtgccccacagcctctggaataaccccattccctgcgacatggcccagcacctgaagagccaggagcccaggctggactttgccttctttgacaaccagccccaggccccttggggtacttgatggccccctcaagacctttggaatccagccaagtgatgcacccaaatgatccacctttcgcccactgggataattgactcaggaaagaagagcctcggcagggcgctctgcactccacccaggaggaaggatacgtgtgtcctgctgcagtcctcagggagaacttttttgggaaccaggagctgggtctggacaaaggagtaccctgcattacgtgggatatgtgtgatcaattggggacatgcgacacacaatgagggtgtcatgacaatgcatgacacgtacggttatatgtggcagtgtgaccccttgacatgtggcgttacatgaaagtcagtgtggcacgtgttctgtggcatgggtgctggcatcccaagtagcaggatacatgattgttggtctatatatgacacatgacaaatgtccatgtcacaggactcatggctggccagatgacctcaggctggcccaagatctaatttattaatttttaaagcaaatacatatttatagattgtgtgtatggagcagctaagtcaggaaaagtcttccgcccgagctgggaggggagagtgtccatgcactgaccagtccaggggctcaagggccagggctctggaacaagccagggactcagccattaagtcccctcctgcctcaatcctcagcctacccatctataaacttgatgactcctcccttacttacatactagcttccaaggacaggtggaggtagggccagcctggcgggagtggagaagcccagtctgtcctatgtaagggacaaagccaggtctaatggtactgggtagggggcactgccaagacaataagctaggctactgggtccagctactactttggtgggattcaggtgagtctccatgcacttcacatgttacccagtgttcttgttacttccaaggagaaccaagaatggctctgtcacactcgaagccaggcttgatcaataaacacaatggtattcc

SEQ ID NO: 15696 - DNA, 37899 bp, Homo sapiens
ctagttccagtacagcgtggagggtttaggcagcgtgttctgattctttgcgggacggcgagcgcatttgtgctttgcccgccgcggcctaggaggccttttgaggccgcgtagtcggtgtttttgaactgactctacagcttctggcaggccgtgcggcgccctgacccggcctcaccatgttggtgctgtttgaaacgtctgtgggttacgccatctttaaggtaggtgggagagcgagccgttaaagggggaaggcggatgctggacagacgaggagagggaaagacttaagcacggaactactcagagtagcgtgggtgcctgttatagcccgggctctgggaggagggagaaggcctttacacctgagagccatgttacgtgtaacacgtggccccgccgtttggggagacccgttctgcattagaggattttatttcctcccgttgaaggggtgggcaggaggcgtgttagaatttaacagattatagggaattcggactttattctagatgttttgaggaatgatcgaaagattttttttttttttgagatggagtttcgctcttgttgcccatgctggagtgcagtggcgcaatcttggctcactgcaacctccgtctcccgggttcaagcgattctcctgccttggcctcccgagtagctgggattacaggcctccatccaccaccacgcctggctagttgtttttgtttgtttgtttgcttttagtagagacggggtttcaccatgttggccaggctggtcttgaactcctgacctcaagcgatccacctgcctcggcctcccaaagtgctgggattacaggcgtgagccaccgtgctcggccaatcgaaaggatttaagcagaggaatgacctgctaatttgtcttaatacggttactctgctgtgtggagattagactcgaggagataagaacggcagcaagaatacttttgcattcatttggacaagatgaaattgcctggtatggagagaaacaaatatcgatagaaattgtgaaggtagaacaggaaggactggctaatagattgaatgtggggttttggtttaaataagatgttaagaaagtttcttggggaaggactaaagatttccggtttgggctgtgcgaagcttgcgttgtctattagacctgataatgcagttgtgtagatcgggcagttcagtatttcagatttgaagcttaggggaaaacatctgggctggtgatgtcagtttgaggtttggttgttttcgtggggaaagtttgacaagttcgtcagcactgaaatggttgaatggtaagacattcgtatcgcaagatgctgttgagatgttaggaagaatgagtgagattgagtgccttttcttgtgcggtgcaactcttctgaggtctgtgaatatagcaatgaaaaataaagtttttatgtatattctacatatatatatgttggtagaaagcaaaaacgctaggtaaaaataaatgtaatacaattttagctatgaaccaaaaaaccatttgtggtgtggatgcaagaaagtctggatgggtgcagagttctccatgtttcacttctgacatttgaaaatacgcagtttgcatttgatacgtcaaatgttatttttaagaaaaccaataaaatcattaaaaccgaaaaggcagttttgcttgtttttaccttagttggagttatctgcaattgccgtattagtgttttaaggaacttgtaagtaagctccttagtcccctttagagctacgaaacatgtcaattttacttttctccagctttttggaatcttatctaaattaccatgtagagttctgcatagcttcaaattctcttagccaatgtggtctgtaagtgtctatcgatgaatttcaccgttaattgccgtagtatactgtcctgtaccggatgtgaagaggagcaactctgcacagtgcactggttgtctcccatggtaggaaggaattggcttatcaatggtcggatttctagacctgggtcctaaaatactcaaccgtgtctcgatgaattactgatttctattaatgaaaagtgtcctcctccatgaaaatgtctttgagtattccgttggagtttgcagtgctatttatctgcaagttactgttcaaaatgattaaattgtggtttatgtaacctagtactaaagaaataactagttaagctcgaatatgttgacattgattagtttgtaattattggaattaacattgatcgtttctgagtataaaagacatacaaacgttctggaactagtgatggctgcacatttttgtgaaaatgcactactaaaaagtgaattgtacactttaaaagggcaaatattaagatacatgtaaaattaatatgatatatggtgaattttatctcctaaaaaagtagacatacggttcaaagttattagtttcctttcccataatctttcaaaatgctagggtataaaattatgttggttgccaggcatggtggctcatgcctgtaatcccagcactttgggaggccgaggccggcggatcacaaggtcaggagtttgagaccagcctaaccaacatggtgaaaccccgtctctactaaaaaaatagaaaaattagctgggcgtggtggtgtgcgcctgtaatctcagctacttgggaggctgaggcgggagcattgcttgaacccgggaggcggaggttgtggtgagctgagatcgtgccattgcactccagcctgggcaataagagcacaactccgtctcaaaaaaaaaaattatattggatgcatataattcatgctttgatgagaatgctttaggaagttttttgaagttttttgtttttttgttttttttgagacggagtttcactcttgttgcccaggctggagtgcaatggcgcgatcttggctcaccacaacctctgcctcccaggatcaagcaattctcctgcctcagcctcccgagtagctgggattaccagcatgcaccaccacgcccagctaattttgtatgtttagtagtgacagggtttctccatgttgaggctggtctcgaactcctgacctcaggtgatctgcccgcctcagcctcccaaagtgctgggattacaggcgtgagccactgcacctggccttgaagttttttttaaacttccatttacagtgaggaaaacattttatgtataacccatgtacacatacaaattcatgtttatgtatttaaaatttattttgaggcagggtcttgctctgtcacccaggctggggtgcagtggcaggatcatggctcattgcagccttggcctcctgggtcaagtgatcctcccacctcctcccgagtagctgggactacaggctcaagccaccatgcctggctaattatttatttatttgtatttgtatttatttattttttgagatggagtctcactctgttgcccaggctggagtgcagtggtgtgatctcggctcactgcaacctccgcctcctgggttcaaacgattttcctgcctcagcctcccaagtagctgggattacaggcgtgagccaccatgcctggcctaaatttttttttttttttttaagaggcagagtctcactatgttgcctaggctggtctcaaactcctggcctcaaggtgctgggattacagccatgaggtacggtgttctgcccacttatgtgtttagagcgattcaaaaggaaaacacttccaaaaagttattgctcattaacagggttatatatatataaatgtaaagacattgtgtaaaggaactgttgtgattaattctaggatattataaaaattcagcctgtggccgagagcagtggctcacgcctgtaaccccagctacttggaaggctgaggcaggacaatcagttgaacctaggagcagaggttgcaatgagctgcggtcgcgccactgcagtgcagcctgggcgacagggcaagactccgtctcaaaaaaaagaaaaaaagaaaaaaagaaattccacctgtgtccttgtgtcacgtggcacacagcataagattttagtcttgctcataccagacttccttcagctgctcttccatgtggtagccattagtacgtataaccatttcacatgagatgtaactgataggactgaggaagtgaattttaacttacttgaattttaatggttatattgtacagtgtagctgtgtagcatagcattttgtgtcacttcattttctcaaggtttggagaaagatttttgatgtacataccaaatgtctatataaaacctaagtactgagcaatatattttttctaactttattgggtgtactttacatactgtataactcacctataggttttagttacaatccagttttatagtacactttgttgcaaaaagttctcatgcccattttcaagttagtcctgctctagacaaccactgttcagctttctttttgcataattttttctagaagtttcatgtaagtggagtagtattttagtcttttgtgtttggcttttttcacttagtgtaatgcttctgaagctaaccgaagagctttttcacatttgttgcgtgtatggatttgtttctttttgagcagtgcacattttaaactaattatcagttttatcctgtatttaaacaagtttcataaaatattaacttgctcatattgtctgtggaagtgaaacttaaaagttagcatcaaataatttacacaaaacatagaggttgggtgcagtggctcacgcctgtcaccctaacactttgggagggtgaagcaggaggattgtttgagcccaggagttgcagaccagcctgggcaacatggcggaaaaaaaattagctgggcacagtggtgcttgcctgtagtcccagctgctgcaggaggctgaggtgggagggaggtcacggctgcagtgagctgtgattgagcctctgcactttagcctggacaacagagtgagacctcatctcaaaacaaaacaaaaaccacacaaagtctcaagcaatcaattaaaaatgaaaatgaggaggctggacatggtggctcacacctgtaatcccagcactttggaaggctggggtgggcagatcatgaggtcaggagtttgaaaccagcctggccaacatagtgaaaccccgtctctactaaaaatacaaaaattagccgggcatggtggtgtgtgtcgccaaatctgtagtcccagctgaggcaggaggatcgcttgaaccagggaggtggaggttgcagtgagaagaccgcgcctctgcactccccagcctgcgtgacagggcgagacactgtctcaaaaaaaaacaaaaaaagtgattaaaattcttaattccatataccctcaccaatattctgtatcagctgcccaagtattagataggatgggctcaatcctaaaaggcacaacccccatatttaacatccctaaaattgggatgtcttacaattgatgacaggtcaattgggagtgtaaaagaataacataagctgggtgtggtggctcacgcctgtcatcccagtactttgggaggctgaggcaggtagattgccagacctcaggagttcgagaccagcctgggcaacagggtgcaaccccgactttactaaaatacaaaaaaaaaaaaaaaaattagccaggcatggcagcatgtgcctgtaatcccagctacttgggaggctgaggcaggagagttgctttaaccagggaggtggaggttgtagtgagctgagatcacgccactgcggtccagcctggccgacagagcgcaagactccgtctcaaaaataaaaaaaaaaagaatagcatgttaaattttgtgaaatagagtatgcacagatattatgcatatatttttatttaaaaaaccagctggatcaggcgccatggttccttcctgcactcccagcactttgagaggccaaggcaagaggatcacttgagtccagaagttagagatcagcctgggcaacaaagcaagcccctgtctctacaaaaagatttttaaaagagctagatgtcgcagtgtgcacctatagtcctagctacttgggaggccgaggcagaagaatcgcttgaggccaggagtttgaagctgtagtgacataggaccacaccactccactccagcctggacaacaaagcgagaccctgtctctggaaaaacaacacagctagtaaatttaaaactatactttgctaataagcattatttatcaagtccataatatagcacatctacacattaagacgcagttctagtctggttatatattattttcagtaagagaaacacaatgttgcaagttgtataaaacttagatgagtgacaagatgattttaggggtttgttctgatgtataattttttttttttttttttttttgagacggagtcttgctgtcgcccaggctggagtgcagtggcgcgatctcagctcactgcaggctccgccccctggggttcacgccattctgttgcctcagcctcccgagtagctggaactacaggcgccttccacctcgcccagctaatttttttgtatttttagttagaggcggggtttcaccgtgttagctaggatggtctcgatctcctgacctcgtgattcgcccgcctcagcctcccagagtgctgggattacaggcatgagccaccgtgcccagcctgtataaatttaatcacacatggttgaattagatatgttggtaaaaataacccaaactagaaaaacttagagtcacacaaagcaataaacaactacaaagcctagagttggtattaacaatttataaactaatagctctaactttgtatatcatgaagttttagaatccagagacacctcaccaagtctcatgactatactgaaaacactgattaaaattttttgaaattgttcagagaatgcagctaaccataactgaagttcactatttttaagaggacatgtatcaaataggggatatgactcatgagtaaaattcacattttttctagctgaaaagcaagtatatttgaagataacatttgggtaacaaaattgccatatttaaaagatactttcggcctggcggggtggctcacgcctgtaatcccaacactttgggaggccgaggtgggtgcatcatgaggtcaggagatcgagactatcctggctaacacggtgaaaccccatctctactaaaaatacaaaaaattagccaggtgtggtggcaggcgcctgtagtcctggaggctgaggcaggagaatgacgtgaacccaggaggtggagcttgcagtgagccgagatcctgccattgcactccagcctgggcgacagagcgagactccgtctcaataaataaataaattaattaaaaaatactatcaccattctaaaactgaagttaaaataacaaaggaaatgtgataaaatcagggcaattcatgagcacacaaaggtcttcaaagactatgttatgtcagccaaaaccattactatgacaaataaaaccattgtgttcccaactgcaacatcttgaagaaaacattgctaataaagaccatctaaataagaaagttagagatattgctacattttctgtattacatttgtctcaaagtttttatttgtctcaaatttttaatcatttcttttcagccagggtaatgataaatatttgtatacagaaatccattttaagttttatcattttaagataatttccatttctaagtagaaatagtatacaactattaccattgcaatctttagcattgttgttacaacagtactagttttaaaacaagtctttatattttatagatacaaactgaaatattaacaggtaaaaattaaatgtctaggtcttgcttcaaaacaatacaaggcggctgggtgtgttggctcacgcctgtaatcccaacgctttgggaggccgaggcaggtggatcacctgatgtcaggagttcaagaccagcctggccaacttggtgaaacccagtctctactaaaaatacaaaaactagttgggtgttgtggtgcgtgcctgtaatcccagctattcaggagactgaggcaggagaatcgcttgaacccgggaggcggaggctgcagtgtgccgagattgcgccactgcactccagcctggcgacagagtgagactccatctcagaaaaaaaaaaaaaaagccatttactgtgattcctaaaagtatgcatgaacatgtgttgcacagacattcaaagtcttggagaatatatacctaaatgttgataagtatattgttgattaaagtaccctatgtttcttttgcatttaaaaaatttctcacatctagatgtgtctcacaattgacgatagttttagagaaatccataatactttcatgttaggatgatcatagcagtaaataacgaatataatctattgaaagtagacaaaagttttttttgttttttgttttatttttttgagatggagttttttgctcttgttgcccaggttggagtgcagtcgcgcaatctcggctcactgcaacctctgcctccgggttcaagcaattctcctgcctcagcctcccgagtggcggggattacaggcatgtgccaccacgcccagctaattttgtattttttttttttttttttttttgtagagacggggtttctccatgttgatcaggctggtcttgaactcctgacctcaggtgatccgcctgcctcagcctcccaaagtgctgggattacagatgtgagccaccatgcttggcgcaaattaaagtttttaatgattacaatactttactgtaaagggattaatggctcttttaaaagaaaggttctcggccaggtgcagtggtgcacacctgtaatcccagctactcaggaggccgaggcactagaatctcataaacccaggaggtgaaggttgcagtgagccaggattgctccactgcactccaggctgggctacagagcgagactccatctcaaaaaaataaaaagaaaggttccctgccctaccccctaggaccccatagctccagctacggcccaaggctggggcaggaatatctcttgaggccaggtagattctagactgaatagccactgtactacagctgactggactagatctgaattccatttagctgttaaatgggcaattcgaactagtaatttgaccaaaattacatgcagggtaagaaaactagttcattatcttagtgaaagaaatagcttctacaccttcattttacatgtaaaattgtatttgaagaatgcagctgtatatgcctcacctgtaccatttaaataaaactatttaaacattttattacaggttctaaatgagaagaaacttcaagaggttgatagtttatggaaagaatttgaaactccagagaaagcaaacaaaatgtaagtactcttgaaatcaataatttagcagttaacatttagggcttgttttattttttacatttttccctgatttatataatgttacattcgtagttttctgttttgaaatctgtttcaggaataattttggtatgaacctaattattacaaatgttttacttggaatataggccatctcaattaatttgaaggcagtagtctcccccttacccacagggattatgttccagaagaccctgtggatactttaaacctcggatagtaccaaatgtgattgctgtcagtaggaacacatttgtcttcgtgtcttccacacacaaatgtaataccttttttatcttaactaagcacttaccgcacacaggggttgtaacctgctttttgagttttgcaacatcaaaactagcatgaactactttttctttcatcacaatttcatggaagattcattcttagtgtagatgttaaatctttggtttttttgtttgttttttgagacagagtcttgttctgtcacctaggctggagtacaatggcgcaatctctgctcactgcaacctccgcctcctgggttcaagctattcttctgcctcagtcccccaagtagttgggattacaggtgcccaccaccatgcccagctaatttttgtatttttagtagagacagggtttcgccatgttggtcaggcaggtctcaaactcctgacctcaggcgatccgcctgcctcggcctcacaaagtgctgggagtacaggcgtgagccaccacacctggcctaaatcttcgtatttgtatgtatatttaagggaccacactagtatgttcccttaccagataagaaaaccttgcttaagatgacactgttgcctggtgtggtggctcatgtctgtaatcctagtactttgggataccaaggtgggtggatcatttgaggtcaggagctcgagaccagcctggccaacatggtgaaaccccctctctcctaaaaacacaaaattagccgggcgtggtggcacatgcctgtaatcccagctactgggaggaagctgaggcaggaaaatcccttgagcctgggaggcggaagttgcagtgagccgagattgcgccactgcactccagtctgggtgtcagagtgagaccctgtctccaaaaaaaaaaaaaaagatgacactgttttaggcaactagaagactagttttccttcttaaagggttatatgctttgttgggttaatctgattcgttgttgtcaatgatgtattcttcttggaactgaatctaagtgatctgactcaatattcgtcactaccactgagacaacgatgaatcaactatatgtttctttctggataaaatactaccctgaggctgggcgtgatggctcacacctgtaatcccagcattttgggaggccaaggcaggcggatcagttgagcccaggagttcaagaccagcctgggcaatataggaaaaccccatctctaccaaaaacaaaaattagctgggtgtggtggtgcacacctatagtcctagctgcttgggagactgaggctggaagatcctttgagctcgggaagtcagggctgcagtgagctgtgattgcaccactgcattccagcctgggtgacagagtgaagtgagaccctgtctcaaaaacataaagggggccgggcacggtggctcacgcttgtaatcccagcactttgggaggtcgaggtgggtggatcacaaggtcaggagtttgagaccagcctggccaatatggtgaaacctcttctctactaaaaaatacaaaaaaattagccagccatgggggctgggcacggtggctcacgcctgtaatcccagcactttgggaggccaaggcgggcggatgatgaggtcaggagatggagaccatcctggctaacacggtgaaaccccgtctctacgaaaaatacaaaaaattagccaggtgtggtggcgggtgcctgtagtcccagctacttgggaggctgaggcaggagaatggcatgaggcaggagaatggcatgaacctgggaggtggagtttgcagtgagccgagattgcgccactgcactccagcctgggcgacagagtgagactctgtctcaaaaaaaaaaaacaaaaactagccaggcatggtggcacaggcacatgcctgtaatcccagctacttgggagtctgaggcaggagaattgcttgaatccgggaggcagaggttgcagtgagccgagatcgcaccactgcactccagcgtgggtgacagtgagattctgtctcaaaaaaaaaaacaaaaaaccataaagggttaggatgtaacaagaatgagacctgacaataagctattttttttaatggcatttgtacaggatagacaaatgaatatcatgagattcctaaaaaggactcacgtacgttttcttgagtcaattctatgctgtataataaagtcatctctgtacagctttatgcaacaggggtttgtattaaagcttcaacatctttactcttggccaaaatttcctccaaagcctacaactttcttttaataatccaagcattactagcctaacatttagaaaaactagtaattgtatgaagaatatctaacttcacaccctgatacacaatggtaggcatgttttattggtgtgtgctttggaaacagtcaagcacttctttccaagttatgtggcttttgaatcaacgcactgcccccaataacatgtttatctcttttttttttaattctagagtaaagctaaaacattttgagaaatttcaggatacagcagaagcattagcaggtaaagtaaaaaattagaagcttgcttttttgaaaaaattaagtcttagccgtttgtttttcttgtttaaaaggttgtttgcttcagttgcctgtgttaaccttattcaatgttgtcaatgatgcattcttattggaactgaatttaagtgatctgactcattcgtcactaccactgagacaacattgagttagcttttttcaccatagggctggttttccccatgtgtgaggagaggtgagaagtggttaagttgatctccctgtggaaaccagcaacataatgctgaagcacaattcagtaaaaggtgttctacaagggaccaaggtaatgtggtcaagtatacagctctctcctcattttaatccaagggtagagttgtaatcctgagaacagccaggattcacagttgaaaaataatttaaaaagctcttctgggggtatagatttttagttcaaaaaaacatatcaatattcagagttatacagaaactgacagaggtgttatttttaaaagattcagaagaatggatgactcatactcttcaactagatttcatcacgggacaacagagtgatcgggtttatttactgtaattgactgcagtaggtcttacagttttgtttttttaagtgttagggaaaacaggaagagcagatataaagcccaaatcattaaattttcaactgcctgaattctttatcacaaatcagccaactatttggcggtgtagtttgaaaatgaaggaccgtgaggaagaatatggcttaaagctgggcaagaatatgacagatgcaaaaaattttgttaaataaccacaggagaaaggtacagtttttgtctgaaaatttggaatccaactaaacatgctggaacataacagaccaccctaaccttggcagaggggtaggctgaaggaagacccatagggccagtttctttgttttataaacatagttctagggctgcttcaccaactcttcagtaattagagttatatacagccataaaaaaaactgtggtaatattaacttggagaatttttaaaaagatagcctgttcatcacagcttttaagtatgggtaaacatttggtaagattccaagcaagattgtgttagctgtattcaaactctagggggtgttgttgacatagactgggatatgaacagttcctagtcctgatctcaagtagcctcttctgaattcctttttgcatacgatctttaatctgcttgggatatatctggccagtccttattaaactgtattaaatggacaagccaagcttttgctcaaacaagcaggtttttactattaatacctaatatattgagcacatactgattgtcagatttatgcttatgatttcataattgttatttaattcttgaatcctgtgaggcagataaccatcatctctatgttacagatgataaaacttgaaatttaagcagtatttccagattcatttacctagcttctttgtattatttaaaataatgtacaataaggctgggtgcggtggctcatgccaggaatcccagcactttgggaggccaagacaggcggatcacctgaggtcagttcaagatcagcctggccaacatggtgaaacctcgtctctactgaaattacaaaaattagccgggtgtggtggcacacaccttagtcccagctactcgggaggctgaggcaggagaaacacttgaacctggtaggcagagatagcactgagccaagattgcaccactgcactccagcctgggcaacagagcgagactccttctggaaaataacataaaattaagtagtgtacagtaaatggacaaaatgccatagtagttgagaatttaaagtcaattccccccagtctaagctccatgagggcagagactgttctgtactgtcaaattcctagacgctagcaaagtatacagctatagaaggtttataataaatattttggggaaaatgaatgaaaatagtgaattttatcaggaatgctgtcatagaaacatttacaatgccttttcctatctgttttcaccagaaagttaaatgaacatcagctaattaagaaagcagaatccttcccctgggaattcagttctcactgcctattataaggcagttttgacatgacagaaccacaactaaatggctgtaaatgtcacagtgtacattttaaacctcatagccttagagtttgatgagaccaggcacagtgactaacacctgtaatcccaacactttgaggggctaagatgggcaggaatttaagatcagcctgggcaatatagcaagaccccctctcaaaaaagatttttttttttttggagatggagtttcattttgtcacccaggctggagtgcagtggcatgatctcggctcactgcagtctccacctcctgagttcaagtaattctcccaggaggctgggttcagcctccaaagtagctgagattacaggtgataccaccatgtccagctaatttttgtattttttagtagagacggggttttgcctgttggccaggctgctctggaactcctgacctcaggtgatccacccgccttggcctcccaaagtgctgggattacaagcatgagccaccgtgcctggccatcattttttttttttaaataaagaaatagggtctgttggggtgtgatgttgaatttgtattggtctcagacattcatatatgctatttgcatgaagtggtttatttttattcttgattgtgttttcaacttgcaagtctttttttttttttttttgatactgatcttcggctggagtacaggggcgcgatcccagctcactgtagtctctgcctcctgagtagctgggattacaggctcatgccaccacgctcacctaatttttgtatttttagcagagatggggtttcaccatgttgcctaggatggtcgcatctcctgacctcgtgacccgctcacctcagcctcctgaagtgctgggattatccatttgatcataattcgaatggatatacgatcaggagggaagagcaagacctgacttattaagcacaaactgcctgaccttggaaattgttgatagaccttcattcctgccaagcatttttcttttctttttctttttctttttttttttttagatggagttttgctcttgtcacttaggctggagtgcaatgtcacggtatcactttaacctccacctctgggttcaagcgattctcctacctcagcctcccgagtagctaggattacaggcgtgagccaccagggccagctaatttttgtatttttagtagagtgtttcgtcatgttagccaggctggtctctcgaactcctgaccttaggtgatctgccagcctcagcctcccaaagtgctgggattacagacttgagccaccacgcgcagcccaagcatactttttatgttttttgtttttgttttgttgagacagggtctgtcaccaggctgctggagtacagcggcatgatcatgactcactgcagccttgaactccctgggctcaggtgattgtcccagctcagcctccccagtagctggactacaggcacatgccaccacacccagctaatttttgtatttttagtagagacagggtttcgccgtgttggccaggctggtggtacacaccaccatgcctgggtaacccaagcatacttttacctcagtcaaatgtcagataaatttcagaagaggtattagttcgtgtgggtccagaaaaagggaatataggtctaaggaagggtgagaaatataaagcagctgatttagaacttgccagaaataccagcggtctcaaaatagaataggcagcctttgctactaagttttacattgctggaggtgtacaagtggagatacaagcaaagctaaggccttcactcaaacatgtttatattatggcagaactttgaaaatgattacactcatttttactagttttgatgtgattttaggatatttcaggacagtctatttgaaatgacaaaggaaagtgagtctgttttgtcttcccaaaaagattgtttctaagatttcatgattctcccttgagttcatgagaagattcttgtgagaaggaaagaaaccctggacctgattttacccctggctctgtagcaaaaatgagggtgggaagatcaaatgaaattgtgaaacatgtaacttataaaacatatatcatttcatttcagaagtaacattaaattcaagccctttgaaaggcctattttatttttttaagtgtcaactagggcaaggtctcaaagttaaaaatttgagagttaatgcttttgtttttctttttcttgaaaagcattcacagctctgatggagggcaaaatcaataagcagctgaaaaaagttctgaagaaaatagtaaaagaagcccatgaaccgctggcagtagctgatgctaaactaggaggggtcataaaggtaaagtcacgatatttttggtcatgcctgctagtcagatctcacagcataccaactacaaagcctagcctttgcaataagttgcttatcataaattctcaatacatttttttcttttctctaagctacatgataatggatttcccctaacatcagctgaactgagcaaataagtaatacctatttgttctagaagatatagaagaacaaaaaatgataaaaattgactttaacaaatctgctacccatatataatgttaatgttctatgtatatcatgccatatttttgtctagccacatttttttccaacgaaaatggggtccttatattttttagaaatatatttattagaaaacttttagtaggggtgtattgctggagatgaaataaaatgtgagagtggaaagaaagactaggaaaatagcctcccaaatacagaaagcagaacaattcgggcggggcgcggtggctcacacctataataatcccagcattttgggaggccaaggtaggagtatcacgaggtcagcagatcgagaccatcctggctaacacagtgaaaccctgtctctactgaaaatacagaaaattaaccgggtgtggtggcaggcgcctgtagtcccagctaattgggagtgcagtggcgcagtctcacagctcactgcagacttgacctcctgttctcaagcaatcctccctcttcagtagctgggactacaggcacatgccaccatgctggctaattattttattttattttatttcatttatttgagacagagtctcactctgttgccctggctagagtgcagtggcatgatctcggctcactgcaacctctgcctcccgggttcaagggattcccctgccttagccttccaagtagctgggattacagacgcccgccaacacgccctggcctcccaaagtgctaggattacaggcatgtgccaccacgcccaacctgtaatttttttttttttttaagacggagtctcactctgtcgctaggctgaagtgcattggctcagtcttggctcactgcaacctccgcctcctgggttgaagtgattctcctgcctcagcctcccgagtagctgggactataggcacctgccaccacacccggctaatttttgtatttttagtagagacggggtttcatcatgttggccaagatggtctcgatctattgaccttgtgatccacccgcctcggcctcccaaagtgctgggattacaggcgtgagccaccgcgcctggcataacctgtaattttaaaaagaagctaaataacaggtagtaaaagatctccttaaaccaactacttggtcaaattatattaatctttttatagcttttaatttatatagccaagctgtcttctggaagcttgtatcagtttttacttccaccagtgatacagtcaagtattctacaaacacactggaaattatgcttcttgtccaactgagaaatgcgtatatttaaattagtgccactttaatatttaggaaataatttcaggctgggcgcggtggctcatgcctgtaatcccagcactttgggaagatgaggcgggcggatcacttgaggtcaggagtttgagaccagcctgtacaacatggtgaaaccccgtctctactaaaaatacaaaattagctgggcatggtggctcatgcctgcaataatcccaggccgagacaggagaatctcttgaacccaggaggcggaggttgtagtgagccaagattgcgccactgcactccagcctgggcgacagagtgatactgtgtctcaaaaaataataataacaacttcaggaaagtctttttttttttaatttaatatagatgttcatgttcttgtaggaaaagctgaatctcagttgtatccatagtcctgttgttaatgaacttatgagaggaattcgttcacaaatggatggattaatccctggggtagaaccacgtgaaatggcagctatgtgtcttggattggctcacaggtgagaattactggaaaataaagtcaacttacttttatttgataagcgcttaacatagatctgttctaagaatgttacaaatgctcatttgaaccacatcagaaccttatgaagaagatgatagtaatatcctcatttacagatgaaactgaagcccaaggtcaatacagctggtaagtggtaaagccaggatttgaacccaggcagtctggctctattgtctggattcttaaaaccttaaaacctcatcaaaggaattctctactactctgatcttggatgccctgtttcttgggctttccctcctttatctctgctaagtcatgccactcctccatctacttagtattcccccaaattctctcatctgctatggtcttatgggataggtgtgtatttgtgttttcattgctttactctgatttttaataaggcaaagaggactaggtgcagtggctcacccctgtaatcccaactctttgggagaccaggagtttgagactagcctgagcaacatagcaagaaatatgtctctctctgtgtttttttgtttgttttgtttttgttttgttttttttgaggcagattctcactctgtcgcccagactggagtgcagtggcgtgatctctgctcactgcagcccctgcctcccaggctcaagtgattttcttgcctcagcctccgagtagctaggattacaagcgtgcaccactactgcccaactaatttttgtatttttagtagagacgggctttcaccatgttggcctggctgatcttgaactcctgacctcaaatgatccatccgccttggccttccaaagtgctgggattataggcatgagccaccacacccggcatttttttttttttttttttttttttgagtcagggtctcactctgttgctcaggctggggtgcagtggtgcgatcttggctcactgcaacctggacatcctggactcaaacaatgccacctcagcctcccaagtagctgggactgcaagtgtgcgccaccatccctggctgattttttaactttttgtagagacggggttttgccatgctgcccaggctggaactcccaggctcaagtgatccacttgccttagcctcccaaagtgccgcgactgcaggggtgagccaccatgcccagtcttctccctatttttaattgcatgttaaccctatcatatttcattagaagtcccttagaataggcattattgctatgttgtgatacatctgttcatgaaaagcttaatactttggaattgcactacagttaacagggttgtgaagaaaataatggtaggtagttgctcaaaacctgtgcaactttgtaatcagtactgtcaaatagtaatcctaataaaattattaccacagttcaaaagacattttaagctaatattaaaagaaacactacaggctgggcacggtggctcacgcctgtaatcccaacactttgggaggccaaggcaggcagatcacaaggtcaggagatcgagaccacggtgaaacctcgtctctactaaaaatacaaaaaattagccgggcacagtggcgggcgcctgtagtcccagctacttgggaggctgaggcaggagaatggcgtgaacccgggaggcagagcttgcagtgagtggagatcgctccactgcagtccagcctgggtgacagagtgagactccatctcaaaaaaaaaaaaaaaaaagggagaaagaaacactataggccaggcgcagtggctcacgcctgtaatacatcccagcactttgcgaggctgaggcaggtgaatcatgaggtcaggagatcgagaccatcctggttaacacagtgaaaccccgtctctactaaaaatacaaaaaaattagccaggcatggtggcgggcgcctgtagtcccagctactcgggaggctgaggcaggagaatggcgtgaacccgggaggtggagcttgcagtgagtggagattgctccactgcactccagcctgggtgacagagtaagactccgtctcaaaacaaaacaaaaaagaaacactacaatttaaaaaggtctattttaaaattaaaaggtgggcatagattgaaagggttgaagctgctaagctagagttaagagcaaaaatgcacaaaggttagggagagctttgtaataagcatttctaagagagaacaaatagtgaaactgagtcaaaaatccaaacctgggtaaatctgcattgtgtatagcagtggttccctatcaagggcaatcagatgtccccccagtaggcatttgtctatgtccatagacatttttggttgtcacaattggaggtgggttggggtctgccatgagtatctggtggataaaagttagggatactgctaaaggtcctataatgcacagggcagcctgtacaacaaggaattaggcccaaaatattaattgtgctgagatgaaaaaacatttttatacagacaatattgttactccacagctttctgttttcagatgttaagagtcctgcaaagttcctaactggtagtataaagcttaatatgtgctattaaaaattgcatgaaccaatatggctttttttttttttttttttttgaggcggagtcttgctttgttgcccaggctggagtacagtggcacgtgatctcggctcactgcaacctctgcctccccggttcaagcgattctcctgcctcagcctccagagtagctgagattcaggcgtgccccaccatgcctggctaatttttatatttttagtagagacagggtttcgccatgttggccaggttggtctcgaactcctaacaggtgatctgcccacctcggcctcccaaagtgctaggattacaagcgtgagccaccacgcccagtccaatatgacttttgtattacacagcttatcctatttgtcattcatacataaactcattcatgttacagaaataaaggtcgtagcagcacatatagtttttttttttaatgtgtattttctgttctcgtatggtgcatttctacttagctgatttttcttcttagaaaaaccaattacagctctgactacaggctgatttgagtaaaaacaaaaacaaaaaaaaactttaaggtgttaatttaaatgcttttcctagatgctatcttgctaatttattttcccctttcttcccagcctgtctcgatatagattgaagtttagcgctgataaagtagacacaatgattgttcaggcaatttgtaagtatagtacatgcaaagtccgatttgttgctctgtccttcatgcgttttcatactgttgaaactatcttttatgattctgtctgttgagaaagagaaaggaggccaggtgtggtggctcaagcctttaatcccagcacttgggaggctgaggcaggcggatcacctgaggtcaggagttcaagaccagcttggccaacatgacaaaactctgtctttactaaaaatacaaaaaaaattaaatgtgcatggtggcgtgtacctataatcccagctactcaggaggctgaggcaggataattgcttgaacccaggaggcggaggttgactatttggagattatatgaatcacagaattaacattacgttaattaattcatttgtatttttccatgaaaatgttaaaaacataagtgcaatctttgtagttgtgtattctgctgtgtcattaaatggtttttagaaagctcaaaagctgccaggcacagtggctcatgcctgtaatcccagcactttgagaggctgaggcgggaggatcacctgaggtcgggaatttgagaccagcctgaccaacatggagaaatcccgtctctactaaaaatacaaaattaaccaggcatggtggtgcatgcctgtaatctcagctactcgggaggctgaggcaggagaatcacttgaaccctggaggcagaggttgtagtgagttgatcgtgccattgcactccagcctgggcaacaagagcaaatctccatctcactaaaaaaaaaaaaaaaaaatcaaaatcttaatcgtttttctattttagaaatgcattcggccgtggctcacgcctgtaatcccaacactttgggaggcagaggctggtggatcacctgaggtcaggagttcgagatcaggccaacatggtgaaacccgatctttagtaaaaaataaaaaaattatctgagcatgatggtaggcgcctgtaatctcagctattcaggaggctgaggcaggagaatcacttgaacctgagaggcggaggttgcagtgggccgagatcgcaccatttcactctagcttggacaacatgagcaacactccgtctcaaaaaaaaaaacaaagtattcggctgggcgcagtggctcacacctgtaatcctagcacattgggaggccaaggcgggtgaattgcctgagctcgggagtttgagagcagcctggctaacatggcgaaaccctgtctttactaaaaatacaaaaaagtagccagtcgaggtggcgtgtgcctatagtcccagccacttaggaggctgaggaaggagaatcacttgaacccaggaagcagaggttgcagtgagctgagatcgcaccactgcactccatcctgggtgatggagttagactctgtctccaaaaaaagaaaaaaaaaagcgctcaaccagcgattcctttcctagatttatacccaaaagaattaaaaacagaactgagttgcttgtacacctatgttcataacagtgttatttacaaaaccaaacagtggaaacaacccagataccttttaacagatgaatggataaactgcattgtggatgcagcttgaatgtccctaatctgaaattcaaaatgctctgaaatctaaaactttttgtggtaccacacaaatccacaagtggaaaactccacacctgaccacacgtcaaaactttgttttatgcacaaaattatttaaaatattgtgtaaaattaccttcaaggttttgtatataaggtatatgtgaaatgtagatgcatttcctatttagacttcgagttccatcctcagcctcatacgtgtttgcaaatactctgaaatacttctggtcccaagcattttgggtaacgtacacccagccacttcacacagtggaatgttagtcagccttaaaaagaaatgaaattctgatacatatttcaacatgataaaccttgaaaatatgctaagtgaaatagtcacaaaatactgcatgattctgcttatatgaagtacctaaaataggtgaactcagagacagaagtataaagataactagaggttggggggaaggtgggaatgagttactgtttaatgggtacagaatttttcagtttctgatgataaaattgctctggcaatagatcctggtaatggttgcataacatcataagaatacttaatgctactgaatagtacacttgaaaatggttgaagtgttattttttattcttttttttttaaattttttgcgacggaatcttgctctgtcacccaggctggaatgcagtagcacgatctcggctcactacaacctccacctcctgtgttcaagtgattcttctgcctcagccctccagagtagctgggactacaggtgtgcaccaccatgcctggctaatttttgtatttttaatagagatggggtttcaccatgttggccaggctggtcttgaacttctgacttcgtgatatgcctgtctgctgggattacagacatgagccaccgtgcccagcctgaagtgttaaattttatgttgtgtatgttttaccacaataaatccctttaagttttgtttgtttgtttttaatctactacagccttgttagatgacttggataaagaactaaacaactacattatgcgatgtagagaatggtatggctggcatttccctgaattaggaaaaattatttcagataatttaacatactgcaagtgtttacagaaagttggtgagtaatttgttcatcctttaaggcattgaaagtaaatgaatttgattgcatcctaaaacatgacgtatagcattttgttaagcaagattcccagggtttttgcaatttctgtgtatttgggaagtgtagcagtttagtgtcttaaatttaagaaacaaaatgaattttaacttagattttgatggcctataacatgatattagtacctaatgctaaatagcagtattgccgtctgtactgttaatatacagaggaacttgattgttgattgtcgttaacgtacagaggaacttgattgattgatggtttacttgccttacgaattactggccccagcttcagtataaaattgtctgtgacattattattagtcctgtcttttttaaatttttgccacttatattctgtaataagtgttgtggcatattttgtcctctttttactctgattattttttggaagaaggtggtggggagacatttaatgtctaaacttaaacccttaaatgaggaaaactgttatactaggtcaaacttcttcattttttttgttttgtttaggcatccttttcattggctttctactttttcttttgactatttgctggattttatataatttgttgaagagtgattctccctcatcctctgcaaacattccataggcgataggaagaactatgcctctgccaagctttctgagttgctgccagaagaagttgaagcagaagtgaaagcagctgcagagatatcaatgggaacagaggtttcagaagaagatatttgcaatattctgcatctttgcacccaggtaaattttactcctggagaatctagttgtggtgttaccagctctatagtactaatttttctgatggcaatgatgatttttacacttattgttgttcacctgataacataaatatgagggtgttcagtcactacctcatctgatgccatcatgatttgtatacttaaaagggggaaatacatattaaaaggaagtaatttacaatcatcgtctgaataatgaattaaccaaaaatcaattaagatggcagagaaggccaggcgcgttggctcacgcctgtaatccccgcactttggaaggccgagtcagggattgacctgaggtcaggagttcgagaccagcctgaccaatatgatgaaacccccatctctactaaaaatgcaaaaattagctgcgcgtggtggcgtacacctgtaatcccagctactcgggaggctgagacaggagaatcgcttgaaccagggagggggaggttgcagtgagccgagatggcaccattgcatccagcctgggcaacaagagcaaaactccatctcaaaaaaaaaaaaaaaaaaaaaaaggatggcagacaattatggattgagccttttaattctgagtcttatgtctatatcttgtgatttttttttctttcagatttgaaggtagccatataggaattaaaaagagcatgatacaaatgtttattgctcagaatcttttttttttttttttttttttttttttttttttttgagacagagtctcaccctgtagcccaggctggagtgcagtggcacgttctcaggctcactgctacctctgcctcccaggtcccagttcaagcggttctcctgcctcagcctcccgagtagctgggattacaagcacgtgccaccatgcccagctaatttttgtatttttcatagagacggggtttcaccatgttggccaggatggtcttgaactcctgacctcatgatccacctgcctcgacctcccaaagtgctggaattacaggtgtgagtcactgtgcctgggctgcttagaatcttttaaaaatacagttacgctgactaagattttcaggcagtggaccaagtagtttacatacattatataacgaagtcctcattacagccatcttatagaaaactgatgttaggatcatgaggtcaagagatagagaccatactggccaacatggtgaaaccctgtctctactaaaaatacaaaaaattagctgggcgtggtggcgggcccctgtagtcccagctactccagaggctgaggcaggagaatcacttgagcccgggaggcggagattgctgtgagctgagattgcgccactgcgctccagcctgggaaaaaaaaaaaagaaaactgatgttaggcataggtgatgtacccagtacccagggttgtgtagctgctctttcataattgagggctccagtgttttagacaggaatttttactgtttttactcatatgatatttgtgacttaactttattccttatactaggtgattgaaatctctgaatatcgaacccagctctatgaatatctacaaaatcgaatgatggccattgcacccaatgttacagtcatggttggggaattagttggagcacggcttattgctcatgcaggtgatggttttaatgtaatttgtaaatatgagtgtttgaagtattttctggttaggattttgtttacatctttaaactacagctgttaaagaaattttagctgataacacaaaagtagatgatatgtgggagatcactaagggccaagtgttcaatgatgatttctatttgtttgcctgatttccttttggataatgaaggcatctttagtcactacctcttctgagacacttgtggtccattgttagaagtttgttagggttaattagaacaatcggatgaatgcaggaggataaaacagttaacattttcataataaaaactcactagacctagatttgaatacagttttaagaaatcactgtagagaaagaaaaaaaaaagaaatcactgtagaggatttgtgcccttgattgattaccttagtttcactattgagtgtgaggatgtaatatatttgactttcaaaaatattttcaacaactgatttataataaaactttgtatatgtgtatggcagtattataaggatgatatgctataattaaaatgctatgtaattgaatacctacaaatacaatgaagtactgattcatcatttttatgttacttggagacattgttataattcatcaaaaaagattatatcatctgcatcagagtgtttaaaatggcataactcctttttttttgtttgagacagagtttcactctgttgcactggctggagtgcagtggctcactgcaacctctgcctcccaggttcaagcaattctcctgcctcaggctcccaagttgctgggattacaggcatgtgctgccaccatgcctggctaatttttatatttttagttgagacagggtttttgccatgttggccaggctggtctcaaactcctgacctcaggtgatctgcgcacctcagcctcccaaagtgttgggattacaggcgtgagccactgcgcccggcctggcgtaactcctttagctgcatcattaatcaaaggtttcattcaaatgccctcagctataagatcagatgatttcattgtctctacccattttcataggtatagctaaacttgtagcagtaagcaatggcaggggttaatagaagtatgtatttgttggccaggcgtggtggctcacgcctgtaatcccagcactttgagaagctgaggtgggtgggtcacctgaggtcaggagttcgagaccagcctggccaacatggtaaataaaaccccatctctattaacaacacaaaaattacccaaccttggtggcatgagcctgtaatcccagctactcgggatgctgaggcaggagaattgcttgaacccgggaggtggaggttgcagtgagccaagattgtgacattgcacacagcagtggtgacattgcttgcctgggtgacaagagtgaaactccatctcaaaaaaaaaaaaaaaaaaagaactatgtatttgttacacttttaaaactatgtctagtgcttaagttcatagtattaatagagtctgttttctgacaggaaatattctatacagcatatccaactaagcagcatgttgataacaatagtccccagctatttatggagatgtattctaagctcccccctccaagaatgtttgaaacagaggatagtactgaatcctatactgtatatgctgttttttcctaaacatacatatctataataaagcttagcttataaattaggtacagtaggatatcaacaacagtcataatataacagttataacactatgccagcagggccgggtgtggtggcttacgcctgtaatcccagcactttgggaagctgaggagggtggatcacgaggtcaggagttcaagatcagcctggccaagatggtgaaaccccatctctactaaaaatacaaaaaaaaattagctgggtgtagtggtgggtgcctgtaatcccagctactcggaggctgaggcagagaattgcttaaacccgggaggcggaggatgcagtgagccaagatcgcgccactgcactccagcctgcgcaacagagcgaaactctatctcaaaaaaaaaaaaaaatgcaagcataactatttttgtgcattggttacttgaatataagcactgcagtactgcacaacggagagggctacgaaagtgactaatgggtagatagagatgattcatgtcctggggggagctgagtgggatagcaagagatttaaaacttaggaactatttatttctggaatttcctttttaatattttcagactgcagttaaccacaggtaatttaccacacaaagtgaaagcacaggtaggggactattaatagatacttgtaggaatatctcttcctaataaatgtgtttatttgtaggctttttcatatctaaagcaatagaatatttgatacaatctcagaaagcagggaccagattagtgttcgtgtgtgtgacatttatgtcactcctgtagtatactaatggaatttagaatagtactgccatctctcaggtgaatagaaacattgaacttaataagcttagccttcagtttgtcctaggcattcattgcaaacctgcttgtgctaatgaaggaattacaaatgaaacatcaagatttttagggaattctggattatagaattctatattatatgtgatttttatttattatggtggctgtaataattctataggtcttttgtttcagtacgtggaacattcatatatttggaggtgcattctttgtaacttttttcttttgtaggttctcttttaaatttggccaagcatgcagcttctaccgttcagattcttggagctgaaaaggcacttttcagagccctcaaatctagacgggatacccctaagtatggtctcatttatcatgcttcactcgtgggccagacaagtcccaaacacaaaggaaaggtgtgttatagggttttgctttgtttttgaggttagactttttcattttttacaacccatttttcttctactctgtagtacacattaaatcttctattgtctctttcttgttaaatagggaatggtgagttatttaaataaaaagtgctttgtgtacactgaaggataaggttagaagaaactgttattggttggattaaagccagtttcttccattgtgttagtatttttttcccccctagaatctccctgtggttggcacactgaaaatactatctctggcagcaaaaaaaaaatctaacatttacgaatcataaaaaatagcatatgcattatgctaaaacactttgagagaagtcactaaactttttttttttgagatggagtcccgctctgtcgccaggctagagtgcagtggcttgatctcggctcactgcaacctccagctccctggttcaaacgattctcctgcctccctgcctcagccttctgagtagctgggattacatgcacgtgccaccacgcccggctaatttttgtattttaagtaaagaccagtttcaccatgttggccaggctggtctcaaactcctgacctcctgatccacccacctcggcttcccagagtgctgggattacaggtgtgagcacctgtgcctgtcctaaatcttcagtagccttatgagatgtaggtatctctatcttgcagatgatgaaactgaggcttagacaagttaagtactttcaatgtttttgaaagatgtgtcgtttaacagatctaaactgaaaattgataaaatttagagcagagtggtggaggaaaataaagcgttcaataaaataaaatgttaattagattgaaaaagaacccacgcttttttttgtttgtttgtttgtttgtttgtttgttttttgagatggagtctcactctgtcgcccagactggagtgcagtggtgccatcccggctcactgcaagctctgcctcccaggttcacgccattctcctgcctcagcctccagtgtagctgggactacaggcgcccggcaccacacctggctaattttttgtatttttagtagagacagggtttcaccgtgttagccaggatggtctcgatctcctgacctcgtgatccactcgcctcggcctcccaaagtgctgggattacaggcgtgagccaccgcgctcggccagaacccgcacatatttaagattgttacgaggaaaaagatgcacttcttttcagtgacctcatagcacagaactaatgtcactgagtagaaactaaagtttaaaaatattttttaaaaaaacctagtttgagctaatatttgacatgaattgctgtaaaatcttttcagccacagaagtgttggtggtgatatatggccattagattgtggcaaaggttgaaatacgatggatgatttgaattgtatgattcataatagttttataactcctgattttaaaacatccaagttattgaggattttacatctgaacatggaatatagttcttcatgtttttctattagatttctcgaatgctggcagccaaaaccgttttggctatccgttatgatgcttttggtgaggattcaagttctgcaatgggagttgagaacagagccaaattagaggccaggttgagaactttggaagacagaggggtaagaactacatcatgcctattccagaagtattacttgtcaaaagttaataaactgagtaaatttattaacttcatctgctaaacagttttatgatacttattagtatgtctaaagtattctttttgtgcctactgttaacaattgctattatttaccaagaattgatgtatccaactgcatttgccattaggatatgctattcaaaataacaaaacaaaaaatagcagaaattgctgtttgctggcccactgattcactagactgtatagtgtattataaagagattatgacttagaagtgtatttgtaatttttcgttttcttcttagataagaaaaataagtggaacaggaaaagcattagcaaaaacagaaaaatatgaacacaaaaggtgagtacatttaagtgaggatggggtgaatagtttttttaaatgttaattattgacagtaattttttattgtaaacttcaccttgatgtgcccatagttttttcaaatttatttatttgaccaaaattgtgtatgtttattgtgtgtatgttgttttggaaaatgtgcacattgaggaatgattaagtcaagctcattaacatgcattgtcttatgtactttttttgtggtgaggacaccttaaaatctacttagcaattttcaagaatataatacattgttagctgtagttaaccatgttgtgcacccctaatttttttccatgccatttagttttccgcattaacttctactagttttcattcatatacatatttaatttattcatttccagatattgatagtaaatttttttaatctaaagttcctctataatatgttctttatcaaaaagttcactcagccgggcacagtggctcatgcctgtaatcccagcactttgggaggctgaggcaggcagatcacctgaggtcaggagttcaacacaggcctggccaacatggtgaaaccccatctctactaaaaatacaaaaaattaactgggtgtggtggcgggcacctggctgaggcaggagaattgcttgaaacccgggaggcggagggtgcagtgagctgagatcgcgcccctgcactccagcctgggcaacaagagcaaaactccgtctcaaaaaaagttcattcagagttaatccctacagaaacctattttgtaaaaagtataaagacagaaaacaagtctaaagatggctgaggcatgacaaagcattcaaacttaactatcagattaacaaaagatttgtatgtggaggggtatttgggttattatttgaggcaatgctcaatgctggtgaggttgtgatgatgcaggtagaatgtggcacagctgttctaggaagccatttcacagtatgtatcaagattcttcaaaatgttcctagtcattaacccaataaattatactttcaggagtcataatccttcaagattttttttttttttttttttttttttttgagacagtctgtctctgttgccaggctggagtgcagtggcacgattgcggctcactgcaacctctgactccccggttcaagttatgctcctgcctcagcctcccgagtagctaggattacaggcatacaccaccacatccagctaatttttgtatttttagtagagtcggggtttcatcatgttggccaggatggtcttgatctcctgacctcgtgatccgcccgccttggcctcccaaagtgctgggattacaggcgtgagccacagcacccggcctccttcaagaattttaatagtaaaatcttataagtggatgaggagagtaattaatatatagaacattaccaattataaatacatatttaagtataatttagtgttttctggaaagaaatcaaatgtgtttctgtgggcattcacattttcttttttgtgaattttccaagctttctacaatagccatacattctgcaatatttatagtctataacttattatctctagttgacaaacatggttctttgtttcttaaattataaatgtctttaacctaaaaaaattaaatagtcattcagcttacaggtctgcttaaaaaacagaacattttttagcttgttttgaaccaatttttttaatgttcctgtgcaattagtactttttactttaaacatatgcacttaaagcatccattcacattttaggcactcatttcagtattttctttctgcttacattagaacaaaagcaaatgttgggttctatggaatcttttccatgtgcatgtatttgtatcctttcttgttcttgtgatcttgtgatgaagacttctatactaagcttggtttagattttttgttctgcttttttttttttttttttcccccattgagcagtgttctgaaagttggatggttcagttttcactttctagttaggtgtgaagacgttttctcctttcatttcccccatgctgattgagtgttttcctgtaccatagtaactacattgattactaaatcagaattcatttagctcaccacatctcttgaatgtgattgacctacttgaaaaatattaatacctttaacttttggaaactattagtcttcataaactaccccaaagccactaaaatgaaacaacattgtgtgcttatgtaagtattatctaatggcattttctttatctcttgagaattatttcaattccagatacttgttagagattttctaaaactttttgggtctttcagtgaagtgaagacttacgatccttctggtgactccacacttccaacctgttctaaaaaacgcaaaatagaacaggtagataaagaggatgaaattactgaaaagaaagccaaaaaagccaagattaaagttaaaggttagtttgaattttttttttaacacaacttatactcacttctttagaactgtggattttgtgagtcttaaaagtacatgccatcccactttattataaaactgctcattgaacgctaatggtgttttaataatgccattatgttctctgggaatatgatattgttaaatttatcagactgcacagaggaaatgtgagaagtttagtcaaattaggtattttactaagagttccaaaacttcatttctcctacatgaactatttggagaattaagagaaaaaaggaacgtgttttctaaattggttgttgaaaattttttgttttatagttaagaatgaatacagaattgatggaacagtgattttcttcattgtttctcttacacggagcggactggaaggaatacatactggtagcctgccgtcatagttacaatatctaacaggtgctcaccagttaactaggctgtcttgtgaagttgataagcaggcgccccattattagttacacctgggtttattgaacacctactagcaagtctagcagaagagtaaagcattaacacaatgattgctttaacttggtttctaagtagcttagtggtcaaaagtatatgatctacaaatgtggatagtatacttgatagagaaaacaaacaatttatttaacttttatgcttctttttattgaaaagtaaggagatccctaaacccactagtagcatttgaggcaccaaactctgtcctttgtatcctcaattgtgtatccaataagcttttccaatttatttgtcaatttttcatcccacaatttcccccctctttttttacccccaagacagaatcttgctctgtcacccatgctggagtgcagtggcatgatcttggctcactgcaacctccacctcccaggttcaagcaattttcctgcctcagcctcttgagtagctgtgattacaggcacgcaccaccacgcccagctaatttttttatttttagtagagacagggtttcaccatgttggccagcctggtctcaaactcctgaccttgtgatccacccactccggcctcccaaactgctgggattacaggcatgagccaccacgcccagtcctctcccattttctatatgtgacaattccagttgctttggccatcaaccttgacttttttctcataactcaatctagtctgacagcaaatcctctcagttccacttgaaagtatgtagtagccacagtggaaccaccactagctttttaaatctaaatttgttccagccatactggcctgcttgctatttcctgaacctactatccatccacttatcccatctgccctccaaaacgccttacgacttaagcatctgctctactctacctggactattttccctcaagatacatgtatcattcattcactccctcacctcttctaggtgtttgccgaccattctgcctaaaatggccatatatactgcccttttccaacattccccttcctgctttatttttattcttaccactttaatatctattatgtaatgtatcatttatgtctccactctgccactaaaataaaaaagattcatagggaaacgaatatttttgcctcttgtgccttgctcgaattgtttagtacagagtctgacatgaatattatttggttgctgaattgctgaatttctctctcttttctttttcttttttttttcttttttttttttttttttttttgagacagagtctccctctgtcgcccaggctgaagtgcagtggcgtgatcttggctgactgcagcctccgcctcctgggttcaagcaattctcgtgcttcagcctcctgaataactgggattacaggcatgcaccaccatgcctagctaacttttttgtatttttattagatacaggatttcaccatgttggccaggctggtcttgatatcctgacctcaagtgatcctcccgcctcagcctcccaaagtgctgagattacaggcgtgagccactgcacccagctggtcactgaatgtctaatgatagctatgtgttgagtccttattgtaatgtgtgctaagcattatacttagtgctttctatgcatcatctttttaaatcagtaacagtccagtaagataagacattcttaagttttatagatagggagcttcaccaagggtaaatacaatttttcagggttgcagcaggtagattaaacccaggccgtctgacttcagagtgcaagctcttaaccatttctaatataattgactttcttcccaataatgattggagatcagatgacctttgttttaatcctgatttttatacatgacttcatgatcgtgagaagattgctctgagctctatctatatcattcgttaaagttagtggtaggccttggagaaccttcccaattataaaataaacaaaacaaacattgggtagttgatgagaatgacagaaaaaaactaggactcaaacgtttttggaaggaatgagatctgatacagtgttaatttgttgtgcctttacacttaccctattcagttgaagaagaggaagaagaaaaagtggcagaagaagaagaaacatctgtgaagaagaagaagaaaaggggtaaaaagaaacacattaaggaagaaccactttctgaggaagaaccatgtaccagcacagcaattgctgtatgtttgtttttaattatcggttttcacttggaggggccagttctctatatttcaatctattttctatatcagaaatgagcaggcattttaaaaaatggttttcattgatggagaggtaaaagtgaaatggctttgttgtatttatattataaaaggccatttcccaaatctagaatttattactaaaaatcaagtttgcattgaggggaggagtatgatttgctcaagcttactttttttataggtggggtttttatattttcaatgtgattactcacccatacaatttcagctctttcaaagcattcttgttggctattttcagagtccagagaaaaagaagaaaaagaaaaaaaagagagagaacgaggattaacagaaaggaattacgattatatcacccggacacacatcatgcttaagattcaactgggagcataccagggatgctctctaacgtaatcaagggaaggttcagtaagacaaagtgatttatcatctataacttcaaacctatttgtcttgacatcaactctgttaaccttatgtcatcatttcttagagtctttgatatacaaataaaattttctttgtattttaa

SEQ ID NO: 15697 - DNA, 82732 bp, Homo sapiens
gatggcgtcaccttctggcgccgccggttggtttccctggcaactggagcaatcagagcaccgcagccagggagatgctggcgagacgacagcgagatcctctccaggccctgcggcgccgcaatcaggagctgaagcaacaggtatggtcaggctgtgcagagggccctggggcgggcgacaggcggacgcagctgcgcgcactgcgccttcccaccgtgaccccacctaatcctgggagcttgcccccaacctacttaccttcccaggttgtaacgcccccttaccccataacattccagcacccaaccccgattcaaacccctcctgatcccaactcaacccccagccaaaggcgaaacctcccaaaattcgtgaccatcaactaagcgccccctcctccgaccctcactcccacctaacgtctcaacctcctaccctaacaactcactaacccaccttatctcccaatctaaacttagtggtgtaaccatttccaacccaactctgagcctagctcctctcctccactttccaagcccatttcctttcagccttcctcaagtggagattattattgcctccgtgaactcaagcgaaataggtgtcaagaaatagtcttaatatgcaagaacattaagatctgataaatgagcaaaggaggtgaacgagagaggaaatacaagtaactcataaacatacgaggaatgttaacttcaaagatactcaagtaattgcaaagcacataaggtatcacaaaaatgttaaaaatcacaacactctgtcttgaggaaggtgtgatgaagcaggcacattcactgctcccgtgtataaggtgcttgtacagcatttcaggaaagcagcttgacaaggtgtaacatatgtgtatgcacctaggctcaaaaattacatttccagggatctgctatgtgtaataattagaaagtaggacagagattgatgtataaaagtattcatcacattgttacttatataatatacacagaacagcatagaagggaacaggctaatatggtatttctgtgtgacaggatgctgatgattattatgattttctttattctttttcatatttataaaaatttttaggccaggtgtggtggctcatgctagtagtaccagctacttgggaggctgagacaggaggatcacctgagcccaggagttcgagactagcctgggcaacataacaagacttggtctcaaaaaaaaaaaaactttttaaaaatacactgagttcttattaaaaataagaaaaaagtaaatagcaaccagtgggtttattttctgacattttaatttcactttaatttttttcatgtgatctattaccaagtatttttccactgagtaaaattattttataatctgaggccggtaagagattcactgatgctcatattttatccatttttgttctcttgtttaaagtaaaaaggatttggaaggtaaatatttaggtgactgtgtattggaatcacagtggtgcaacaaaagctaaatactcttctggtagaaataaaaaataaaacttgatggggcattgacttatgctgaacttcggtggatcttaatatggttctgtgtcttattttaaaatttcaacttttattttagattcagggggtacatgtgcaggtctgtcacatgggaacactgtgttatgctgaggtttggggtacagatgagcctatcacacaagcagtgagcacagtacccaataggcagtctttcagtcttcattcctcttccctcccccaccccactccagcagtcaccagtgtccattgctcccatctttatgtccatgtgtactcaacgagtgagaacatatggtatttggttttctgttcctatgctaattcacttaggacaatggcctccagctccatccatgttgctgcaaaggacatgatttcattcttttttatggttgcatattttttcatggtgtatatgtaccacattttctttatccagtccaccattggtgggcatctatgttgattccatgtctttgctattgtgaatagtgctgtagggaacatacacatgcatgtgacattttggtagaatcatttcttttttgggggtatatacacggaaatgggatttctgggtcaaatgatagttctgttttacgttgtttgggaaatctccaaactgctttccacagtggctgaactaattttcatgcccaccaacagtgtatatgtgtactcttttcttgtcagcctcaccagaatctgtcatttcttgattttttaataatagccattttgaccagtgtgagatggtacctcattgtagttttaatttgcatttctctgatgattagtcatgatgagttaattttaaatttagtgggacattaggagaaccaggaaaagttttagaaggaaactataaaaatgattattaaaacaaactattagaaagattattctccctggagaaatattggctctggagccttttgataccttgactatctggaaagtttgttttgatagtattagctaattcttccctgtcttcacagaggacacctgaagctgaatatggaacagattttctattcggtgtctgtaggacaagtaatcaacagcccctctgagtcaggcctgtgatgactggctctatcactaggtgtgtgaattttgtaaataacactcagatggatgccaaattgcaagagtagagaagaaactaatggaattttctcttttttcatccactttatcttctctacgtaatctatagaaaacagaccaaagaagtatgtgcctttttggagagtatattgacaaagttacatatagtgttagtaaacaaactactaagtcaagagaaacaaagtcatgatacattcaatacaatggataccactcagtaatgagaaggaatgaactaatggtacacacaacaatatggaagtatctcaaaaacatgctttgtggaaaggttacacaagagtgcttactgtatgagtccatttatataaaatttcaagaacaggcaaaactaatttatgttggaaaaatatcaaaacaggtttgtctgtggaggaataaggaggggatttactggcaagggcatgagggaacttactagggtgatggtagttttctacatcttgataagaattttggttacacagatgtatgcatttgtcgaaactcagcaaatgtatgcctcgtatttgtgcatttcactatatacatattttacatcaactattgaactttagttagtgacatccatagtccattatttagggagaaatgtattgataactgcaacttactttgaaaggcataaggtgggttgacggatagatcaaataagtatagtataatgttaatgttttttctaggtagcgggtatatgggttttcactgtaaaatttttaaaactttgttgtatgtttaaaagtgttcattataaaatattggataaaaaaagaagttttctttcctaaggcgatatggtatttaataatgtgatattttaaatggtctccataggttgatagtttgctttctgagagccaactgaaagaagctctagaacccaataaaagacaacatatttatcaaaggtaaagtatgctaaattatataagctttacaggaaccgcacttacatttcaatgcatagtatttaaggcatagagattggtcctttggaatcaaatggaagaatcacatagtgttgtaagttgaatgtagaagaaaccaacctaaacctgatggttgcggacttgctgttgtgacagcaactataaaaactgcttaatgtaaacataggtgacatgggcaggattaccctaaatccttagcctatgtagcccagatcctgtgacctggtcagaaacctctgtctataagcaattagtacttcattgggatgtcaactttaactcccatgagaagacaacactgttttctaggtgggtgttttttgttttgtatttgtttttacttaaaaaaaaatccttgggagagtttaaatagacgtgatgaactacatcaaatttagactattaattcataacatttgtattaagtttaggacatcattaagataatctttgtttttgagatatttaaggattttattacattccaaagaacatgagattcattctattaatttaagtgaattgtaattgtttggagaagttttacttaagtcaggcattcagagtgcttaaaggcaaaacaaatgaattttgaaatgtcaaatgaatttaatttataatagtaggattgattaagggatttagttcaagctgaattaacagtaatgaaagaaaagcaaaggttattgttcttgctttactagatttaaaaacagagtaagatttatagactgaatttgaaggccaagggaaaactacgtttttaaattttatgttagtaaactaaaaatcataattattattattttattttttgagactaaatctcactctgtcacccaggctggagtgcagtggcgcaatctcggctcattgcaacctgcacctcccaggttcaagcgattcttctgcctcaggctcttgagtagttgggattacagtcgtgccccaccacacctggctggattttgtattttgagtagagatgggtttcatcacgttggccaggctggtttcgaactcctgacctcaagggatcccccagccttggcctcccaaagtgctgggattataggtgtgagccactgtgcccagcctaataattgttatgttttattttttttgagatagagtctctctctgtcgcccaggctggagtgcagtggcatgatctcggctcactgcaagctccacctcccaggttcaagcgattctcctgcctcagcctcccgagtagctgggattacaggtgcccgccaccatgcctggctaattttttgtatttttagtagagatggggtttcaccgtgctagccaggatggtctcaatctcctgacctcatgccccctgctttggcctcccaaagtgctgggattataggcgtgagccaccgcgcccggcccctaataattatttttaagcccaagtaaccatagtcttctctgtgcatgaaaagaagattgttactgtcatttaaaaactcactttgacatttgcatatctgaaaatgtcatttaggtatcatttttatctgctcagtgctctgagtcttttcagtttgaaaactcatgtctcatgagctctgggagattttattttacaaaaagattatttcgttaattccatttgtctgtttcttcctgaaacacctttgagtcaggtattggatatcctggactgatcctctatatcccataacttcctgttaatagtttctgtttctttgtttgtatgggagatgtttttttggggggatgtggggggtctcactctgtcgttcaggctgtaatgaagtggcacaatcatggctcactgcaccttctgcctcccaggctcaagggatgcccccctcccccgccacgagctaccatgctagcaattctcttgactttaacacttttctttattacctatttcaacagccatattgttttatttcagcagtcatattggtttttttttttttaagatggagtctcactctgtcatgatcttggctcactgcaacctctgcctcctgggttcaagcgattctcctgccttagccttctgagtagctgggattacaggctcacgccatcacactcggctaattttttgtatttttagtagagacggagtttcaccatgttggccaggctgctctcaaactcccgacttcaggtgatccacccatcatggcctcccaaagtgctgggattacgtgagccaccgtgcctggccatcatcagtcatgttgttaatttacaagtgttttctcttgttctcgaattgttcttttttcatagcatcatgttcctgttttcatattgattgccttcttactacttccatgactaggaggctttttttttctccttaagttctcttctgttctctgaattgtctttgctttctctgggctcagattccttttaattagttaattaattaatttatatttggttattcttaaattttatcttcacgttgccggttttctttattaggtctggcttatctatttttattgaacaatgagggactaggttgattattccagagagctctcatgggcttttctactgttagatagagaggggtccttcctgctagtaccatcccctgaataagaatgaaattttgtatgttgatagggcttatcagaggctcggaagtagcttttagtctgaggatcccccagtgccagaatagggccggctctaaccctggtgtatgggaaacttctttagcagtcatgattctcttcaggtcgtttgttaattgtttttgtttgtttttttgtttttagggaagaatcccctggtaaggagggagagcagagaggggaaaagggagctaactggctcaggttttctgtaaatagacttttaaaagaaagaaccccaactaaatctaaacgtaatcagtatcattaatcttcccttgactaatataaagaccttagattgctttaacattgatttccctcctcaaagcttagatgtatgcatatgatttaatttacacaatataacacaataatattagataatttataaagtaaaccccagccactgtgcatgtcttttcatcagcagaatttcataatgtgtccctctatgatttagtttagttaacctttggtcctttatgtctgctgactcaagtcctagagttttcggcctggcagattatctccctcttatgcttgtgttgcgtcttccaccctttataggagaacatgcttccagcctttttccatggagcagaaatttgttgaaatctcttgctggctagttgtccttctttccttctttgcagtgttcagagtttgttaccttttcaaacgttttaatcattttttgtggggtttcaggagccagtgaagatgaatgtgtgcttagtttttatcctgaaccaggagtcttaaaatatcaactgtttgaggattttaataattacatagttataaaggaggtaattgtaataagtaatttattttcttggtacattatattaaaatagttttccactctgggctttaagcgaaatttctgagtctaagtttcagtagagatttttttggtcaagtaacatgacacctgccaaaataagcggctttactgtcagtctcatttgacaaaagcctgcagctaggttctctcagggtggattcatggcttgtgatatcctcaaagaccagcctttgatgtcattccactctgccatcctttgcttgttggtgatgtctctcctcatggttacaaagtccataccctcagtatctaagagcagatgtaggagagattcttttcatgcctggtaagggaggataaaatgggaggcaatcccaatatacgtgttttatgttacactggcagccgtgggccccctgctcaccctgcctgcagtggaggctgagaacataggtgccagtgggaagctgactgccagcaaagaggaagggtgggaaaggggcttttggggaggttgctagtagggtcagccccagtttgatgtttccccttctcttttgctacccttttgacaaaggacttttgttccctttaaaacgttttttatttattactgttttttatttttttctttaagttcagggatacatgtatggcattgtgcaggtttgttacataggtaaacgtgtgccatactggtttactggacagatcatcccatcacctaggtattaagccctgcatccattaattattcttcctgatgctctccctcctctaatacctccttcctacaggccccagtgtatgttgttaccctccttgtgtccatgtgttctcatcattcagctcccacttataagtgagaacatgcggagtttggttttctgttcctgcattagtttgctgaggataatgacttccaactgtaaccatgtccctccaaaggacatgattttgttcctttttatggctgcacagtattctatgagaacatgcagtgtttggttttctgtccttgtgataatttgctcagtatgatggtttccagcttcatccatgtcccttcaaaggacatgaactcatcattttttatggctgcatagtattccatggtgtatatgtgccacattttcttaatccagtctatcattgttggacatttgggttggttccaagtctttgctattgtgaatagtgccacaataaacatatgtgtgcatgggtctttatagcagcatgatttataatcctttgggtatatacccagtaatgggacagttgggtcaaatggtatttctagttctagattcctgaggaatcgccacactgacttccacaatggttgaactagtttacagtcccaccaacagtgtaaaagtttcctatttctccacatcctctccagcacttgttgtttcctgactttttaatgatcgccattctaactggtgtgagatggtatctcattgtggttttgatttgcatttccctgatggccagtgatgatgagcattttttcatgtgttttttggctgcataaatgtcttcttttgagaagtgtctgttcatatcctttgcccactttttgatggcgtcgtttgtttttttcttgtaaatttgtttgagttcattgtagattctgtatattagccctttgtcagatgagtagattgcaacaattttctcccattctgtaggttgcctgttcactctgatggtagtttcttttgctgtgcagaagctctttagtttaattagatcccatttgtcaattttggcttttgttgccattgcttttggtgttttagacatgacgtccttgcccatgcctatgtcctgaatggtaatgcctaggttttcttctagggtttttatggttttaggtccaacatttaagtctttaatccatcttgaattaatttttgtataaggtgtaaggaaggcatccagtttcaactttctacatatggctagccggttttcccagcaccatttattaaatagggaatcatttccccatttcttgtttttgtcaggtttgtcaaagatcagatagttgcagatatatggcattatttctgagggctctgttctattccataggtctatatctctgttttggtaccagtaccatgctgttttggttactgtagccttgtagtacagtttgaagttaggtagcgtgatgcctccagctttgttcttttggcttaggattgacttggtaatgtgggctcttttttggttccatatgaacttaaagtagttttttccaattctgtaaagaaagtcattggtagcttgatggggatggcattgaatctataaattaccttgggcagtatggtcattttcacgatattgatacttcctacccatgagcatggaatgttcttccatttgtttgtatcctcttttatttcattgagcagtggtttgtagttctccttgaagaggaccttcacatcccttgtaagttggatttctaggtattttattctctttgtagcaattgtgaatgggagttcagtcatgatttggctctctgtctgttattggtatataagaatgcttgtgatttttgcacattgactttgtatcctgagactttgctgaagttgcctatcagcttaaggagattataggctgagacgatggggttttctagatatacaatcatgtcatctgcaaacagggacaatttgacttcctcttttcctaattgaataccctttatttccttctcctgcctgattgccctggccagaacttccaacactatgttgaataggagtggtgagagagggcatccctgtcttgtgccagttttcaaagggaatgcttccagtttttgcccattcagtatgatattggctgtgggtttgtcttagatagctgttattattttgagatacgtcccatcaatacctaatttcttgagagtttttagcataaagggttgttaaattttgtcaaaggccttttctgcatctattgagataatcatgtggtttttgtcgttggttctgtttatatgctggattacgtttattgacttgcgtatgttgaaccagccttgcatcccagggatgaagcccacttgatcatggtggataggctttttgatgtgctgctggatttggtttgccagtattttattgaggatttttgcatcgaggttcatcagggatactggtctaaaattctctttttttgttgtgtctctgccaggctttggtatcaggatgatgctggcatcataaaatgagttagggaggattccctctttttctattgattggaatagtttcagaaggaatggtaccagctcctccttgtacctctggtagaatttggctgtgaatccatctggtcctggactttttttggttggtaagctattaattattgcctcaatttcagagcctgttattggtctattcagagattcagcttcttcctggtttagtcttgggagggtgtatttgtcgaggaatttatccatttcttctagattttctagtttatttgcatagaggtgtttatagtattctctgatggtagttggtatttctgtgggatcggtggtgatatcccctttatcattttttattgcatctatttgattcttctctcttttcttctttattagtcttgctagcggtttatcaattttgttgatcttttcaaaaaaccagctcctggattcattaattttttgaagggtttttttgtctctatctccttcagttctgctctgatcttagttatttcttgccttctgctagcttttgaatgtgtttgctcttggttctccagttcttttaattgtgatattagggtgtcaattttatttctttcctgctttctcttgtgggcatttagtgctataaatttccctctacacacagctttaaatgtgtcccagagattctggtatgttgtggctttgttctcgttggtttcaaagaacatctttatttctgccttcatttcgttatgtatccagtagtcattccggagcaggttgttcagtttccatgtggtttagtggttttgagtgagtttcttaatcctcagttctagtttgattgcactttggtctgagagacagtttgttataatttctgttcttttacatttgctgaggagtgctttacttccaactatgtggtcaattttggaataggtgtggtgtggtgctgagaataatgtatattctgttgatttgggttggagagttctgtagatgtctattaggtccacttggtgcagagctgagttcaattcctggatatcctcattaactttctgtcccgttgatctgtctaatgttgacagtggggtgttaaagtctcccattattattatgtgggagtctaagtctctttctaggtctctaaggacttgctttatgaatctgggtgctcctgtattgggtgcatatatatttaggatagttacctcttcttgttgaattgatccctttaccattatgtaatggccttctttgtctcttttgatctttgttggtttaaagtctgttttatcagagactaggattgcaacccctgcctttttttgttttccatttgcttggtagatcttcctccatccctttattttgagcctatgtgtgtctctgtacatgagatgggtttcctgaatacaacacactgatgggccttgactctttatccaattttccaatctgtgtcttttaattggagcatttagcccatttacatttaaggttaatattgtcatgtgtgaatttgatcctgtcattatgatgttagctggttattttgctcattagttgatgcagtttcttcctagcctcgatggtcttcacaatctggcatgtttttgcagtggctggtaccagttgttcctttccatgtttagtgcttccttcaggagctcttttagggcaggcctggtggtgacaaaatctctcagcatctgcttgtctgtaaaggattttatttctccttcacttatgaagcttagtttggctggatatgaaattcggggttgaaaattcttttctttaagaagttgaatattggccgccattctcttctggcttgtagagtttctgctgagaggtcagctgttagtctgatgggcttccctttgtgggtaacccgagctttctctctggctgcccttaacattttttccttcatttcaactttcgtgaatctgacaattatgtgtcttggagttgctcttctcgaggagtatctttgtggcgttttctgtatttcctgaatttgaatgttggcctgccttgctagattggggaagttctcctggataatatcttgcagagtgttttccaacttggttcaattctccccatcactttcaggtacaccaatcagatgtagatttgatcttttcacatagtcccatatttcttggaggctttgtttgtttctttttattcttttttctctaaacttctctgtttgctttatttcattcatttgatcttccatcactgataccctttcttccagttgatcgaatcagctactgaagcttgtgcattcgtcacgtagttcttgtgccatggttttcagctccatcaggtcctttaaggacttctctgcattggttattctagttagccattcgtctaatcttttttcaaggtttttaacttgttttccacgggttcgaacttcctcctttagctcggagaagtttgatcatctgaagccttcttctctcaactcatgaaagtcattctccgtccagctttgttctgttgctggtgaggagctgcaatcctttgaaggaggagaggcgctctgatttttagaattttcagtttttctgctctgttttttccccatctctgtggttttatctacctttggtctttgatgatggtgatgtacagatggggttttggtgtggatgtcctttctgtttgttagttttccttctaacagtcaggaccctcagctgcaggtctgttggagtttgccggaggtccactccagacgctgtttgcctgggtatcagcagcagaggctgcagaacagcgaatattggtgaacagcaaatgttgctgcctgatcattcctctggaagttttgtctcagaggagtacccggctgtatgaggtgtcagtctgcccctactggggggtgcctcccagttaggctacttgggggtcagggacccacttgaggaggcagtctgtccgttctcagatgtcaagctgcatgctgggagaaccactactgtcttccaagctgtcagacagggacatttaagtctgcagaggtttctgctgccttttgtttggctatgccctgtccccagaggtggactctaaagaggcaggcaggcctccttgagctgcggtgggctccacccagtttgagcttccaggctgctttgtttacctactcaagcctcggcaatggctaacaaacagcctcgctgctgccttgcagtttgatctcagactgctgtgctagcaattagcgaggctctctgggcgtaggaccctctgagccatgtgcgcgatgtaatctcctggtgtgccgtttgctaagactgtgggaaaagcgcagtattagggtgggggtgacccgattttccaggtgctgtctgtcatccctttccttggctaggaaagggaattcccttgtcccttgtgcttcccgggtgaggcaatgcctcgccctgcttcagctcatgctcggtgtgctgcacccactttcctgcacccactgtctgatagtccctagtgagatgaacccagtacctcagttggaaatgcagaaatcattcatcttctgcgtcactcactctgggagctgtagactggagttgttcgtatttggccatcttggaaccgccccaagtgttcctttttctctgcaattttgccaacatctgtttttttgactttttaataatcaccgttctgactggcatgagatggtacttcactgtgctgaatgtgtgtcttttgagaagtgtcacttcatgtccttttgctcactttttaatggggtttttttttcttataaatttgcttatttttagactctggatattagacattcatcagatggatagattgtaaacattttcccccattctgtaggttgtctgttcattctgatgatagtgagaggtgacagcatgctggcagtcctcacagccctcgctcactcttggcgcctcctctgcctgggctcccactttggcggcacttgaggagcccttcagcctgccgctgccctgtgggagcccctttctgggctggccaaggccggagccagctccctcagcttgcgaggaggtgtggagggagaggcgcgggtgggaaccgggcctgcacacggtgcttgtgggccagcgtgagttccgggtgggcgtgggctccgtggactctgcacttggagcggccagccagccagccccaccggccctgggcagtgaggggcttagcacctgggccagcagctgctgtgctcaatttctcacccggccttagctgccttcccgcggggcagggctcgggaccttcagcccgccatgcctgagcctccccgccctctgtgggctcctgtgcggcccgagcctccctgacaagtgccaccccctgctccacagtgcccagtcccatcgaccacccaagggctgaggagtgcgggcgcacggtgtgggactggcaggcagctccacctgcagccctggtgcgggatctgctgggtgaagccagctgggctcctgagtctggtggggatgtggagaacctttatgtctagctaagggattgtaaatacaccaatcagcactctgtatctagctcaaggtttgtaaacacaccaatcagccccctgtgtctagctcagtgtttgtgaatgcaccaattgacactctgtatctagctactctggtggagccttggagaacctttatgtctagctcagggattgtaaacacaccaatcggcactctgtatctagctcaaggtttgtaaacacaccaatcagcaccctgtgtctaactcagggtttgtgaatgcacccatcgacactctatatctaactactctggtggggacttggagaacctttgtgtggacactctttatctagctaatctagtggggacctggagaacctttgtgtctagctcagggattgtaaacgcaccagtcagcaacctgtcagaacagactactcggctctctgtaaaatggaccaatcagcaggatgtaggtggggccagataaaagaataaaagcaggctgccggagccagcaatggcaacccgcttgggtccccttccacactgtggaagctttgttctttcgctgtttgcaataaatcttgctactgctcactctttgggtccacactgcctttatgagctgtaacactcaccgcgaaggtctgcagcttcactcctgaagtcagcgagaccatgagcccactgggaggaatgaacaactccagacgtgccgccttaagagctgtaacactcaccgtgaaggtctgcagcttcactcctgagccagcgagaccacgaacccaccagaaggaagaaactccaaacacatccgaacgtcagaaggaacaaactctggacacgccgcctttaagaactataacactcactgcgagggtccacggcttcattcttgaagtcagtgagaccaagaacccaccaattctggacacaatagtttcttttgctgtgcaaaagttctttagtttgatgagatcctatttgtcaagttttgcttttgttgcaattgcttttggctttttgttgtcatgaaatatttgcctgtgcctatgtcctgaatgctattgcttggattttcttctagagtttttatagttttgggttttacatttaagtctttaatctatcttgaattaatttttgtatatggtgtatggaaggggttctagtttcaattttctgcgtatagctagccagctcttccagcatcatttattaaatagggggccctttccgcattgcttgtttttgtcaggtttgtcaaagatcagatggttgtaggtgtgcaagtcttatttctgagttctctattctgttccattggcctatgtgtctgttcttttaccagtaccatgctgttttagttactgtagccttgtaatatagtttgaagttaggtggtgtgatgcctccagctttgttctttttgcttatttgggctcttcttttgttccatataaattttaaaatagctttttctaattctgtgaagaatgtcaatggaagtttgatgggaatagcattgaatctatacattatttggggcagtatgtccattttcacgatatgattcttcctatccacaagcatggaatgtttctccatttttttgtgtcacctctgatttctggagcagtgtttgtagttatccttgagaaggtccctctcactttctttgttagctgtattcctaggtattttattctttttgtagcagttgtgaatgtgagttcaggatttagctctctgcctgcctgttgttggtatataggaatgctagcaatttttgcacattgattttgtatcctgagactttgctgaggttgcttatcagcttaagaagtttctgggccaagacaatgggttttctagatataggatcatgtcatctgcaaacagggataatttgagttcctctcttcctatttgaatactccttatttctttctcttgcctgacttcccaggccagaacttccaacactgcattgaataggagcaatgagggagggcatccttgtcttgtgcctgttttcaaagggaatgcttcaagcatttgcccattcagtatgatattggctgtcggtttgtcatatatggctctgattattttgaggtatattccttcaatatctagtttattgaaatttcttaacatgaaaagatgttgaattttattgaaagccttttctgcatttattgagatagtcatttttttttgtcttaagttctgtttatgtgatgaatcacatttattaatttgtatatgttgaaccaaactttcatcctggggatgaagccaacttgatcatggtagataagctttttgatgtgctgctggattcggtttgccagtattttgttgcggatttttgtatcgatgttcatgaaggatattggctttaagttttctgtttttgctgtatctctcccaggttttggtatcgggaggatgctggatacaatcagttagggaggagtccctccttttcagttgtttggaataatttcagtagaaatggttcccactcttctttttacctttggtagaattcagctgtgaattcatctggtcctgggagtgttttggttggtaagctatttggtaaagctgcctcaattttagaactcattattgatctgttcagggattcaatttcttcctggttcagtcttgggagggtgtatgtgtccaagaactcatccatttcttctagattttctagttcatgtgcatagaggtgtttatagtattctctgctgattgtttgtatttctgtggggtcagtggtgatatcccccttataatttctgattgtgtttatttgattcttctctcttttctttattagtctagctagtggtgtatctattttattaatttttttcaaaaaaccagctcctgaatttgttctttgtagggtttttcatgtctctatctccttcagttcagctctgatcttggttatttcttgtcttctgctagctttagggtttgtttgctcttggttctctagttcttttagttgagatgttaggttgttaacttgagatctttctagctttttgatgtgggcatttagtgatataaattttcctctgaacactgctttagctgcatttcagagattctgatacgttgtctctttgttctcattagtttcaaagaacttcttgatttctgctttaatttcattatttacctgagtcattcagggacaggtggttattttccttgtagttgtgtgattttgactggatttctttctttctttctttcttttttttaaatgtgtctatcagaatgactttatttcagtacactgagccccatcaggcagtgtggtttgtgcaaggctgtgcgagggacaggcttgggctaagagaagggaggtgagttgttaagtgcactgcagtctgtggggtgctacatcgctttcacacacacctgctcctttggcccatacctggcaggggcctttggtcataggacagcatgggggagactactgcatggagtctgggattggggtgggtcatggtgtcacaggtgagggtgccggtgaagacaggctggccccagctttgcaccacctgggctaaaggcctttggactactcctaggagtcaggcctggctccattagctcctggcactctggtctggccctctccctccttaaccaagcaggtccaaggtcaagagtggcccaagatcagccaagagggggccatcccacctctacagcttagttgcctggtcagctatagtggcaaaaggcaacatggttaattgcagctttctccagtcctaaggacactggctctccaacaccccttccttgtttaggggcctctgccaaagaaaaattctacctcctgtttcagaaaatctaaccagcaaccagcctgttgattctatggcagtgagcaagagaaagagggagaaagaggctggtgggagtgtctttgagtatagctaccaatttcaaatggtcctgcaacctgtggacactgtccgcttaccatcagcagggagaggcggggccctggaggctaggctaagcttaggtgctataaacattagtgtggcagggcaggaggcagtgagctccctctctccatccccttactgaacaaacacttcaataaataaaactgtttgaagatggcattgcaacaagaacggatggaaagcaaggacctggaatcagcaggcaccttaaactctcccaaggcccctggaaggggaatgggctgggaacattatctctgcagccattcagggggagtactactcctgccctcctccagtggctggtgtggtcctgttccctggtgaacatgagggcttcctgctccctcctgactttccagtctctgtattagctcttgggatgcttttctagcctcccaaaccaaaatggcaacaaaaccagacagaggtcaaccccagccccagtcctcagtgcccagtcagggggcattgatagcggagtgaccagcaaggggaggcagcagctgcctgggtcctcagggcaccctggtgggtgggagtgagggtggggccagtccagcctaggatgggcagcagcaaggtctcccagggggtggtttatctccctctgtctccccgtggtagtaaacggagttccctgcagccagtcagaggcccacctgaggagggagtgcagcctctgccagtgttcttccctgtcaggagccagttaatggtcacccccaggcctcaggccatcaccatcgtgggtagttcctcatcctttctggacctggggtccctgggccacatggcacttgcatgtgctcacacacttgtatacacacatgcactcacacacacaggcaattcctcacaaacactctgactcaacaaagcgagttttaaagtggagttaacttcagagagaggtgaagatgatatcccaacattagaaggttttcctgtggatagatcaggcaccgtcttcctcatattccttcttggagacccacatcttcttaaaggtgtcatggaggcaaggatagagccctcaatccacgtggaatacagtctctcctgaggtgcaaatatcctgatcttcacttcactcagtagcctgtcaccaaaacctttgaacaaggtagagcctcccaagaggacgatgttggagaaaagtgtgaactgcaggtccatgtctgacttctggatggcgaacaccaggaccttgtggatgccttcactctcctccctgatcaagtctggcctgaagagcagctcaggggcccggaattgggaaggaccaatctcaatggtgctgccatcaggcaggtagtactgagccttctctgtctctagtgtctcttccttctgggggtttatggataggtaggagggtctttcttttatggccttgacaatctcaaactcaaaggatgagtggaaatctcaaacgatgagtggaaatcatagccctccttatgcaggtagaggtgcaggaagcgagagatgttccagcttgcgatgtcaattcgcatgatggagtggggcatggcaaagccctgatagatgggcacagcatgggtgatgccatccccagaatccagcaccacccccgtggtcctgcctgtggcataaaggctgagcacagcttacatggagatgaaaatagcaggcacattgaagctcttgaagaaaacgttggcagctcattcctggtgtctttgtgggtttaaaggtgcctcagtgaggagcacgagatgctcctctgagaaagtctgcagctggtccttagaatagacatattgccagatgtgttccatgtcgttccagtccttgacaatgccatgctccgtgagatagcagattgagagcagcccttggtgctccttggctttgaagccaatgaagatgtcaccttcaagggctcctgccatgatacgaatatgcatgggtaggcccacatactttggaaagcagtatttgtggatctgatcaccagcaaaaccagctttaatcacaccagattcattgtcgatcatgacaggctggttggtgattgtatcgtaagactccacggcagaggaatctctcctggggaaggaactaccagttgggtctgccgctagtgccattcatgaatttcttaatcttgagttctaatttgattgcattttggtctgtttgttataatttcagttctttttcatttgctgaggaatattttatttccgattacttgatcaattttagagtaagtgccttgtggtgatgagtagaatgcatattttgttgtttttgggtggagagttctgtagatatctattaggttcacttgatccagagctgagttcaggtcctgaatatctttatcaattttctgtgtggatgacctgcctaatattgtcagtggggtattaaagtctcccactattattgtatgggagtccaagtcactttgaaaatcataagaacttgctgtatgaatctgggttgccgagaccagctcggtcatggagaccctaacccagcggcgctagaggaattaaagacacacacacagaaatatagtgtgtggagtgggaaatcaggggtctcacagctttcagagctgagagcattgaacagagatttacccacatatttattgacagcaagccagtgataagtattgtttctatagattatagatttactaaaagtattccttacgggaaataaagggatgggccgaaataaaggggaggttctggctagttatctgcaacaggaacatgtccttaaggcacagatcgctcatgctattgtttgtggttcaggaatgcctttaagcagttttccgccctgggtgggccaggtgttcctttccctcattctggtaaacccacaaccttcaccatgggcatcatggccatcatgaacatgtcacagtgctgcagagattttgtttatggccagttttggggccagtttatggccagatttcggggtctcttcccaacatgggtgctctttttttgggtgcatatgtatttaggatagctcttcttgttgaattgaaccttttaccattgtgtaatgcccttctttgtcttttttttatctttattggcttaaagtctgttttgtcagaagctagaattgcaacccctgcttttttctgttttccatttgcttggtaaattttcctccatccctttattttgaacctatgtgtgtctttgcaaatgacgtggatctcttgaagacagcataccgatggatcttgactctttatccagcttgccattctgtgtctttttaattggggcatttaacccacttacatttaaggttagtattgttttgtgtgagtttgatcctatcatcattattctagctggttattttgcagatttgtttatgtggttgcttcatagtgtcactggtctgtgtacttcagtgtgtttttatagtgggtggtatcaatttctcctttccgtatttagtccttccttcaggagctcttgcagggcaggcctggtggtgacaaattccctaagcatttgcttggtctgaaaaggatcttatttctccttcatgtatgaagcttagtttggccggatttgaaattctgggttggaaatttcttttctttaagaatgatgaatattggtccccagtctctgctggcttatagggtttgggtttccactgagaggtatgctgttagtctgatgagcttccttttgtaggtgagctggcctttctctctggctgcctttaacttttttttttttcattttgaccttgaagaatcatgattatgtgtgttggggttgatcttctcatggagtaccttactggggttctctggatttcctgaatttgaatgttggcttgtcttgctaggttgggggaattcttctgtatgatattctaaagtatgtttttcaacgtggttccatttttcctgtcttttttaggtaccccaataagtcacgggtttggtctgtatacataatcccatatttctctaaggttttgttcattcattttcattcttttttccctattcttgtccgcctgtcttaattcagaaacataatcttcaagctctgagattctttcctctgccttgtctattctgctattgatacttgtgattgcattataaagttcttgtgtttttcacctctatcaggtcagttatgttcctctcttaattggctgttctggctatcagctcctgtattggtttatcatgattcttagcttctttgcagtgggtttcaacatactcctttaactcaacaaagttttttattacccactttctgaagcctccttctgtaagttcagccatctcagcatcatcccacttctgtgcccttgctggagtggtgttgtggtcatttggagcagaagaggcactctggctttttgagttttcagcattttgtgtcaattatttctcatctttgtgggcttatttgcctttgatctttgaggttgctgacctttaaataggatttttgttgagtttttattgttgatgttgttgttgttgttttctgtttgtttttcttttaacagtcaggacactctactgtagtgttgctgtggtttgctgtaccccagaccctaattgcctcagtttttcccatacctggaagtatcaccagtgaaggctgcaaaacagcaaatatggcagccagctccttcctctggaagctctgtcccaggagagtactgatttgttgccagcccaaacgcactttgtaggaggtggctggaaaccccttttgggaggtctcacccagtcaggtggaatgggattacagacccacttaaagaagcagtctggctgctttttggtagagcacatatgatacattaggaggggactctttcttctggaccatttgtattctccaaagccagcaggctagaatggctaagtctactgaaccccagagatagcagccacccctgccccggtaacttggaactgcctcagaaagattccagactgctttggttggctggctggaattccaagccagtgggtcttaacttgtgagttgccatggaagtgggggccatggaagtggggcccacggaacaatgctgcttggctccctggattcagctccctttctagggatatatacagatggatatccccccttgctggggatcttggggccagagtatataaaattcctgggtcactgtatgtgcctgagcagctgctctgctgagacaccacacagttctgtgtattggacccaaggccctggtggcatgaactcaggagatctcctgatctgtgggttgcagagatccgtgggagaaacatggttttctgggcagggttgcatggtcactcaccacttctcttggttggggatgggggttcctttggctgcatgccactcccaggttggctcttgttccccttgttccctggcttttctacattctcatgggtcaaggtgtttgccttgtcagtctcaatgtgagaacctggatatttcagtttaaagtgctgaattcacttgcccttcttcattcctctcagtgagtgccatagaccacagctgcttctaattggccatcttggatcaacgttgttattccctttttcactgcttatttcatttcactcacatctataagcaaaaaaaaaaaaaaaaaaaaaaagactcaaacggcataaaaaagtgacttttgtaggttattgtttagtaaagcatttgaattaaaaaaatctcatcatgagctatagctcatatttggtcattttttgtacttctcatttgggtatctaagacttaatgctgaattgaggcatctgtggaataaataaaactctggacctgtctggacaagcaagctcaaagcaggagtgtgctgtggtgggaataggccaactgtggaatcctaaactgccttcatattgttgctgtaccattgagcagctatgtggacttggtacacatagcttgagaagctatgtagaacttctctttctttaagtggagtgagggttgttatgaggcttaaatgaggtaatgtttgtaaactgcttaacatggttggcacacagtaaactttaggtactattatcagttttgtctctgaggctagttcctaggtttatggagttgtagagctggagaagcattttaaagtccagcgttcttccttattttagagagaggaaactgatgcccagagacactgaaggtttctgaggcttggttatcatgtctatgtgttttacagcttggctatgaggatcatctgagctaataggtggaaaagcatttatatgtcagttttttagtattgttcatacagtggctaattgccttgcctgctcaacgactgaatgattttataaaatagctttctggttctgataatagaaaaatcaatatattttcttttttttcttaatttagatgtatccagttaaagcaggcaatagatgaaaataaaaatgctcttcaaaaattaagcaaagtaagtattgaggttaatcacattattaaaacatctcttcctatacaagtatttttattaagtggaagttaattcaagttggtaagttcctgggtttacgttagtgatatagtctaactgcagccagtgctggcttgccgaacaggcttgctaagtctgtgcttgggagcaaagcaaaatccagggctccaactaccgaaaaatgttcagctttgatgaactcacctgctattaaggattcagacaatcctggaaggagctatttttatttttgcattttgtgagttgttttacagtttagaattatttttattttaatttctttgtggggaaataatgcataatctggccctgagggtaagtggtaaagaagcttcttgtatcaaatggcagctctgatatcaatgtctctgcagaaacaagaggaacaggaatttaaccttgacaatcccttcaggatttttttttttttttcacatgagccttggctacagctagatgtccaggtccagagactcatggagtctttaaagtggaaggcacctgaaagtcagctctccagctgtatattactcccctttactgcatctgagatatgtggtcactgaagagctcctccaaatttctccagtgacacaaaacttttcaacttagactgtttgaaaacctaattatttctgtttcacaggtgaggaaattgaagctctcagtggtgaagcatccatgcctcttctgtcaataagtggcagaacttgggattggtgcctgtctcattgactttaaagccgatcttctgtcagaacatatctcttactgactatggaaggtctataatacttagcaagaaaataaaagagaaacctaaaacaagtggtataattttattttttcatttggtttgcattccaacacaattgcctgtttcttttaaatctaatttatttccctaagataggtgtaatgtcacactgatatttactttgttatatagcacttattggaattttttgttgttcttttgaaattaggaaactgaaattaattttttagtgaaatagacctatattctctcataggctgatgaatctgcacctgttgcaaactataatcagagaaaagaagaggagcatactcttttggacaagcttacccaacaactgcagggccttgctgtgacaataagcagagaaaatataactgagtatgcttcctttctacctttcttttttcttttttaaagatatatcaccaatagctttaatgtttaactcaaagacatatagcagtatagatataaacaaatgacactaacaatagaatcagtcaacatttatttattgtgtataatagaaggtgttagatcccatgagagatggaaagaagtgtaagtcatagtctctgccctcaggcaatttataatttagttgaaacaaaacagagatctgaaaagctaaatgaacaaatgttagaaaataaagatgatatatttaatgtcaatgttgatgtgtaaaagggaaatgatttggaatgtctacttgcattgttctccctttcataaacattctttaaaaatttgaagcaaagactgagtgtggtgactcatacctgtaatcccagcattttggaaggctgaggcaggaggatcacttgaggccaggagttcaagaccagcctgggcaatacagtggaccccatctctacaaaaaaacccaaactagtcaggcttggtggcacgtacctgtagtcccagctacttgggaggctgaggcaaggaggattgcttgagcccagaagttccaggctgcagtgagctataatcacctcagtgcacagcctgggcaacggagtgagacactgtctctattaaaaaaaaaaaaaattgaagtagggacatgcattgtttgtctgccagagtgtatgttaataatagcttctgaaagttgtaaagaagacttacatatacaagttgagtattccttatctgaaatgcttgggatcagaagtatcttcagttttggattgttttggattttggaatatttgcattgtacttacttgttgagcatccctaatctggaaatctacattttgaaagactccaatgagcatttccttggagtgttattttgatgctccaaaagtttcagatttaggagtatttcggattttggattttctgattagggatacccaacctgtacgaacaaacccaatttgtgggaagcaaaagaaaaaaatcagttattcagactatttcagtgttgttctccaacctttatactgtatcctgggaaaaaatgctgaaggtggtagatgcaaggatctagaatttccaccgattcttagtactgagaatggcagagtagttggtattggactaaccttcccaccataaatgactataaagtctggacaaaatatacaaagcatctgtttgaagccactgagcatctaccaagcagggttgatattcttgatatagggagacacatgaagcaaatcctacattcacctagaccttttccctgggaataatttatgagctgtggtggaggaaggtagattccaagcagggaatagtagtcttactcgactgaggagacagagatcacactttggagctgctcagttcactgagagttgtggagcaaggtgccatagagagaagggagctgcacagaaacaactccagcaatctgaaaggtctcctgggctgtatagggcatgatgcctgcaaggcctggcagaaagtacctgctgggagactaagagcttaatggattctggtaatcatatagtcctggaaaaacactggagtttgtacctagttctagtaaagagacttgggaaatgtttcaggcatttagtagaggacacagaaggcccaggccctaggagtaaagaaaacaccctgagagtaacaaccatgatctaggaataaagacaaagctgaggtaggtcttctctaaaagagcctaaaagcagaccttatcaggaacaagataatttaactgtgtaacattaaaataatttaaaatttcttagaggaatataacataatccaaagtctgtaagtgagtcatgtaatgtgtccatcacagcaaccagtataaaaaaaatcagaaatgcaaaaaagcaggggaaaatacatgatcaataagtgacaagatggtcactaaaaacagacccagatatgatccagatatagagttagctgacaaggacttctaaataaaatgattaatacagtaaagaaaatagaagaaaagatgaatgaaatgggaaatgggtgtatttaattcaaatatagaaaaatcaaatgaacattctataactaaaaaatacaatatttgataaagtaatgactgagaacttccaaaatctgattcaacatatagactcaaaaatctgggaaatatattaaaatcaagagaataaataatcagtagctcggagatgtgagaattagcaaataaccataaaacaacaatttttaatatgttaaataatttataggaaaagattgataagatgaatagagcgaaatcttaagcagagaaatgggaactaataaagaccaaaatgaaaattctggaactaaaaaaatacaatatgtgaaataaaattgctgagtggtttaatagaagattggatacaacagaagaagggatcagtgaacccaaagacagcttaaaagtttttcaaattgatacacaaaaataaaaaaatgcaaagaacaaaacagaatgtaagagagaggtgggacactgttaaaagttgtaacagatttgtaattgaagtctcagaataagagagagaatgaagcacaagaaatatttaaagagatagtgactgaaaatatttaaaaattatgatctaagagagatatcaatccactgatccaagaatctcagggaaccccaaacagaatcaatataaagaaacccacacacaggtacctcaaactaccgaaaaccaaagataaataggagatcttaaaagctgccaagggaaaaaaggaaacatgtagagacaaatgacagaattacagttgacatcttatgagaaaaaatacaggtcagaagacaatgcagtaacagtaacatcttgaaaacgttgaaagaagaaaccatcaactcagaattctgtatccagcaaaagtataaaaaattaaagtgaaataaagacattttcaggcaaacaaaagctgagaaaatttgtcaactgatctgcagtataagaaatgttaaaggaagttcttcaggctagcagacaatgatcccacattgaaatttggaccttcaaaaaggattgaagaagatgggtacgtgggtacatataaaagcctattttttcttttctatatgcctttgaaagacactcaattatgtaaagcaaaatatatatttggggatttataatatccagttgattctcattatttacagtagttatgttctataaagttgccaggaatactcgattagtaaatgctaaaccattgctcctggggaaatgcagacttaagactcctgtgagcctctggtcacaatgtttttgtcaactgagtaacatacaaccttgtgttactgtttaaagacactttatttcatatattttattgattcattaacattgaattcacactaacagcactatcactcatgcatgaacaagtcttatctaacacacttattttctccagaggtacattatagccttcttgtgcttaggaataccacatggctcttcagcgctatgtttgggagccattttaaacaacaaaatcaccaaaaaaaaaaaaaagcacaaaaatgcaaaaactgtggcactaaatagactgcaaaaaagggacactttcctgtatgagagctgaaaaaaaaaggcaggtgtcaccatgttcagcttcagttgggaatgtgtacgccagacaactcaaattttttgctgctttgtgtatgtccacaaatgaccacaaaagcactgtgagtattaattaggaggttacaaataaagtttagtgagccaatgaattcataaatacagaatctgcatgttacaaggactgactatatgtagaaggaaaatgtgacaatagcacagcatagcacaaaggctggcaggtaaatggaattatttatcttaaagttattttatctttggtgaaatgtgatatttaaattagactatgataagttagggatgcatattgtaatacctaaaacaatcactaacaaaataatacaaagaagtgtagcttgtgaaacaacacaataaaatggaatactaaacgtgatttgattaacccaaaaaaggcaagaaaggagaaataaacagatgagacaaatagaaaccaaatagtaatatggtttcaatgcagccatttggatagttacattaaatgtaaatggagtaacactccaattacaacaaagattgtcagattgaatttttttaacccaaatatatactatttagaagagatagactttagtatgcagttatagagagagtgaaagtaaagaactggaaaaaggtattccatgttctacaacaaagatattatttgttttataaccaaaacaaaggtgatacggttacaataatatcagatatttaaggctaaaagtaatttactatttaagaaaggacatttcataatgataaaagaaagggtcgattcagtaggaaaaaaaatcttcctaaatgagtatacatttaataatatgggttcaaatgtataaagcaaaagttgccagaactaaaacagagctagataattcacaatccttaaccaccgtgatctaattacatgtatagtcaagcctttcttagtgatagggatatgttctgagaaatgagtcattaagtgatttcatcattgtacaaacatcatagaatgtacttgcacaaacctagaaggtgtaggttaccatacacttgggttatatagttatagtatagcatgttgctcctaggctacaaacctgtacagcatgttactgtgctgaatactgtacacaattgtaacacaatggtgtatttgtgtatctaaacatatccaaaaataggaaatgtacagtaaaaatatggtattatatgtatggggccatcattgtatatgtggcccattgttgactgaaacattgttgtgcagcacatgactatatatgtgtagaacacagcacctaagtatgtattatgtaaatacatattcttttcagtgcatctgtaacattaaccaaaatgaaccatattggaccataaagtaattgtcaccaaatttcaagagtttgaaattatgtagaatatatatatattttctttgatgacttggaatgacattaaaacccaatgacagaaaaataattagaaatcactgcatgtggccaggtgcggtggctcacgcctgtgctgaggcgggcgaatcacgaggtcaagagatagagaccatctggccaacatggtgaaaccccatctctactaaaaatacaaaaatgagctgggcatggtggtgcatgcctgtagtcccagctactcgggagtcggaggcaggagaatcgcttgaacccgggaggtggagattgcagtgagccaagatcataccactgcactccagcctggtgacagaatgagacaccgtctcaaaaaaaaaaaaaaagaaaaagaaaaagaaaagaaattactacatgtttgcaaattgtcacacacttctatataaactgtgagtcaaagaaaatataacagtggcaattagaaaatatttggaatgataataaaatgactgggttgcaaccagcatagtgcttaaagggaaaatttctatcttttgtttgtttgttttggagacagggtctccgttacccagactgggtatagtggtgcaatcttggctcactgcaacgtccacctcccaggctctagtgatcctctccacctccgcctccctgagtagctgagactacaggcgtgtgccactacgcttggcaaattttttaaattttttgtagaggcagggtctcactatattgctcaggctggtcttgaactcatgggcttatgcaatcctcccacctcagcctcccaaagttctgggattacaggtgtgagccgccacacctggccagaaatttatatctttaaatgtatagtttgaaaaaaaagttgaaaatcaattactaaaacatccaactttaggggccagaaaaaggacaacaaacccaaggagagcaggaaagaaataataaaaataaaagcagaaaacagtgaacaataaacagacatacagtaggcaatatcaacaaagccaaactggtttttggaaaattaattaaatggataagctgctagcattactgatcaagaaaagagagagagaaaaaaaatcaatacagattccacaagcattaaaaagatactatgaaaagactatgaacaacttgtgtgaataagtttgaaatttagataaaattagtttctttaaaaagaaaatgtactaaaattgacacaagatgaacagaaaatcttaaaagttctactaaaatatttactaaagaagttgaatctgtaattaaaagcctttccacagattaaactctcaggtggctttactggtgaatttattgtaaacatttaagaaagaaatagtgccaatattaaaaaatcattccagagaacaaagaagaaacactttcaaatcattttataagctttcaataacactgatatcaaaacatgacaagaacactagaagaaaattgcaaggccctcatgaacacatgcacaaactcagtataaaatattagcaagtaaaatctagaggcatttcaaaagggtaatacatcatgaccaagtggaatttgttccagagtgtgaggttggcttaacattaaaaaatcaatcattgaaattcactacattaatgaaggggaaaaaccgttatcaagttcacattattttcggcaacattttagaataattgacccatataaaatatgtgcaaaatatctcctaaagaaggaaagagacgcgttgaaaatcaatatgacattttatggattttttagtcttgtggtataaaaatggttgttacatccctgtttatgttttagatcattgtggtataagagtgtcctaccattattttaaacaaagttcagctaatattcctttttattccagagaaaatcttgtagttgactagttttatagttaatgatgttcatttgcattagtctaagtattgttttcccattttaaagataagcttctctcatgtaagctttaggagggcaaagatcttggttttgttcattgttatagcccaagcacatagtgtctgtcacacagtaggtgctccccaaaatttaaactttgctgaatgttgaatgagtaaataaaattcagaaagatttagtgacgtgcccaagctaacattattttggcatttctctcttcctcaccctcagattcacctcctttctcttcatccctatgctgttttcttagttcatagtgttgtcacttctcactttcaacagccaccctcacctttagcctttcttctaatctgttccccacattatacctttgtctcctttctaaagtgggaatcatatcatgtccttcccctactcatttttaggggcgactttaaaggtaaagctcacctgggctacattccgcgtacctcttttcagcctcaactctcactcattttccttaagccttgccctaccattcatgagctacttgatgtttcctaatcttaaatctcctttctcctctccctgcccttcctttctactcccattttacctgattaattccatatcatctctcaagacctaattatagccttttatgattcccattcgtgcaacctgggttaggtgtccctcttgtgtgattgatttcttagtatcctgtgtatacctctactctagtacctattgcactattttataattctccattttctagattgtctcactgcaagctccttgaggatggggaatcatgtctggtttacctttgtgtccactgtgtatctctctgacacggaacttgacctacagcatcagtgtcatcatcataactgacttttatggaaagcttgctatgggcaagcactgttctaaacactttgcaagtagtaactcatcttaatcctcatgacaatcttagaaggcaggttctattattatctccactttaccaatgagaaatggagagcttaaaagaagcctactcaaggtcacccagcaaagagggaatagagccagaatttaaatttagcagagcctatgctctaagtacttcataataatgcttcaacagcattttctgaatggatgaatccaagacttgaattcggagtctcctggcctcaagtccagtgatgctctgccatctcacatacatgactcagctccctctccgcctcagtctctccaggcacacggtcttagctagatggtagaaactgttctttgtattttcccttatttcttttatttgccagctccaaatatgggatattcatgtatatgtagaagttacactcatagctggtctgttcttgtatattatttcaagtagtcctactcagaaacactttttgtagagttggggcacctactgaagaagaggaagaaagtgaaagtgaagatagtgaagacagtggtggggaggaagaagatgcagaggaggaagaggaagagaaagaggaaaatgaatctcacaaatggtcaaccggtgaagaatacatcgctgttggagattttactgctcagcaagttggagatcttacatttaaggtaggtagaataagactgaaacctaacctaagggtcgatgtccatacctaacagaataagaaaactctgcctgtacacctgtattacagattcttaaaatgcagttttataacaatctatttaaataagtaataattacaatttacaagcagtagtaatatgagattgtgttactaaagttacctcttctaaagatttttgaaagtagctttaatgttgagaattcctaatttaggggtaaaattttataatttgttattgaatgtcatgtataaattcattcaagtgagttaggcaatgtccataggtggaggtagaagggagcacttcctgccattttgtagcagtctttcctgttagcttagatatgagaggggcttacatccatgcttggttggcctgggcataaataagtggcaggtgggacagaacaataaagttgtgatttttaaagttgtgattttgagcctgtgttttctgctagagaaatgagccaaagaaatttaagtgaatatatgaattttagttcttatattaaacttcaaagtttagtaactgattaataataaaatacataagaatattatgcaaataattatatggtttgatttatagatttttttttcaaattctcctggaaaatggtatcaatattagacaataatgtatattttaattaagtgtttgcttttgtagtgtccttagtggtggaaatgcttttgtcttcaaagatgaattttatttttataaatgagtgagtgttattcaaaacatatctggtgaattaagtgggtaattatattcagtaaatactatttttgctcaaaaatagggtttaactttaatggaattgatattctttgggaatttatatgctgcttctgaaagacacttttccagagatattaaaacattcaaaaatattttacgcagtaattgaatttttggaataagtatggggccttaaaaatgattgtgaaaaatggttcccatttgcataaatggctcaagtgtatgttaggtaaccaaaaggaatgattcattaaactatgtcacatttatggttttaggtgagttaggcagaatacataggggtcgggtgatagggaagcttttgataaaccttaggataaatattggattaaaaaaagattttgcctttttttcagcacatattttgaatcattggtattgacatatactcatgattattgaattttatttaaaatggtttactttgttttgctttaagaaaggggaaattctccttgtaattgaaaaaaaacctgatggttggtggatagctaaggatgccaaaggaaatgaaggtcttgttcccagaacctacctagaggttagtcttggtttatgccttccttttctaagacttttttttttttcgcttttaataaaacatttagctgtgttcttttgtcagttgactagtgaatgacttgagatatagaatttgctttaattttggagggacaggacctgggaaaaacattgtgtattaatggtcctggggacctgtgaagtgctcttacgcatgtgagccctggaacgtgatctcacaatgaggggatgctttgtggattaatgctgatcataacaaataataggtgtctattgtttattgtaaaacataactgcagttaactttgtgttaacttccacaaatatgtgatccccttactaaaatgtgaacatactatacatgtgtgtttgtagcttgtattttcttatttcataaaataacatggtcattttctgtgccaagatatatagatttctgtctggatcagcactgtccagtagaactatgatgcaaaccacacatgtaatttaaatttttcagtagccacactgagatatctttttgctgatgccacttctgacaccaagtatgtggtttttctctgacaccaaatatgtgttattacatcagttcttctacaccaaccggtgtcagcaattcaattcgattctgatgctaatgcctggagctagcacagacccccacaggttaaaggctcagtcccacaagattgctgctcacttccgttgccagtcacaagtcccaagagccacccatacttctgactgactggctatacattcacgagttcccataccatcacctcaggggttcagtaatttactagaatgattcacagaactcaggaaaacactttccttgcatttaccagtttattataaaggatgcaactcaggaacagccatagagtgaggtattggttgggggtggctggcatgcactctctgggccttccaccttcccagcacttcgctgtgttcaccatcctggaagttcctggaaccccatcatttaggggtttttctgaaggtttcattagccatgtttaactaaatcattagcaattggtgattaactcagtctccagctcctctcccctctttgaaggttggagggtggggctgaaagttctaacctctaatacctgggttggtttttctggtaacctgtccccttcctgaagctgtttaggtgcccacctagaattacctcattaacataaactcaggagtgactgaaggggactcttgatgagtaagaaaacatactcctatcattcaggaaattccaagggtttcaggagctctgtgccaggaatcagtgacaaagaacaaatacatgtttttcattacacacatttttaaaaagtaaaaagaaacaggtagaattatttttaataatatattttatattatccagtatatcaaaaatactattttgacatatcaatatttaaaaatattgagttgttttgcttttttaacattaagttcaaaatccaatgtgtgttttacatttacagcacttctcagtttggattaatttcaagagctcactagctacatgtggccaaagggctattgtattacatagggcaggtctagatcatctttttcaatggcagcaagtcttctaatctcatttagatggtcattgaagttgtttccaacctataatcactatcgattatgttgcaaagaacatgggattagcatccactgtcagttgcaaaaagatccccccaaaaagtagcttaaataaggtagaagcctatttctctcaagcataaaagtgtggagaaaagcaatcaataattggttaagatcctatccagtattttatcctgtttctgatgtgaggctgctctgcctagagttatctctttagttttaagtcagctgctggatcttttaaggattccaaggagcaaaaggggaaagaattcaaaaggcataagctgctgcctttttaagaaggtttcttggaagttacacaaaaaaactttcaactgttgctcattgaccagcatttagttctctggcaacagttagctgcaaggaagtcttgggaaatgtagtcttttaactggatcattgttaaatcagggattttgtttgaaaaaggaggtggggaataggtggtagccagccagcaacttgtgttgtcatcaagcctgcgtgcatctttgcacacttgcccgattatccccttagataaattcctagatgttcatcactggttcaaagggtttatagctttatattttgatttatttttccaatttgccttttagaaaagttatgccaatttgtactcccacctctaacaatcagtgagtgctgtttcctcacacaattgccagtgatggctgttagcaatctttaaaatttttgccaatatgaccagcaaaaaaagtgtcattagtggtttaatgtgcatttactgtactcctaatgaggttaagcatcatctcatatgctttatgaccatttgtatatcttctttgcgaatggcactttcggttttctttattgatacataatattttatgtatttgtgtgagtgctttttacttgtatggattgtgtaataatcaagtcagggtatttgagatttccatcaccttgagtgcttatcatttttatgtgttggtaccttttcagttcttttggatatttttttctaagggatttaaaaaactctttcattgatttctaagagcttttataatattttaataatcaggatattaatccttagatatttgtgtgagctattttctttttttcccctcaggatatgcttaagttatgtgttagatattttctttgttgactttaggtcatgtttatttattatgtagctaaatctgtcagtgtttccacttatgatttttgattttgtatcatgattggaaagggcttccccatctctagattattttcttctaatgcttttatgtttcttttatttttatctttacgtcttttcttttttatttaagtaaattccatctggaatttattttgattaaacttgctgtctatctcagttcttattttttcaaatagcaaagttattaaccatgtgttgaaaatttatttcccactgagttttatatgctcatcatatatactaaattcccatctatgctcaagattttctgaaagtactgatgcttttgtttttttgtttttaaacagaaaagcttgtttttgtttttactggagggttaggtggcagtactggtatttttattggttgttttttgcattagttaaaaagcacttcacatttcaatggttttttagccttatagtgaagaagaagaaggccaagagtcaagtgaagagggcagtgaagaagatgtagaggcggtggatgaaacagcagatggagcagaagttaagcaaaggtacaaaagtgggaaaggatatcaaagtaggtttaggaaacattttatttgtttatttttattattataactaattcaatactttcttgaaatggagacaacttgtacctggagagcttttcatactattgtctgcttaaagatcattactgttttagttttgtaattatttttaatacatttagctctacctcgttttcatctggaaactgttagattttcaaaacttactgatgattatcaactgtgattaaagaagttccctaattgagtgaataggcataacctgacctgactcactttgctattttgtctccccagaactgatccccactggagtgctgttcagaaagcgatttcagaggcgggcatcttctgtcttgttaatcatgtctcgttttgctacctaatagttctgatgcgaaataggatggagactgtggaagacaccaatggatctgaaacagggttcagggcatggaatgtacagagcagaggacgtatatttctggtttctaagcctgtgctccaagtaacatttctcattagtttttttttttttttgtacaaaaagaatagataattcatggtgtcacttgaggacttggaaacattctcattgatcctgctttcctatcatttgagtggaaacagatgttaaattttatttactattcgaaaaatcctgaaagcctttaataaaaagtaagaaattggccaggcatggtgattcacactggtaatcccaacattttgggaagctgaagcaggaggatcacttgaggccaggaattcaagaccagcttgagcaacatagtgagaccctatcctacaaaaaataagaaaaattagccaggtgtggtggctcatgcctgtagtcccagctactcgggaggctgaggtgggaggattgcatgagtttgggaagtcaaggctgtagtgagctgtgattgtgccactgcactccagagcatgagtgacagggcaagaccctgtcttaaaaaaaaaaaagtaattaattacatttttttaaaggagaaatgatccataattctgtcattaaaaaaaaattacaggccgggcacagtggctcatgggcacagtggctcacacctgtaatcccagcactttgggaggccaaggcgggtggatcacctggggtcaagagttcaagaccagcctagtcaacacagcgaaacctcacctcgactaaaaatagaaaaattagctgggcgtggtagcgcatgtctgtagtcccagctcctggggaggctgaggcaggagaattgcttgaacctgggaggcggaggttgcagtgagccgagaatactccactgtactccagcctgggcgacagagtgagactccgtctcaaaaaacaaaaaaataattacatagccaaatgaaaattctcttcctcaaactcataagtaatcaccattaacaatttagtacgtgtccttcctgacctttttcgttatttattacttataagtacatccttgtatgtgtgagggtgtgtgtctatgagtagtgtgtatgtgtatacaaaaaaaatccattaattcttcagtgcatgtgatttgccaatagacattaacttacctgtgaaatggaagcgcagggtggagcaggacaggagcagggacattttgataagggtatacttgaagcagctgctccggaacacacagctctgcacgctgggcactgtatggggcttaggtccttaggagaggccagggtgctgtgatggcatcctctcaggaatttggggccaaatcgtattattcttccactaaagtctgtatgtttatatttttcttttttgggttatagttactctagtgataaagtattatagagatgcagaaacatgactgaaaacaaatccattttgatgttactgtcttcagcagataaacactgttgatgtgttaactacgatgggagctattcctgcagggttcaggccttccacgctctcacagcttctggaggaaggtaatgcgtgcctatcagccactgcactctttcagcaaagcagtcaagatccacgtctaatttttctgtcacaggcaaaacacattgttgaagaagatgttgaatctcacatctctttggtgctcatcttttcctcatccttcctatgacagtgaggaaagatccctgatcctatcagaggccagcctgtttaccagtgctccgggttccagcccctttctttttttcaaaaatgtgactcctttaattttcagccctttcctgtgtctttagctggcccaccttccccacactggttcattccctcatctgtgctatcagcacacctaattctccccaccttaaaggatcagccccttgaatcctatcccattctagccaaaacctccttttctctgatcttcttccaagcaagacttttccaaagaattatctccatttggaattttcattttccttactcattcttggctttccctgtatttggcaacttttgtctataagctcattttaaagaggattcatgctgggggacaaggggtgtcctgtataccctgagttgttgagttgtcatggaagggctgctttgaggatgcctttgctgggaaggttcttcccagtactccctaaattcccatcttttcatccttcaggtctcgcggtaaattctgccttcccagagatgccttccttgagtaatgtgggtttcccttactcccattcatgtgaacaccctttatagctctatgtcccctaataattattttatttatttgcttgtctacttattttctaagaaaattttcctcccattcaactgtaaactatggagggcaggggacatatctctgatttatctttgtatttctagaacctggtgtagcatctggcaagagtagaagctcaaaaattatttctcgaatggataaatgatgttattaaaagtattattcatgactaaagcatggaggaagagcataaaatgcttttgtgttaagaagtaaaactaacgactttgttttttctgaagtctccaaaaagtgctcatagatttctgcattttacaaaaatatttgaatgaatccttgtcatcatggggcatattattggcctaaaagtctttcttaaaggtgctttaagatgatcttttatgtgtttgtatctgtaagttttgtactgctgtttttatccataaatctatattggcgcttctattttggaaagcaagttcttagtaagcagcgtggcattttggaagtgcctgtactctagttcatagcataacattatggatttttgatttggagtttctttctttgtaagaaaatgaagaaaaaatgattttttcagggaatcaatttcgagcaaattacttcttacaaccagagctcatgccttcacaactggccttcagagatctgatgtgggatgctacagaaggcactgtaagtatagttactatcagtaaaagtgtaactcttccagattttgtcatagttgcaattagacaaacaacatgttaattgactaatgaattataaaaaacaaaaaaattgtttatgataattttgaaaatagcgatatttttataactaaggcagaatttggacttgctaccttgactttatcttgtttctcttctccattgcactcttctctcattgttagaaaggaaataatactaggtttctatcttaatcattctttgcctcaatttcttcatctgtaaagatggagtaatagtaatgcttccaacataaagttattttgataattatgtgtgtgaagggttttgaataatgcctggcatatgaaaagaactcaatagatgttagccattattatcatttatagtagtagtagcagtagtagtagtatttttgagacagggtctccctctgtcacccaggctagagggcagtggtgtgatcatggctcactgtaacctcaaattcctgggctcaagcgaccctcccacttcagcttcctgagtagctggggccacaggcctacaccaccatgcccaggtaatttttgtattttttgtaaagatggggttttgccacgttgccaggctggtctcaaactcctgagctcaagcaatctgccctcctatccctcccaaagtgctaggattacaagtgtgagccaccagtcccagtctaatataagttatttaaatgaaaaggcttatgaccgtaaagcagaatgtaaagtttaatgaattgaagctgttcttaaaaaataaaaaatcagaatgccaatttatttactcacaatctgaattatacctatgaagcagatctgaataaatatatcagatagtgcattctctctgttaaaacacctattaagaaactaaggaactatgcagataattgcttggaataaaaaatagtggggataatcttaatgccaggtggcattggttttatgctgcgttagccttctgcacttacccacattctgtaggagtgaaccgggactggaatacagtgattctatagtcatagatcatatacattttgcctgccaatatttattgttcctttcatcacagcttttaagtatttaagaaaaatgcaatatttcaaatgtaactctatgaaaaatttacctaaaatgactgatttaattttcaatgaacagagtattgaaacttttattgtatatgtgtaaattttttcttttttaaaaattctgtatacattttcataagccgaattcacaaaagacagatttgtgttagaaatcataaaaataaacttttttataactaatttttctttcagattaggtcgagaccaagtcgtatttcattgattctgacattatggagctgtaaaatgattcctcttccaggaatgagcatacaggttctcagcagacatgtacgcctctgtctatttgatggtaataaggtaaggttactgagaagtaaatcaattcatactaggattatggagaaacattcccttagattcttttccattcaactcctccccaattcccaagagagtattttttacctagtaccaaagaaaaatttgaatgactctttgaaaaattcattttttaaatgagatacaggttaaacagtacttagatggaaatttatagttttaattgtgtatattaaaaaaaagataaaagatttaaagtcagtgatctaagctagcaaatcaagaggctagaaaaagaagagtgagttaaacctgaagaaagtagaaagtgggaaataatacagataagagtagaaattaatgaaatagaaaacagatggaccaaagagaaaattttaaaaaagacaaaagttgattctttgaaaacattaataaaactgaaagatgcatagtgagactattaagacttttttaaaaagtaaaagaaaacaaactattaacatctgacatggaaatagagacattatcacagatccttcagacattaagaggccaataaggagatattataaacagctttataccagtaaatttgacaacattgatgaaatagataaattcctggagaaccataatttactgaaactggcataagaagaaatagaaaatgtgaataacctctggtaaagatattaaacctataattaaaaaaaaatcttgccacaaagaaaacttcaggcctaggtggcttcacctgtgaatttcttcaaacatttaaagaagaaataataccaatcttatacaaattcttccaaggaacagatgaaggagaaatgtttcccaacttatttcataaggccagaaaaaacatgaccccagaatatgacaagacattacaagaaaggaaaattaccagacagtatccttcatagatatagaaagtaaaattctaaacaaaatattattaaattgaatctagcaatatataaaaaggacattatgtcataaccaattggggtttatttcaggaattcaaatgtacattcctgggtaatcacatttaacatttgaaaatcaatcattataatttgccataagaaaaatcatatgatcatcttaagaggtaaggaaaaaacatttgacaaatttcaacacccatttatgatttttaaaaaattatctacaaactaggaatagaagggagagtcctcaaattgcaaaatgcaacaagaaaaaacctaaaactagcattatcttacttaacagtgaaatactgaacacttttttcctaagaccaggaacaagtcaaagatatccaagaaataaaaagataactcagttttctaaagggacaaaagacttgaatagcctcttcaaaaaagaagtatcaaaaaccactagaagtataaaaagatagtcaacatgtaagaagtcatcagggaaatgcaaatgaaaaccacagtgagagagactgacctatatgttatatataagaagcccaccttaaatattatgctataggtagcttaagagaaaaaaaggatgagaaaagatataccattcaaagtagacttcaggcactacatagtgataaaagagatcgttcaccaagaagacatagtaatcctaagtgggtacatacctaacatctgaaatttaacacacaagaaataaaaatggttagaactgaaaagagaaaccgacaaagtcacaattatagttggggcctctattatagttggggagtttaacacttctctctcagtaatataggacaagcagacagaaaattagtaaggatgtaagagaactgtataacatatcaacaaactggattagattgatattcacataacacttcacctcaaaatagtaaaatacactttctcttaagtacatatggaatagtcaccaatatagacggtcctgggtcagaaaacaaacctagacaaattgaaaagaattggaatcatataatatatggtccttgattacatggaattaaatttgaaatcagtaacaggaagataaatggaaaaatacttaaatacttgtaaatttaaaaactacttctaaataatcaaagggttaaaaggaaatttcatgggaaattagaaaatattttgaactgaacaaaaaatgaaaatgcaacatatcataatttgtggaatgttagctaaagcattgcttagagggacatttatagcactagatgcttatgttagaaaagaattctcaaatctacagtcaaagctccttcctgagaagacagtgctgcttgagctgataacggtcaatgtgaaattaaatgagttaatgtaagggaagttatcagagtgatgttatacatggaaagaacatagttctttcaaagagtgtctggatgagaggtggtgatgataacttagagaggtggaggtggagatgagagatgtggatagagatatctgggagtaaaaatcaacgaagcttggtgatggactggatatggaggagagaggaggagtggggtataggcatgacacctagtctctgacttccgcatctggatggatggtggcaacattcaatgagatggggaacactggaagaggaccacgtttggaggagttgacatgggcttggttttgcacatgctgagtatactgctaacccccagcatgaagaaaatgcctttatttcatctgaacttggggtaaagaaatgaacttatgttatgacggtaatcctccctcacttccataatacattctgcacaaaatcactgccacaaatgagccagtaggtgtcctcagtgaccaagagctgaattggtttctgtttcatacatctggtttgatactttttcctgtacctctctgtgttctcatatataagaacataaaaaggaatggaattttattttcaataatatatcaaaataatgaaatttactttatgaaagaaatttatgtgagatttccaaattgagagttatggaacatatttaatagctgcacagatactcgtgctgtttatgtaagagtgcttctttaataaatctaagcctagttatgaataaaaagcattgggctgggcgcagtggctcacgcctgtaatccccgcactttgggaggccgaggcgggcagagcacatggtcaagagatctagaccatcctggccaacatgatgaaaccgcgtctctactaaaaatacaaaaattagctggacgtggtggcgtgtgcctgtagtcccagctacttgggaggctgaggcaggagaatcacttgaacccaggaggcagaggttgcagtgagccaagattgcgccactgcactccagcctggtgacagagagaaactctgtctcaaaaaaaaaaaaaaacagaaaccaaaacacatacacacacacaaaaccaaaggcattgttgccaaaactaactaatgagacacaacttccagtaatgtttgagtcagctcctcttggaccaccccacccagagagggtaattgtaaactctgggcaaagtaaaaagcaactacctgaaggcactgcagagcattcagaagcaggcagacactggagaggagcctcaagcctttagtccactgatttattttttttctctttgttttctctcttttttgtttgtctcttttctttttcctatcttcctgtattagtttgttctcacgctgctgataaagacatacccaagaaagggcaaattacaaaagaaaggtttattggacttacagttccgcatggctgaggaggcctcacaatcatggcagaaggtgaaaggcacatctcacatggtggcagacaagagaacagagattgtgcagggaaaactcccatttttaaaaccatcagatctcatgagaatcattcaccatcatgagaacagtgcaagaaagacctgcccccatggtggcatgtgcctgtaatcccagctactcaggaggctgaggcaggagaattgcttgaaccgggacctgggaggtggaggttgcagtgagccgagatcatgtcactacactccagcctggactacagactgagactcttgtctcaaaaaaaaaaaaaaagaaagacctgcctccataattcaatcacttcctactggtttcctcccacgacatgtgagaattgagggagttacaagtcaagatgagatctgggtgaggacacagccaaaccatatcattcctcccctagtcccttccaaatctcatgtcctcacatttccaaacctatcatgccttctcaacagtcccccaaagtcttaactcatttcagcattaactcaaagttcacagtcccaacatctcatctaagataaggcaagtctcttctgcctatgagcctgtaaaatcaaaagcaagctagttattttccagatacaatggaggtacaggcattgggtaaatgcagccattccaaatgggataaactggccaaaacaaagaggctacaggccccatgcaagtccaaaatccagctggacagtcaaattttaaagctccaaaatgatctcctttgactccatgtctcacatccaggtcacgctgatgtaagaggtgggttcacatggtcttgggcagctcagcccctgttgttttgcagggtataaccccactcctggctgctttcatgggctggcactgagtgtctgcagcttttccagcagcacggtgcaagctgttggtggagctactgttctggggtctggaagatggtggccctcttctcacagctccactaggtggtgccccaggagggactctgtgtgagggggctccaaccccacatttccctttcgcacttccctagcagagattctccatgagagccccgcccctgcagcaaacttatgactggacattcagacatatcatacatcctcttgaaatctaggcagaggttcccaaacctcaattcttgacttctgggcacctgcaggctcaataccacatggaagctgccaagagtttgggcttgcaccctctgaagccacagcctgagcttatcttggccccttttagtcacagctggagtggctgggacacagggcaccaagtccctagactacacacagcatggggaccctcggcctggcccatgaaaccattttttcctcctaggcctcctggcctgtgatgggaggggctgctgtgaagacctctgacatcctctggagacatttttcacattgtcttggggagtaacatttggctccttgttacctatgcgaatttctgcagccggcttgaatttctcctcagaaaatgtgattttcttttctatcgcattgtcaggttgcaaactttccaaacctttatgctccacttcccttatgaaacaatgcctttaacagcacccaagtcatgtcttgagtgctttgctacttagaaatttcttccaacagataccctaaatcatctctctgaagttcagagttccacaaatctctagggcaggggcaaaatgccaccagtctcttcactaaaacataacaagagtcaccttttctccagtgcccaacaagttcctcatctccatcagagactacctcagcctggaccttattgttcatatcactatcagcatttttgtcaaaaagccattcagcaagtttctaggagattccaaactttcccacattttcctatcttcttctgagccctccaaactgttccaacctctgcctgttacccagttccaaagttgcttccatatttttggatatcttttcagcaacaccctactcctggtcccaatttactgtattagttcattctcatgctgctgataaagacatacctgagactgggcaatttacaaaagaaagaggtttactggacttacagttccacgtgtctgaggaggcctcacaatcatggcagaaggtgaatggcacctctcaaatggtggcagacaagagaagagcgcttgtgcagggaaaactcccatttttaaaatcatcagatctcatgagactcattcactatcacaagaacagcgcaggaaagacccatccccataattcaatcaccacccactggattctcccatgacatgtgagaattgtgggagttacaattcaagatgagatttgggtggggatacagtgaaacctatcacttcctgtgtgtcacttgagcatttttttttttttgagatggagttttgcttttgtcacccaggctggagtgcaatggcgcaatctcagttcactgcaacctctgcctcctgtgtttaagcacttctcctgcctcaccctctctagtagctgagattacaggtgctcactaccacacccagctaattttttgtatttttagtagagatggggtttcaccatgttggccaggctagtcttgaactactgacctcaggtgatccacctgccttggcctcccaaagtgctgagattacagttgtgagctaccgcacccgccccacttgaacattttttagaactccattctgagttatctgtagtgttgatgagtgtatctttttggctagtttccttagtggttgcttctaggtattaagtttatacatgcatagcttaccacagtctactagtgttaacattccagttggagtgatgtataaaaccttaccttcctttagttctttactttccctagcttgtaatatagttgtcttaaatatttcctctacatacattaagaatcttatcacacagcaccaaacataatttggaaaacctgaaagaagatccatagtatttacctatatttttactatttccattgtttattctttcttcctgatgctctaagagtcttctttttatcatgtcctatttagagaatctcctttaaccattcttttagggtaggtctgctggtgacagatttttagactttatctgagattgtccctgtttcctcttcattccaaaaggatattttaattagatagagaattctgagttgacagttatttttgtttgacacttgaaaactattgtgtcatttccttctgttctccgtggcttctaatgagaaattcatcatcattcaaattgtttttttcctgttggctaacctaaatgctgtttcttactgttttcaaggtattttcgttgtgtttcagttttcagaagtttacggtgtatctggcatgaatttctttggtttaccctgcttggggtttgctcagcttcttcaatctataggtttatgtcttttgtcaaatttggggatttttttcagccattattttctcaaatacctttgcaactccaattatttcttccagtgccgtttccctctatctagtagtgttgtggtttttattaacagtacatcaccctcctctcccaaccccagttcagaaccagatcttgacgtagagtttagagttcttgatctaagatgatgtcagatatgtcactgatccattaaaaggcccacttgttgacatggttctgcttctggtgtcatggctatgtctttgtcctcctacttgcttaggctcactactttttatgagaagcaggggcaaccttttttttttttttttttaaccctactggcttccagcaacaataaagcaatatctatttctctatcatggggtgatatatagcatacaaatccagccccttgctaccccatgctccttctggactcagagcccaggaaacctctagtttttgtctcactttactcttctatcttctatttgtggtccattgacatatttatcttacttttgggtattactctgtctttttaactatcactgcttcattgcttcatatgtggagcagaatggttgtgttgaagcataaactggttgagaagttcttgtacattcttagaaaaaaaaaaatagagccaaggtttcactatgctgcccaagctggtcccgaactcctgagctcaagcaatctccctgccgtagcctcccaagtagttagactacaggcacgagccactgcacccagcccctcttgcgtttttaatgcagtttgctgaacgaaatctctgtaaattattttgactcttcagttcttcattctttgggtctggttttgcacagaaagcagtgtgattctaagccagtcattcaccctctgtggctgcagttttctgaaatgcatagtgagatggttggactaagtcctttttagttcttagagtcaatatgtcaagaaagatataaaattatcaaacagaagaagttactcttgattccaaacttcaaaattaggattctccaaattgaaaagataaaagcagaggtagtataggatttcaattttgattatagcaaaggacttcttggccattagaagtagaaaacatttcttgaaaaacgaagaagaaccttagaataacatgcagtcttacagtaatcacaaggtagtaattataaggagtttgtattccaagagtccaggtggtaaatatacataatttcaggaaaagtttaaacatatatatattagcaatcgaaggaagtgggattttgttaatgtggaaaacaatccagctgcccataaaatactcctatattcctactactagggatgtggaatacagtgagtggaatttgacctaatataacacatttgggattattttaaattatcattttaaagctttgttttggaagtgttataataaaatattttcatctaaaataaaaattaactattatccattcctttggaagatgtcaattttggccataacattttagaatttgaattcttcattccataaatccctttgtgtttcattgttttatgtaagttttatgatgaacttcttgcatagagcattttataagagattgaatttcaataaaaatataatttatgggcctagagatcttgaggaaaaatataactgtatctgaactattaggactgtctgtcttagtgacagagtaatgaactgcatgtgaaatgcttgtatgggtcacatcttttttttttttttttttttcttgagactgaatcttgctccatcgctcaggctggagtgcagtggtgtggtatcagctcactgcaacctctgtctcccaggttccagcgattctcctgcctcagcctcctgagtagctggaattacaggcacacaccaccacacccagctgatttttgtgtttttagtagagacagggtttcatcatgttggccaggctggtctcaaactcccaaattcatgtaatccacctgcctcaacctcccaaagtgctgggattacagtcgtgagccactgtgctcaactgggtcacatcttttcttttaaaagaccatttttttgctgggtgcaatggctcacacctgtaatcccagcactttgggaggccgaggcaggcagatcacctcaggtcaggagttcgagaccagcctggccaacatggtgaaaccccgtctctactaaaaatacaaaaattagctgggcgtggtgacagggacctgtaatctcagctacttgggaggctgaggcaggagaatcacttgtacctgggaggcggaggttgcagtgagcctagatcatgccactgcattccagcctgggcgacagagcgagactccttctctaaacaaataaataaataaaaggccatttttacctaaaatttcaattacttttctggcaaacctatctcagatattaaggaattcacttaatataatttattactagcataggagtccaactctgaattcatttatgtcatacctgatataaaaagaaaaacattacagaattacatgaagtaaaaagtgaaagttctccccttgccatcttcctcacttagtgtagccactgttaactctttgggacatggaaatggtgacatttcaaagagctttttacatgatttcaaaagggaaaatctcatttcaggttctgagcaacattcatacagtcagagccacatggcaacctaaaaagcccaaaacatggaccttttctccccaggtaagtaatctgctgaatgagtggagtgagtgaatttcaaagtagaacatattcatatttctataaatagcacagagtatgtgggaacagatataaatctttagattctttggtgttctttgaggacattgataaaaattactcatgtttctgactcaccaatgttagtaattcctatgaatcatcccattcaatcagtttcagggttcatttttagaaaattctcatttgatgaaaaatgaaaacataaagataacatttaggaagtggggtgtttttcaaagatgaaatcttccaactgtgctaataaaagctgtgctttcttcagataaagtcagggatgacgcctgagggactgctacattacacccacacactgtcaagactggaatggcattaggtgggtttaaaccactgagtcagcattgcatagacgtagggaggacaaagatgtcttcgtgttgtttttatagtatcaattgtccatattttattttacattactttcgtctacctccaaggtctcattaatttagtatttacttccttcccacagctaactcccttgtataactgcatcctgaaaacccttagttacctttcctcttattgcatcaaaagatcttaaggcaagatggaggttcagtgagagggctcagggtgtggatgaggccagccacctcaactgtgtgctgtgcctgtccagacttgtcgagagcacacctcctaaaagtccatcttgatcttcttagcacccttcctctggtgagaagcatggcctctcttttggcacagtacttcacaattctgttattgcgtctctgtgtatgtgaagagtttagggtagaattttttaatgtttttcctggggtagaaggaagaactgttgggagtatgtgttattctgttgaatgaaattaaacatcagttatgtgcaagcattttttcctaggcacgtggaaactttttcatgccagtgaagttcctattccagcaaaattagtaggggaaaatacatacatgaagaataacaatatcatctacttatggaaccctaactgtgtgctaggccctgtgccaggctcttacgtacattaccttatttaatcagagtagccatgtggggcaagtactgttggtaactaccactcaggcagattgtaatggctttggagctccaagtgctttggaagcacacaggagggtaaagttaattctagtcctttggctcagggaaagttttctagaagagaaactagatcttgaaggttggatagattttacagtcaagaagggagggatacagttgtcgagggagagtgaattgaatgagcaaaagagaaaataaatgaaaattcacaaggcacacattaggaaagttgagcaaatatgtgtattcagtctttaatttttgttctgtttatgaagaacagtggttaatataaatatcttataatgtctataaactattatttgtaacacctctggagacctaggcacagtactattagcctctactctaagcaaaaaataagcaaaggtaaaggtattttccctttaaaagtgaagttaaatttttaaaatttgtaatcattggcattgatgaattcagtccatctgctttttgtttttcttaaaaggcttttattataatgcaaaggcataaactatttactaacaaatagggctgaaaccctgtgtgaggccgttcttgcattgctataaagaaatgcatgaggctggttaatttataaagaaaagaggtttaattggcccctggttctgcagactgtacaggaagcatggcacaggcatctgctcagcttctagggaggcctcaggaagcttccagtcatggcagaaggtgaagggagagcaggcatctcacgtgacagtgcaggagcaagaaggaggaaggaggtgccacacacttttaaaaaaactgatctcctgagaacgaactctctgtggtgaggacagtaccaaaccatgagggatctgccctcatgacccaaacacctcccaccaggcctcaccttcaacattgggattacaattcaacatgaaatttggtggggacatttattcaaaccacatcaaacccccttcccattttttatttttatcaataactttaatttctttatcatttcaggttactcgcatcttaccatgtttgcttgatggtgattgctttatcaggtctaattctgcatctccagatcttggaatattatttgaacttggaatttcttatattcgcaatgtatgtccgttgaaagataaggctttctaatgtatcagttaaaagggaaggttaaaaaatgtgtctattgacaaggaaatccttgaagtctttatgtgtaattgaattttaatcccttgaggaatgagaatgccagtgattctaattttatgtgtgctgatttgttttcgtagcatttaaaataatagtacttattcacatttatagcttgagtgaactccagtgcttttaaagaataaaaattcaaaaaggatgggactttgcagaaagtgagaaaagatgctcactggcatcccagcgccatggttcacctctgtcttccaggggcagagtatacttagccttgtaactgaggtttctaattaagggacttagcagagtagtgacttttataaagtgagtttaacttatgtcatataaactactgaaccagtgggtggggctctgtgctagtaattaaatgtttccacatactaataatagcttgataggtatagtatatatagttgacctcatggtaacccagagagcgttacagagatgttacattaatggtattacactgtccattcatttgtttaaggcaaattcatccatatgtattgtggagggggtaggactggggaaaggagcaggccccccaaaggaagccttaggggcctctagcaactgacagtgggggtaaaattccaagcagaaaagcccttgaatgattaatatctgcattctatctgtcagtgaaacaaaggttcatcatcccatgtagtactgatatgatttgagatcactccacagaatgcttatatcagtcaagagacaatggcagcagttgccacatcattggtttaagggattttcgagagcaattttgacaaaatatgattatcacttgatatactacctttaatatctgacccgcaggcaaaatgagattctactgtgtttcattttattttcttgtgaagaactttttagttctaaaggtgaatactaattttgttcctttaaaaggacttggtatgtgcttataaatttgactagttcagaccttaagtttcatatacttgtcttatttcctagtcaactggtgaaagaggagagttaagctgtggctgggtgtttcttaaactttttgatgccagtggagttcctattccagcaaagtaagttggctatatattcctaacgaatgaatacttctgtaaaaattcattttttagactcttgatacctcaggtttgttctatgagcatgccaataacttttggggagaggactttttatgttgactttagtgttgtttaggcagtgtatgaaaacagcatgcacagtctcatcctaaggaggaagaaatgactcctagagaagaggtattttaaaagatgtttgcactagccatctgctgagaatattctttcagtaatttcctatggtattaacacatttcaccatgctgaaaacagagcctagttgtcttcaaagagtgggaaagttaagtccagagtccagaggtcctctgtgagtctctacccttcctctgtaggtgggacattgaaatcacagtggcaaccacggtaaatgatttaaactttaagatcaaaaggcagactggaagcaaatactgcaatatgtacagaagagttagaagatcattatccctaatataaaaggaactctcaaaaattaataagaaaaagatcatctaaattttaaaatggaggaaaagaaagatctaaatctaggatataaacaagaaattcaagaagggacacaaatgggcaggcagtaggatggtgattaagatcccaaatttggattataaaattttgggctccagtcccagctctacccatgtaactgtaggtggatttcttaacatctccaagtctgaatttcacctatctttaatctggaagattgtaataattcctactccaaaggcttgttgtgaggattaatttagataatgcgccttatgtggcctcctgccacattggcagaggtagaagtcctgactgtacaagtcctttgacatcatcctagagggtgcattacctggggtgccaggtttcttgtgattgttatttgcttttttgtttttgtcttttaatatgctcagggtttttagttgtgcttagtggaagaaataaggaattgtatatctattccatctttctgaaagtgaagtcacagctatttttttaaatgaggtagagctctgtgtattaatatagacacattttcagtgtattagtatatggaaaaagttgcagaatattttgaatactgtgactccacttttgttcattaaaaactatttgtgggccaggtgaggtggctcacaatgcctgtaatctcagcactttgggaggccttggcgggaggatcacctgagcctgggagttatagaccagcctgggcaacatggtgagaccctgtctctacaaaaataaaaaaattagccaagcatggtggcacacgcctgtaatcccagctactcaggaggctgagctgggaggattgcttgaggctgagaggtcgagactgcagtgagcagttttcatgccactgcgctctagcctgggtgacagagcgagattctgcctccaaaaagcaaaaacaaaacaaagcaaaactgttcccagaagttgcctctgaggagcagaattgaggaggtggtgcattacaattaaagggctcttttaccttcttctttctacacttagtatgtgacttcaaaagaaaagcatgtagagtgttagttttgaagcatgtgttagttttgaaattcaccgtgtttatacatttgtttgcatttgcatagaaaagatagggcaggagattaaccacactagagaaggcggcatggggagggatttttcactttttacttatcattcctctgccattcaaactttttataataatctacacgttacttttatattttaaaaataatataagttcatagtggcctcatttcaaataatgatttaacacatttgaaaaatacattaaaaaaaatcacttgtcattaatgtaagtcattaaggtctgaacacgttaatgacttgaattaatttttctcattttcaaggaaaaatgtattttctacagtgtatagttaggaaagataattttctgcagcttataattaggaaagaaagactgtttatttgcccagatagtacctcatggagggatcaacaattattcttttcatttaccaacgaggcataaatgaaatgtctgagtatattagtgctaaaaaatatttaactactgactccagtgttttctacatgcccacagcttatatctgtcattgtatgttattcttttatagaacttatgagcttttcttgaatggtggtactccttatgaaaaaggtattgaagtggacccttcaatatccagaagaggtatggctctcatgtgttgtcttcctttccttaaagattaaacaaatagaagcatctgagaggtagctacattctaataagcatagcgttttttacttgaattcacacttttaaaaatatgtcatttgatataaaaattttaatcatttttaagtacttattttcttggtaacacatatgagactctaagacatcatgaagaatgaaatcatgaagaatgagaactaatgcattagttccttttcattgaccactgaactgatacttgtgactaatacagagactgcctattgctgggtcaaaggatgcagacatttgaaacagtaatatgcatgccaaattgccctctagaaatattgagcatcttttactatgttcattaaccaggcactgtgctagataatgggagaatgaagagcaagacagatatggtcattgcctcatggggctcagagcctgacagatttggaattccatttccactcctcagccacccctctatttgtttggtgattcaagacatgccacctctgctgaccccacaacgccagtcctgccttcttggaacagaaaggagtttggggtctgggatgcagttggttctacctggagtcagacatgctgttttcctttgtaatctggcagcaataatgctgtaactcatgtgatttagcaaacaatcctgtgcccttagggaggtctctcagctcatttagggtatatggatgactcttgcctttcattcaattcagcactactgggtggtatattttcatgaaatacttgttttattatactcactgtctcaagtacttaaagtttcgtgagttacttttgatttttcttaaaagcacacggcagtgttttctaccagattatgacaatgagaaggcagcctcaacttctagtgaaactgagatccttgaacagaagatcaagaaatgtactaaggtgggtacctgcttttacctgtccagtgaatttgggatcattcagcacttggagaccatctctgcttttggcttttcctcatatttagtcatcttttgttataatatttttgtcctctttaattcttcccccaaaggtcagtagggaaatgggtaacaaagctgaaattagcttactcttctatttactagttagctcttctaaccaaatctgttatttgagccatctagtaaatagaagacttgactaaatggggcttaccaatgcatgattctaccctcagggaacttttttaaatgtcaagtttattgagatataatttacatgcagtaaaatttactctttttagtttataattctttgtgttttgacaaatgtatactgtcatgtaattaccactacaatcaagatagagaactttccctcactctaaaaagttatctcatgcccctttgtagtcagctctgtatccccagcctcaggcaggcacacctattttctttctcagcagttttgctttgtccaaaatgtcatacaaatggaatcataacactcaggagccttttgagtctggcttctttcacttagcctagtgcatttgagacttacccatgccattgcatgtgccagtaatttgttcctttttgttctaaatagtacagactgtccctgacttactcaagatttttcaactttaccatggtgcaaaagcaaaacctgttcagtagacactatacttcagtacagattcaatgaattacatgagatatttatactttattacaaaataggctttgtattagatgattttgcccaactgtaggttaatgtgttatgagcatgtttaaggtaggcctgtctaagctctgatgttcagtagactagttgtaggctgggcatggtggctcacacctataattgcagcactttgggaggtggaggtggtagaatcgcttgaggccaggagttcaagaccagcctgggcaacatggcaagaccccatctctaccaaaaaaaaaaaattagctgggtatggtgatgcacacctgtagtcccagctacttgggaggcttaggtgggaggattgcttgaggattgcttgagcccaagaggttgaggctgcagtgagctgtgatggtgccactgcaccccagcctgggcagcagagtgagaccctgattaaaaaaaaaaaaagtctaagtgtattaaatgcattttcaacttatgatattatcttcaacttatgatattttcaatttatgatgggtttctggggctataacccaccataagttgaggagcatctgaattccctttgatagatatactacaatgtgtttattcattcacaaattgaagggcatttgggttgtttctaggtttgggcaattataaataaagctgctttaaacatttgtgtacaaattttctgcatgtggatatatgtcttcatctctcatgggtataaatacctaggagtgagattactgggacatatggagtttaactttataagaaactgccaaactgttttcatttttctttttctttctttttttttttttttttgagacagagtctggctctgtcccccaggctggagtgcagtggcaccatctcggctcactgcaagctccgcctcccgggttcacgccattttcctgcctcagcctaccgagtagctgggactacaggcgcccgccaccacgccctgctaatttttttgtatttttagtagagacagggtttcaccatgttggccaggatggtctcgaactcctgacctcgtgatccgcccacctcggcctcccaaagtgctaggattacaggcttgagccaccgcatccggccctaccaaactgttttcaaaatgactgtagcactttgcactctcattagcaatgtatgagagttccagttactctatattcttgacagcacttgatatgatcagtttttctgttttggccattctaataaatgagaatagtggtttctcatggtgttttaaatatacattttcctcagggagtttgtaaactaataaaatctcagatctatcagtttctcactcagtaccctcctagactagtcatttaacatctctatcagggtcttaatgtctacatctttaaaatggacataataataataatatcaaccccataaaggtgtaatgaggtttaatggaaagaaaatacataaaacagccagtatttacagtgtgtggcacatggtaactaacacaatagtgttagctataattatttactactataattatcttatatatagataaatgtaaacataaagccaggtagatggtgctatatcataaaatttgttcaaatgaagatgtgtagctggtaaaatcagggggcatttgaaatcacctttgaaggattgggaagatgcagaggaaaggagctccacagaggaggcacaaggccaagagggggaaggaagagcatggcatgggacagagactgttgcagctgaactgtcccaccatgacctgctcattgctcacagattattaagaagtagggaagtcagtgaagacttggcatgctcctgtgaatggtttttctcattccagatcatagtcttagcttaaatatcccttgttcttaccactactactgaaatttattttataattatagtgttaacagttcaatctttcaatagccattaataatgtgttcatgggtattatttactctcttagcttttttcccccttggatgttcatagagcctgtaaatcctcttttttggccagcctttccttggaaaattgttatttttcaagattagaaagaaagcagcacagtagtagtctttgtgaaagaaaacccaaatcttgtttggcctcattcttcctacatctttggcctccccactcctcatcttgttgataagcttccaagagtccggaagcactcccatgtgtatatttcaagtacagctcttaatagtgtttctttggcccccaaatactggttttcagacactttgtatgacctcaagatcaaattggactgtgtggtgcagaagttagcaaggcagccccttcttcttaagcagtgaatgctctactgtatgctgggttcttaaaggtcctgtgtccttgtgctccatacctcaggactgcgtcatttgtttcattacagtacagaataggcacccgaaaaatgtttgtgaaataatttcaaagcagagctctccctgctagtgtgaaaatatactcctcaggacttccgctcagcttccacctgtccctggcctccctctgccttgtcttggtgtgtgctcttccacagagagacttgagtgctggcttgaaattgcctctccactttgcatgaccccaaaatatacattcctgggaatttcaaacgtgagttgggacacactgctggtgcaactccaggctggctcgcacagaaaccagcttatgggcagtgaaacctgggccttgcagcagggctgggggctgtagtcagggggcggggtggggctgtgctgtgggttcaaggtaagagactaggcaccagcctgggcccttttggacatcactgagcctgtgcatcctggaggtggagactgaagcaggactgatccatttcaacatcctctctcctcccctgacccgaaaccttcggtaggtgggagaacaagacgggtaatgacaccaatagtccttctcctcctctccttcaaaggcacgccccgcctctatcctcaccctcccttctttacaaacttcacctttgtttatgcaaacttctctgctcaaaggagaaaggacaggggctctttccattatgccaaaggacatgagacagtggagacaaggccaagggcagaaagcctagttagagtttgcattagtgcccatttttacccagtgcccttgctgtttggctttacactgccctctctgactcagccagcagtcctacacatgtatatcttttggatatcaggaatcctgtgaaaatgtgaattattcggtgtagaccactggcaccagagtcctgctcacggggcttggcagtcttcttttgtggagtaggttgtgatcatggcgaccttgtcaacataagaaaaagagagcaaatagatgcttcagtttcaccaagatttgtcttttggagctatttttcaaaagggtttaacttgatgtgatttgaccaaaagcatgtgtataaacccctgaggagggaaagccctgaatttgacttcagattttcagtgcatgagttctaaatatcaagaaaccctgatctggagaagtaggttgcgtgtgtgtgtgtgtgtgtgtgtgtgtgtaaatttgctataaattcattatccttttttttgatgcattccatcttttttctcctttactttcattatatcgttgctaaaaataaataaggtaataatgttagttgcttgaatgcttgagacccattcattgtgttcattgccagagtttgctggtctacatgtgaattcaggaggaagtatatttttacttacttaattcagctaacctttagcagcccagaactttctattcgtcttaagtttgggaaaatcagatgctttctctaaagaatatctaataaagggcaagcagcattgcttcatgttgtgagaaagtgccagaaggaaaggagtgcccacactgggtggaccaatgcctgccaggcaaagcaggcaggtctacgagaaaaggagagggccaagcagaaggaaggaagttcccacccctttccctggcaaaaccttggctgttcttcatcatgagccctgagtttgggcatgcagctgaaacactgtgcaatgggaccgtggaccaaagggcagaacatgagcatgttgttcatgctcaggtcgttctgccccttgctcatgaacatgtccatggtcccagaacaacccagaatcagagcctgatccctgagaaagcatgtggtgacactgaggcagctgaaatggtcccctgcatcccgtctttaaaatgtaggtcaaatgtatacaagatcagaatttagccaggttgaaaaaagacagtttaaaaaagacagtttctgaccttatgtatcacatgctgtatatcaagataactgtgctaagagaacctgtattatatttttagatgtttctagaaattcaggatttaaagagtggtcaaggatacttctttaattccatgaaacttttttttttattataagttttagggtacatgtgcagaacgtgcaggttagttacatatgtatacatgtgccatgttggtgtgctgcacccattaactcatcatttaacattaggtatatctcctaatgctatccctcccccaccccaccccacaacaggccccggtgtatgatgttccccttcctgtgtccgtgtgttctcattgttcaattcccacctataagtgagaacatgcggtgtttggttttttgtcttgcgatagtttgctgagaatgatggtttccagcttcatccatgtccctacaaaggacatgaactcatcattttttatggctgcatagtattccatggtgtatatgtgccacattttcttaatccagtctatcattgttggacatttgggttggttccaagtctttgctattgtgaatagtgccgcaataaacatacgtgtgcatgtgtctttatagcagcatgatttataatcctttgggtatatacccagtaatgggatggctgggtcaaatggtatttctagttctagatccctgaggaatcaccacactgacttccacaatggttgaactagtttacagtcccaccaacagtgtaaaagtgttcctatttctccacatcctctccagcacctgttgtttcctgactttttaatgatgactgttctacctggtgtgagatggtatctcattgtggttttgatttgcatttctctgatggccagtgatcatgagcattttttcatgtgttttttggctgcataaatgtcttcttttgagaagtgtctgttcatatccttcgcccactttttgatggggttgtttgtttttttcttgtaaatttgtctgagttcactgtagattctgtatattagccctttgtcagatgagtagattgcaacaattttctcccattctgtaggttgcctgttcactctgatggtagtttcttttgctgtgcaggagctctttagtttaattagatcccatttgttaattttggctttggttgccattgcttttggtgttttagacatgaagtccttgcccatgcctatgtcctgaatgagattgcctaggttttcttctagggtttttatggttttaggtctaacatttaagtctttaatccatcttgaattaatttttgtataaggtgtaaggaagggatccagtttcagctttctacatatggctagccagttttcccagcaccatttattaaatagggaatcctttccccattgcttgtttttgtcaggtttgtcaaagatcagatggttgtagatatgcggcattatttctgagggctctgttctgttccataggtctatatctctgttttggtaccagtactgtgctgttttggttactgtagccttgtagtatagtttgaagtcaggtagcgtgatgcctccagctttgttcttttggcttaggattgacttggcaatgcgggctcttttttggttccatgtgaactttaaagtagttttttctaattctgtgaagaaagtcattggtagcttgatggggatggcattgaatctataaattaccttgggcggtatagccattttcacaatattgattcttcctgtccatgagcatggaatgttcttccatttgtttgtatcctcttttatttcattgagcagtggtttgtatttctccttgaagaggtccttcacatcccttgtaagttggattcctaggtattttattctctttgtagcaattgtgaatgggagttcactcatgatttggctctctgtttgtctgttattggtgtataagaatgcttgtgatttttgcacgtggattttgtaccctaagactttgctgaagttgcctatcagcttaaggagattttgggctgagacaatggggttttctagatatacaatcatgtcatctgcaaacagggacaatttgacttcctcttttcctaattgaataccctttatttccttctcctgcctgattgccctggtcggaacttccaacactatgttgaataggagtggtgagagaggacatccctgtcttgtgccagttttcaaagggaatgcttccagtttttgtccattcattatgatattggctgtgcgtttgtcatagatagctcttattattttgagatacgtcccatcaatacctaatttattgagagtttttagcatgaagggatgttgaattttgtcaaaggccttttctgcatctattgagataatcatgtggtttttgtcattggttctgtttatatgctggattacatttattgatttgcatatgttgaaccagtcttgcatcccagggatgaagcccacttgatcatggtggataagctttttgatgcattccatgaagcttaattactcgtggaatccattgctgtcacctcatcacagtggtcacattcatcctgttctcttccaacaggctggaagcctgaatattacctctgtgataattttcccttctaaaaatctaatcttaggaattaagataaaggattaatttacaaaaagtaagatctctttttaaatctttggtgatttttctcagcccaaagacatcttccttttgatagaagacaacatatcatttgtaaggtttttgagattttctatatggtccttcctcatgcttaatgacagagtttatatatttctaaaaatagtattagaaatatatattagaatgatctaagatattttcttgagtactttcaaaggttaaatcttgtgcatgatacattcccagtatttactatacatcatgtgtgagggtcttaaagaactcacttttttttttttttttttttttttttttgagacggggtctcgctgtgtctcccaggttggagtgcggtggcgcaatctcggctcactgcaagctccgcctcccgggttcacgccattctcctgcctcagcctcccaagtagctgggactacaggcgcctgccaacacgcccagctaattttttgtatttttagtagaaacggggtttcaccgtgttagccaagatggaagaactcacttttcatgtttccagattattattttgaaatctaaatattgaaattttttatatttttaaatttctgactattttttgatgctattgtaaattgttttgttggtttccttctcaaattgtgcattgttagtgtataaagtacgatttttacgtgttgattttgtattctgcaactttgctagtcatttattctgaaggtatttttcatggagtatttagggttttctacatatattctacatatttctacatcattttgtctgcaaacaaagacacttttctttttttagaaaaatatttccattattgtgttgagtaaaagtggcaggagcaggatccttgtcttgttccttatcttagaggaaaagctttcagtgtttcaccactgagtatgatgttagctgtgggcttttcatatatggcctttattatgttgcagtagtttctttctattcctagtttgttgagtgtttttatcatgaaagggtgtcaaattttaggctttctcagcatcaattgagaaaataatgtgggtttttccccttaattctgttaatgtagcacattatgttgattgatttttggatgttgagccatccttgaatttcattaataaatttgacttggtcatggtgtacaagctttttaatgtgctgttgaattcactttgctagtattttgttgaggattttgcatcaatattcaggaatattggcctgtagtttttttttttttttcttgtagtattgttggcttttttactagggtaattctgacctcataatgagtttgatagtgttttttcctcttcattttttggaaaagtttgaggaaaattggtgttaattcttctttaaaggtttggtagaattctccagtgaagccatctgatgctgggcttttctttatcaggagattttttaaattactgattcaatctccttacttgttattgagattttctatttctttgtgattcagccttagtaggttgtgtatttctagaaatgtgcctgtttcatttaggtcatccaacttgttggcatacaactatttatagtactctcttacacattttttatttctgtaaaatcaatagtaatatcccctctttcatttctgattttagttgagtgttccttagtcattctcactaaaggtttgtcaattttgttcatcttttcaaagaacagagtcttgctttcattgattttctctattgtttttctattctttattttgtctatatctgacctaatctttattatttcttccttctgctagttttgttcttctagttccttagggcataaagttaggttgttgacttgagctcttccttcttttttaatgttaagtatttatagctataaatttccctcttaggactgttttcactgtatcttgtaaattttggtatgttgtgttttcatttcatttctcaagatattttctagtttctcttgagatttcttctttgagccattgttgtttaagtatgttgtttaatttccacatatttatgtgttttccagttttccttctgcttttgatttctagtttcatttcattatgattgaaaaaagatattttgtatgatttcaatatttttaaatttattaagacttactttgtgactcaacatatggtctttcctggagaatatgtcatgtgcacttgagaaaaatgtgtattctgctgttgccgggtagagtgttttgtaaatgtcagctagatccaattagtctacagtgttattgatcttctgtttcattgttctataccttatcgaaagtaggatattgaaatcttctctattattatagatctatgtattgctcccttcaattctgtcagtgtttgcttcatatatttaggagcactgatgtttggtgcatatatgtttataattgttatatattctgaattgactgttttatgattgtacaatatcctttgtctcttgtaacttttggggggcttgaagtctattttgtctgatattaatatggctaaacatgttctcttttagttgctatttgcatgaaattttttttctgttctttcactttctacccatgagtgtcctaagtctaccgtgagtctcttatagataacatataattaaatcgtgtttttttagtgcatcctgccaatctgtatcttttgattgaggagtctaatttatttacatttaaagtgattactaatagagaaggacttacttttgccattttattactcatttgctgcttatcttatagctttttttgttcttaatttcctccctcactgattttctttgtgtttgatttttcatagtgacaaattttgattcccttttactttccatttgaaaatattctatagttattttctttgtggttaccatggtattacatataacatcctaaagttataacaatctattttaaactaataccaacttaacttggtattgcatacaacatccttaggttatagcagtctatcttaaactgataccaatttaacttcgatgttgaattattttctattttttagcccttactgtataccagacactacattaagcactccatacttatttcatttgttgttgttgttttgttttgagacagagtcttgctgtgtcacccaggttggagtgcagtggcacaatcttggctcatggcaacatccaccgcccaggctcaagggattcttctgccttggcctctgagtagctgggattacaggtgcccgccaccaaacctggctaatttttgtattttcagcagagatatggtttcaccatgttggccaggctggtctcaaactcctgacctcaagtgattcacctgtctcggcctcccaaagtgttaggattacaggtgtgagccaccatgcccagcccacacttacttcattttaatccttttagtaaccttctgaaatgcaagtattactattggtatccaataaatgaggaaaccaaagcacaaggagatgaattaattaatttaaagtcacatagctaagaagtgacaaagtcaggacttattccaggtctgtcacaccctcccatgttccacccagtactgtgaacagcctgaattatttcttctgcattcaccaaatcaggcatggcagccacatgcctttgttaaagcttgtagctgactagtccccttctttccaaaacataattagtggcttcccgtttttatttgacatttaacataggtatatatgctaacatggaagcacaaaaatggcaacacagggttgagactcgaaagtgtaaacaaatataaaaagttatctgaaatttaatgtggcctacttgtagtagaaatttttctttaaatagttaaaaatgtgttccagtaatgaagcaaaatttgggactgtttattaaagtaatatacatcaaaacattataagttggattgtaggggattgtctaatgaatacatttttttcttctttaatagtctactgccagaaacattaattggaaatatgtgttctattcacttgttgatattttatcgacaaattcttggagatgtgctcctgaaagacaggatgagcttgcaaagtactggtaagtgggctttgccacttccttatgtgcagtaatgcttcatactctgagtaaaggtaacctataccatcttgtatcttctgtttctggttgtgacttttggaataaaatatttagaacagcattgatgttaatacattacttatgggacatcttcagatccaaagcattgagctttgtgaactcgacacatattcagttctttcaaacatatgtattttcacatttcaaattctagagttttgagatcccaagagtcagatatagtcatattttcccttaatgtctctgagtaatctgttttttcccatgtgtttggtatgcacataatcattttgaagagaaaccaaaatcaaccaaaatagctggttcttagtgcatgaagtataagtatcaaatggattagtttaaattggtgaatccagatatggagtatttgggtgtcctatgtactgtctttattcttgcaacttttttgtacgtttgaaatttttaccaagtaaaatgttaaaaaataagtttaaaaatcaatgagtcaccatacatgattgaacctgcaaagataaatgcatgtgttatagtaattgccttcaaaaagaaaagcagtttaattgtattggctcttctttcagttcaataaatcagtaaccagatatgtactgagtacctggtatgtgccagatattatgctaggcccagtgatgaatgagacaggcataggcgtcccaggcctcaaacacataatttcatgaataatcctctccacccttttgaaataagtgctgtgaaggaaaatacacaacgagaacatgcactgggaagacttgattaatgtgtagggtaaggaaaggcttctttgagtgagtaatatttaacaaaagatgtgagagaggaattagacctatgagggaagtgtgtggggaaggattctttctgggtagaggggccagcatgtctgaagacccaaggaaagaagacatgcatgtgttggagggcttgaaattgaggcaggccagtatggatggagcagagtgagtgagaggcttagcacttgtggacaaataacattcataggcaggagtcctctcccagggacttatcacctggatagataggtagaagtggaactcaaaggcagagaagcgcagaaagttctcaaggaatcattataactctaagggggaggacgggtaagccttttaatcaccattgcctttgaattcattttcatgactcttgagaaacttcatgaatgatgtgacctcttaaagaggataaggcttgttagttttcccaataggtaagaagtttactcagaattgttgacttcatttgaatttaatcattagaataaaatatcctaataatatctaaagaatgaatttttctctactgaggacaccagattatagaataccttgcccttgccatttcaaaagtgtctgctatggtttcagtgtgtcccatctaaaattcatgttaccaatgtaatggtattgaaaagtggggcctttgagtggcgattaggccatgagggctgttgccttatgaatgggattagagacccttacagaagggcttgacaagggaattcgtctcacccttttgccttcagccacgtgatggcacagtgttcctcccctctggaggatgttgtaagaaggcccttaccagacaccaaatgccattaccttgatcttggatttcccagcctccagaacttggagaaataattttattttgtttatgttacccagtctcaggtattccactacagcagcgcaaacagactaagacatgtctttcctgatgtgcttctttgcacagatttttcatgtgctgttatctattgtgaaatgtcaatattctccctcactgtgtttggtcatatggccagaatcctcaattcctaattcttccagtttcacctaccactgtctgctggctccagacacaagtttgggtccttccctgagcgctggtggcctggaatcagacctgagcagcaggtcctctgtctcctttccccccaatgcttcctagtttctgctcagtctcccaagagcagggctacctctaaggggaagattccttttaccatgccacagccataaggaagaaagagaagttgaagaaaaacacagaacaaaattttctagtcttattctgttcagagcctccttgcccttactctaaaagctccattaatttggtacaggaactcaccaggatatgggtataggggcaaatgaaggttgaagggacagctttgagctctcctagaagtcaaagtgtgtagaatgtgttatcaacaaatcatttggcacaataattttcatctgaatatttttgtgtctattgcaataaaatccattgagtgaagtttgcataaaattctttctgttgttttgcatttcagatttaattagccatcccatgctggccaccttccccatgctcttggagcagcctgatgtgatggatgctctcagggtgggtagcatgcattgcaatggaaacctgctggcttatggaagcagttatacactctgtgttaatgagttctgtctaggcctttttttttgttactaggatgatgtctcccaatccctatccattgtctaggtaactcagtcctcatctttcccatcttagcataaattcccaagggctgccttccctgacccagggagcaggtggagtgcctgctatgtacactattgcaatctttgcccattttttccttgacttaggatggccactgattgtgtcctaagagcaaaaatccaaaatggtctgtaagataaatcaattgaatttgcaggggagaatcagggcatgcacatcatctttaattccatgtgtgctgtttgctgtctgaaataactgttgagtgttatgttaaatcgtatgaaatctccaattttcagccatttttggcctaagtggcagtttcatatggtttagcctaatacatcagggtcaataagtagaagagctgcatgcatgcaaggcagatacacaggtaacatcacaagtgccatgggggaggtataacccaggaccttgaagatttaaagaaggcagcaaagaaggatccaaattctgtttcactagagaggtcctgcatgagagagcctaataaaggccagggccaagaggattttgacctgctgagatgggggtgaagacgttgcaggtagaaggcttagcatgagcagacgtttgaggcaggaaggaatagagctgacagtccagcttggcatgtcagatgcaagtaagggagtggttggtagatgggcaaggtaagcctgagtctcggtgtggggctgagggcggtggtaggtggtgggtaacccaggaaggtttcttctttaggcaaactctgccaagtgcaaagaggcagaacatgtgcaggagggaggtgagcatattagggggtgactcctgctgataaaaactaggccatatgcacctgacagcagaaacagaaggaggactcagtcatctacaaagattcttattagactttgaaaccaattcatatgctagcttggctgggttggggggtgtcaatagtaataatgacattttcaacagagatgtttaagaaaatgttcatggtacatatgatctcctgtaattttagataagttcgtctggcactatagctagataatgcagaatttctctttcttctcctataaagtcactagtatcataataattattcattacacagaacatatatacactgattcttcaacaaagatttcacaagagcctactatgtattaatataaggcactgtgctggccacaggaatatttccctaggtgtgtaacaggaatctgcaccttgttcttaggaggaaacttaggatccctaatctagtctaaaatctgcatttccctgatgagcagacagcttggagatgtgcagtgacttggccggccatggagctcagccatgacccagccggggctgtccctgcgggtcagctctgggtgcacccagaatgtgccacgggctgcttgaaagcatgagggtaaagttgtgcacatatgttatttagcaaaaagaccccatttgagccataataagtataaatatatatacatttatatacctgcctgtgaaaagatctggaagaatatattccagagaggtattggtgaatatctctggatcttggattattttatctacattttcttaattttttcacattgaattatttgtgttatgataattttaaaaaagaaagtggtggttgtttctacacccatgagccttcttctctccgtggcatagtgtattacttaggagaagcttggctgtgctgtggtggttagcacaggtttatttcttacccatggtatgtatccagcatggatcagtggaagatgctgctccacagtcacccaagggtacaggctggtggagcctctactgtctcacagcaccatctggaacaagtagctgcctctgttgccagtttccctgcagaagagggagaatggagaattgttcttgggctttcactgcctttgcttcaaaggggcctgggccacttctgctcacattgcattggccaaaaccagtcacacggtccatttaacttcaaaggaggtatagtcttctttttgttccagaagaaaggaagtggatcttggtgaggtaatagtgacctttaacacgtttgctattcccaaatgagttactctaagtgaaacatcctactatttgctggtggctgaatgaaaaataaggtgggacattgacatgtaactaacaaaaatagacaaattttaccagacactaagtctacatttgctaagtgatactcacgttaaaccatattattaggttggtgcaagagaactgtggtttttgccataaaagtagtagcaaaaaccacaattacttttgcaccaactgaataaaatttaaaatgtacagcatgtgagcctcctagagtttacttacctagcacagttcagtttgtggatgacattttaataataagaagaatggcacttggcctgtttagtaaaacactctggttctgtaagggtcctcttcaaactcctaaggacccatagcacagcagttaatagggtggaggaccatagtcccctcacgtggtaataggtatgaacattccaaaatgttctcatgagtggcatagtctgttatctcctgctgagaaacgctctatcaatgcatcatttattttatggagaatctctttattggtgccatatgttatgttcatcccagggcctccctgctgagaaaggtctgatgctttcaggttactcatgatatcaggtgccaacaggaggatatctactgacatgcacagaacccagaccctggaacaggcagccgtgagactggtcatattccacccacgcattcagtttgccaggaaatggcacagtgaaagtcttaaattcatacttctgtgggactaattgaactctggggtttttatttatttgaggaaatttctgtgaagccctgtggacagattagaaatatttactcacaaaattgtacttcagtctgtctcattctgaccattgtcatcatcatgacagagagaattgtagaaaagtttggtatttggcagtgttttctattttcattactgtcttacttggaaagcttaatactattttattattcaggtgctgtggttgtatagttttcatggatgtgttagtgtttcgctgattctattcttaagttagttttgatttataattatcatgggcttctacggcatttttcacagatacatctgcctggtcattctggtgctgggtcatttgcaatagattcctaattacagattcacttcttgcttgtatagaatctgtacagcatttttaaccctgtccataagtttatttacagagtaaatttgcataagtgttgcaaggacttgttactacttggactaacataatatttctgtttgctctttagagttcgtgggctggaaaagaaagcacattaaaaagatcagagaaggtaaaatatgagtctccacactgaactccatatttgcagtacctggtgtttgcttgcctattctaatcatgtctcttttttagcaaaagtagccatagtcataatccctcttaaccagggaaactgtttcattatggctgcaaaaacacattccaagagggttacgcatgatcgttagctaatgtgagaaggaatacttgttcaagacagccatttcagattactgagttttatttaaataaaggggaagtttctaagccaaagtctctcagttgtgtatcaaatttcttttatttttaaaaaacttctctagctctcaaagcctgtatcaccaagagaagggaaaaaaaaatggcctgagctgtaccatatattgaaaacaatgcattgctcctgcttaccttgctataaaatcatggtaattaccaatccgaacttgctttaatcggtgagtcgtggtttgactgctctcatccaggatttggcaaatgggaagggctatagatggaaaatcttcttggcttttcaggtcttgtggtctctgtcacactactcagctctggtgttgtaacacaaaagcagccacagacaatatgtaaatgaccaaatgtgactgttttcctataaaactttatttatgaaaagaggtgagagtccacatttggcccacagtccatactttaccagtcctgatctaaagtattcattatctacaaggaaaatgaagtaacaaatgagctgaaaaccctaaaaattaggaaacaatttatacattgtatccttatttcagcctccatttgatcagtaccatctacatacatgtgactttgccaaaactgccaggcttagtgctattctagtacagcagccttgggcctgtagacattgcccttatgtggacatgtgtggtgggatgggtgatatctctgtgtagactctgctgcctgtggacagctctgccctcaacttgctgtgctctctgagattcccaccatggcctgtgggcatcggggcttgacatgggtacagctgatgctgcaccattcttatctgtgaagggtctgacatcctcatcaccaaaggacccctcgacctccatcccaggcattgctggaaataagccaacaactctggatcctatgcagaacacctgctacaattatcttagataacatgacagttacctctgatatgctgtcagtaagtaggttcagctgacttggcattgttttagttatatttacccctaaccacactggtgtcaccaaaattagactgcaataccttgacagaatgtgtgagacaccctccatggagcttaggagacaccctggtctcatggagccacgtagaggctctcagggagaactgctccactgtactctgtgtaactctgctcacttccacttctgaagtgccatgtcctgcctgagcagctggctcagagccgatacctgccaggcactaatggcaccctccatcctacctcttaggtggcttttagttaatagagttcacagaatttaacactttaaaaataacaatgttatttgtgggggtggtgttttcccagagagacaaagagttcctgaagtccacgtttctcctggtttaccatgactgcgtgctcccacttctccactccacacgcctacccccattcaggtgggcagaagaagagactgagactgcacggtggaaagttatcactgacttccttaagcaaaaccaagaaaaccagggcgccctccaagctctgctgtcaccagacggagttcatgaaccttttgacctttcagagcagacctatgacttcttgggtgaaatgagaaagaatgcagtgtgacagtggcagcctctagccctcagcttcccacggaatcagatggatcctccacgattacgtgaataaaatgatggaaccaaaaatcactgtcactttacaacttaggttttactcttttctttctacagaccatatttttaaagaaatgtttatacaataatttaaatattttttaaaaccataaaataaatttttataaggaatactgttatatctaaatttaaacagtatttattttttcaaaaacagctacttaagttaatggtatagatttctataaaagcaagattttgtcaaaaactaaatttatgattattcaagaaagtgaaaaaaacaacctacagaatgggaaaacatatttgcaaatcatctaactgataaaggtctagtatccaaaatatttaaatttatgagtgttaataaaatttatcttgttcaatgaagaggaagttaaagtgatccatttgagaaagttgtatcacttaattcagtctgatacttgaatgtgatttacccctaattaagtacaaaaacagagtcgcttttgccttttcaaatcaagaaaataagtgctctgtcaaaagcacaaaaagaaactttcaggcactggagagtggagtcgactcaccctttcaggccttgttgcatctcagataaacctgtgactgctggtaaaataatgtcccaagcctttccttttagtgataaacagtagcagcctgcgttaattgagcacctactgtgtgtctgagcatttctcattagcccagttaatcctcacacctactgtaggagataggtactgttgttttttattaccgccgaagaaacaggccagataagtgaagtaatttgcctaaggtcacagctaataagtggcacagctaatattcccagtaaagataccatgtataattttctacaacctaagatgttctgccttatcggggcgaaccttttaggattccatgtgaaaataaaatatgaggaaaagtttaacctaaataattagaatcccattagaggtacttttttttgatggcatgctgccttaaaagagccatttatttttagagatctgtcatattatgaaagttctgggctatcttagctaacttatcctaaacccttaacctaaatttaacttgagccccagtctcagaaattaacatggtatgaaggtgtttccaggccaggcgcggtggctcacgcctgtaatcccaacactttgggaggccgaggtgggtggatcacctgaggtcaggagtttgagaccagcctggccaacactatctgtactaaaaacacaaaattagctgggcgtggtagtgcgtgcctgtaatcccagctacttgggaggctgaggtagaagaattgtttgaacctgggaggtggaggttgcagtgagccaagatcgtgccattgcactccagcctaggcaacaagagtgaaactccatctcaaaaaaaaaaaaaaaaaa

SEQ ID NO: 15698 - DNA, 81265 bp, Homo sapiens
ggagatgctggcgagacgacagcgagatcctctccaggccctgcggcgccgcaatcaggagctgaagcaacaggtatggtcaggctgtgcagagggccctggggcgggcgacaggcggacgcagctgcgcgcactgcgccttcccaccgtgaccccacctaatcctgggagcttgcccccaacctacttaccttcccaggttgtaacgcccccttaccccataacattccagcacccaaccccgattcaaacccctcctgatcccaactcaacccccagccaaaggcgaaacctcccaaaattcgtgaccatcaactaagcgccccctcctccgaccctcactcccacctaacgtctcaacctcctaccctaacaactcactaacccaccttatctcccaatctaaacttagtggtgtaaccatttccaacccaactctgagcctagctcctctcctccactttccaagcccatttcctttcagccttcctcaagtggagattattattgcctccgtgaactcaagcgaaataggtgtcaagaaatagtcttaatatgcaagaacattaagatctgataaatgagcaaaggaggtgaacgagagaggaaatacaagtaactcataaacatacgaggaatgttaacttcaaagatactcaagtaattgcaaagcacataaggtatcacaaaaatgttaaaaatcacaacactctgtcttgaggaaggtgtgatgaagcaggcacattcactgctcccgtgtataaggtgcttgtacagcatttcaggaaagcagcttgacaaggtgtaacatatgtgtatgcacctaggctcaaaaattacatttccagggatctgctatgtgtaataattagaaagtaggacagagattgatgtataaaagtattcatcacattgttacttatataatatacacagaacagcatagaagggaacaggctaatatggtatttctgtgtgacaggatgctgatgattattatgattttctttattctttttcatatttataaaaatttttaggccaggtgtggtggctcatgctagtagtaccagctacttgggaggctgagacaggaggatcacctgagcccaggagttcgagactagcctgggcaacataacaagacttggtctcaaaaaaaaaaaaactttttaaaaatacactgagttcttattaaaaataagaaaaaagtaaatagcaaccagtgggtttattttctgacattttaatttcactttaatttttttcatgtgatctattaccaagtatttttccactgagtaaaattattttataatctgaggccggtaagagattcactgatgctcatattttatccatttttgttctcttgtttaaagtaaaaaggatttggaaggtaaatatttaggtgactgtgtattggaatcacagtggtgcaacaaaagctaaatactcttctggtagaaataaaaaataaaacttgatggggcattgacttatgctgaacttcggtggatcttaatatggttctgtgtcttattttaaaatttcaacttttattttagattcagggggtacatgtgcaggtctgtcacatgggaacactgtgttatgctgaggtttggggtacagatgagcctatcacacaagcagtgagcacagtacccaataggcagtctttcagtcttcattcctcttccctcccccaccccactccagcagtcaccagtgtccattgctcccatctttatgtccatgtgtactcaacgagtgagaacatatggtatttggttttctgttcctatgctaattcacttaggacaatggcctccagctccatccatgttgctgcaaaggacatgatttcattcttttttatggttgcatattttttcatggtgtatatgtaccacattttctttatccagtccaccattggtgggcatctatgttgattccatgtctttgctattgtgaatagtgctgtagggaacatacacatgcatgtgacattttggtagaatcatttcttttttgggggtatatacacggaaatgggatttctgggtcaaatgatagttctgttttacgttgtttgggaaatctccaaactgctttccacagtggctgaactaattttcatgcccaccaacagtgtatatgtgtactcttttcttgtcagcctcaccagaatctgtcatttcttgattttttaataatagccattttgaccagtgtgagatggtacctcattgtagttttaatttgcatttctctgatgattagtcatgatgagttaattttaaatttagtgggacattaggagaaccaggaaaagttttagaaggaaactataaaaatgattattaaaacaaactattagaaagattattctccctggagaaatattggctctggagccttttgataccttgactatctggaaagtttgttttgatagtattagctaattcttccctgtcttcacagaggacacctgaagctgaatatggaacagattttctattcggtgtctgtaggacaagtaatcaacagcccctctgagtcaggcctgtgatgactggctctatcactaggtgtgtgaattttgtaaataacactcagatggatgccaaattgcaagagtagagaagaaactaatggaattttctcttttttcatccactttatcttctctacgtaatctatagaaaacagaccaaagaagtatgtgcctttttggagagtatattgacaaagttacatatagtgttagtaaacaaactactaagtcaagagaaacaaagtcatgatacattcaatacaatggataccactcagtaatgagaaggaatgaactaatggtacacacaacaatatggaagtatctcaaaaacatgctttgtggaaaggttacacaagagtgcttactgtatgagtccatttatataaaatttcaagaacaggcaaaactaatttatgttggaaaaatatcaaaacaggtttgtctgtggaggaataaggaggggatttactggcaagggcatgagggaacttactagggtgatggtagttttctacatcttgataagaattttggttacacagatgtatgcatttgtcgaaactcagcaaatgtatgcctcgtatttgtgcatttcactatatacatattttacatcaactattgaactttagttagtgacatccatagtccattatttagggagaaatgtattgataactgcaacttactttgaaaggcataaggtgggttgacggatagatcaaataagtatagtataatgttaatgttttttctaggtagcgggtatatgggttttcactgtaaaatttttaaaactttgttgtatgtttaaaagtgttcattataaaatattggataaaaaaagaagttttctttcctaaggcgatatggtatttaataatgtgatattttaaatggtctccataggttgatagtttgctttctgagagccaactgaaagaagctctagaacccaataaaagacaacatatttatcaaaggtaaagtatgctaaattatataagctttacaggaaccgcacttacatttcaatgcatagtatttaaggcatagagattggtcctttggaatcaaatggaagaatcacatagtgttgtaagttgaatgtagaagaaaccaacctaaacctgatggttgcggacttgctgttgtgacagcaactataaaaactgcttaatgtaaacataggtgacatgggcaggattaccctaaatccttagcctatgtagcccagatcctgtgacctggtcagaaacctctgtctataagcaattagtacttcattgggatgtcaactttaactcccatgagaagacaacactgttttctaggtgggtgttttttgttttgtatttgtttttacttaaaaaaaaatccttgggagagtttaaatagacgtgatgaactacatcaaatttagactattaattcataacatttgtattaagtttaggacatcattaagataatctttgtttttgagatatttaaggattttattacattccaaagaacatgagattcattctattaatttaagtgaattgtaattgtttggagaagttttacttaagtcaggcattcagagtgcttaaaggcaaaacaaatgaattttgaaatgtcaaatgaatttaatttataatagtaggattgattaagggatttagttcaagctgaattaacagtaatgaaagaaaagcaaaggttattgttcttgctttactagatttaaaaacagagtaagatttatagactgaatttgaaggccaagggaaaactacgtttttaaattttatgttagtaaactaaaaatcataattattattattttattttttgagactaaatctcactctgtcacccaggctggagtgcagtggcgcaatctcggctcattgcaacctgcacctcccaggttcaagcgattcttctgcctcaggctcttgagtagttgggattacagtcgtgccccaccacacctggctggattttgtattttgagtagagatgggtttcatcacgttggccaggctggtttcgaactcctgacctcaagggatcccccagccttggcctcccaaagtgctgggattataggtgtgagccactgtgcccagcctaataattgttatgttttattttttttgagatagagtctctctctgtcgcccaggctggagtgcagtggcatgatctcggctcactgcaagctccacctcccaggttcaagcgattctcctgcctcagcctcccgagtagctgggattacaggtgcccgccaccatgcctggctaattttttgtatttttagtagagatggggtttcaccgtgctagccaggatggtctcaatctcctgacctcatgccccctgctttggcctcccaaagtgctgggattataggcgtgagccaccgcgcccggcccctaataattatttttaagcccaagtaaccatagtcttctctgtgcatgaaaagaagattgttactgtcatttaaaaactcactttgacatttgcatatctgaaaatgtcatttaggtatcatttttatctgctcagtgctctgagtcttttcagtttgaaaactcatgtctcatgagctctgggagattttattttacaaaaagattatttcgttaattccatttgtctgtttcttcctgaaacacctttgagtcaggtattggatatcctggactgatcctctatatcccataacttcctgttaatagtttctgtttctttgtttgtatgggagatgtttttttggggggatgtggggggtctcactctgtcgttcaggctgtaatgaagtggcacaatcatggctcactgcaccttctgcctcccaggctcaagggatgcccccctcccccgccacgagctaccatgctagcaattctcttgactttaacacttttctttattacctatttcaacagccatattgttttatttcagcagtcatattggtttttttttttttaagatggagtctcactctgtcatgatcttggctcactgcaacctctgcctcctgggttcaagcgattctcctgccttagccttctgagtagctgggattacaggctcacgccatcacactcggctaattttttgtatttttagtagagacggagtttcaccatgttggccaggctgctctcaaactcccgacttcaggtgatccacccatcatggcctcccaaagtgctgggattacgtgagccaccgtgcctggccatcatcagtcatgttgttaatttacaagtgttttctcttgttctcgaattgttcttttttcatagcatcatgttcctgttttcatattgattgccttcttactacttccatgactaggaggctttttttttctccttaagttctcttctgttctctgaattgtctttgctttctctgggctcagattccttttaattagttaattaattaatttatatttggttattcttaaattttatcttcacgttgccggttttctttattaggtctggcttatctatttttattgaacaatgagggactaggttgattattccagagagctctcatgggcttttctactgttagatagagaggggtccttcctgctagtaccatcccctgaataagaatgaaattttgtatgttgatagggcttatcagaggctcggaagtagcttttagtctgaggatcccccagtgccagaatagggccggctctaaccctggtgtatgggaaacttctttagcagtcatgattctcttcaggtcgtttgttaattgtttttgtttgtttttttgtttttagggaagaatcccctggtaaggagggagagcagagaggggaaaagggagctaactggctcaggttttctgtaaatagacttttaaaagaaagaaccccaactaaatctaaacgtaatcagtatcattaatcttcccttgactaatataaagaccttagattgctttaacattgatttccctcctcaaagcttagatgtatgcatatgatttaatttacacaatataacacaataatattagataatttataaagtaaaccccagccactgtgcatgtcttttcatcagcagaatttcataatgtgtccctctatgatttagtttagttaacctttggtcctttatgtctgctgactcaagtcctagagttttcggcctggcagattatctccctcttatgcttgtgttgcgtcttccaccctttataggagaacatgcttccagcctttttccatggagcagaaatttgttgaaatctcttgctggctagttgtccttctttccttctttgcagtgttcagagtttgttaccttttcaaacgttttaatcattttttgtggggtttcaggagccagtgaagatgaatgtgtgcttagtttttatcctgaaccaggagtcttaaaatatcaactgtttgaggattttaataattacatagttataaaggaggtaattgtaataagtaatttattttcttggtacattatattaaaatagttttccactctgggctttaagcgaaatttctgagtctaagtttcagtagagatttttttggtcaagtaacatgacacctgccaaaataagcggctttactgtcagtctcatttgacaaaagcctgcagctaggttctctcagggtggattcatggcttgtgatatcctcaaagaccagcctttgatgtcattccactctgccatcctttgcttgttggtgatgtctctcctcatggttacaaagtccataccctcagtatctaagagcagatgtaggagagattcttttcatgcctggtaagggaggataaaatgggaggcaatcccaatatacgtgttttatgttacactggcagccgtgggccccctgctcaccctgcctgcagtggaggctgagaacataggtgccagtgggaagctgactgccagcaaagaggaagggtgggaaaggggcttttggggaggttgctagtagggtcagccccagtttgatgtttccccttctcttttgctacccttttgacaaaggacttttgttccctttaaaacgttttttatttattactgttttttatttttttctttaagttcagggatacatgtatggcattgtgcaggtttgttacataggtaaacgtgtgccatactggtttactggacagatcatcccatcacctaggtattaagccctgcatccattaattattcttcctgatgctctccctcctctaatacctccttcctacaggccccagtgtatgttgttaccctccttgtgtccatgtgttctcatcattcagctcccacttataagtgagaacatgcggagtttggttttctgttcctgcattagtttgctgaggataatgacttccaactgtaaccatgtccctccaaaggacatgattttgttcctttttatggctgcacagtattctatgagaacatgcagtgtttggttttctgtccttgtgataatttgctcagtatgatggtttccagcttcatccatgtcccttcaaaggacatgaactcatcattttttatggctgcatagtattccatggtgtatatgtgccacattttcttaatccagtctatcattgttggacatttgggttggttccaagtctttgctattgtgaatagtgccacaataaacatatgtgtgcatgggtctttatagcagcatgatttataatcctttgggtatatacccagtaatgggacagttgggtcaaatggtatttctagttctagattcctgaggaatcgccacactgacttccacaatggttgaactagtttacagtcccaccaacagtgtaaaagtttcctatttctccacatcctctccagcacttgttgtttcctgactttttaatgatcgccattctaactggtgtgagatggtatctcattgtggttttgatttgcatttccctgatggccagtgatgatgagcattttttcatgtgttttttggctgcataaatgtcttcttttgagaagtgtctgttcatatcctttgcccactttttgatggcgtcgtttgtttttttcttgtaaatttgtttgagttcattgtagattctgtatattagccctttgtcagatgagtagattgcaacaattttctcccattctgtaggttgcctgttcactctgatggtagtttcttttgctgtgcagaagctctttagtttaattagatcccatttgtcaattttggcttttgttgccattgcttttggtgttttagacatgacgtccttgcccatgcctatgtcctgaatggtaatgcctaggttttcttctagggtttttatggttttaggtccaacatttaagtctttaatccatcttgaattaatttttgtataaggtgtaaggaaggcatccagtttcaactttctacatatggctagccggttttcccagcaccatttattaaatagggaatcatttccccatttcttgtttttgtcaggtttgtcaaagatcagatagttgcagatatatggcattatttctgagggctctgttctattccataggtctatatctctgttttggtaccagtaccatgctgttttggttactgtagccttgtagtacagtttgaagttaggtagcgtgatgcctccagctttgttcttttggcttaggattgacttggtaatgtgggctcttttttggttccatatgaacttaaagtagttttttccaattctgtaaagaaagtcattggtagcttgatggggatggcattgaatctataaattaccttgggcagtatggtcattttcacgatattgatacttcctacccatgagcatggaatgttcttccatttgtttgtatcctcttttatttcattgagcagtggtttgtagttctccttgaagaggaccttcacatcccttgtaagttggatttctaggtattttattctctttgtagcaattgtgaatgggagttcagtcatgatttggctctctgtctgttattggtatataagaatgcttgtgatttttgcacattgactttgtatcctgagactttgctgaagttgcctatcagcttaaggagattataggctgagacgatggggttttctagatatacaatcatgtcatctgcaaacagggacaatttgacttcctcttttcctaattgaataccctttatttccttctcctgcctgattgccctggccagaacttccaacactatgttgaataggagtggtgagagagggcatccctgtcttgtgccagttttcaaagggaatgcttccagtttttgcccattcagtatgatattggctgtgggtttgtcttagatagctgttattattttgagatacgtcccatcaatacctaatttcttgagagtttttagcataaagggttgttaaattttgtcaaaggccttttctgcatctattgagataatcatgtggtttttgtcgttggttctgtttatatgctggattacgtttattgacttgcgtatgttgaaccagccttgcatcccagggatgaagcccacttgatcatggtggataggctttttgatgtgctgctggatttggtttgccagtattttattgaggatttttgcatcgaggttcatcagggatactggtctaaaattctctttttttgttgtgtctctgccaggctttggtatcaggatgatgctggcatcataaaatgagttagggaggattccctctttttctattgattggaatagtttcagaaggaatggtaccagctcctccttgtacctctggtagaatttggctgtgaatccatctggtcctggactttttttggttggtaagctattaattattgcctcaatttcagagcctgttattggtctattcagagattcagcttcttcctggtttagtcttgggagggtgtatttgtcgaggaatttatccatttcttctagattttctagtttatttgcatagaggtgtttatagtattctctgatggtagttggtatttctgtgggatcggtggtgatatcccctttatcattttttattgcatctatttgattcttctctcttttcttctttattagtcttgctagcggtttatcaattttgttgatcttttcaaaaaaccagctcctggattcattaattttttgaagggtttttttgtctctatctccttcagttctgctctgatcttagttatttcttgccttctgctagcttttgaatgtgtttgctcttggttctccagttcttttaattgtgatattagggtgtcaattttatttctttcctgctttctcttgtgggcatttagtgctataaatttccctctacacacagctttaaatgtgtcccagagattctggtatgttgtggctttgttctcgttggtttcaaagaacatctttatttctgccttcatttcgttatgtatccagtagtcattccggagcaggttgttcagtttccatgtggtttagtggttttgagtgagtttcttaatcctcagttctagtttgattgcactttggtctgagagacagtttgttataatttctgttcttttacatttgctgaggagtgctttacttccaactatgtggtcaattttggaataggtgtggtgtggtgctgagaataatgtatattctgttgatttgggttggagagttctgtagatgtctattaggtccacttggtgcagagctgagttcaattcctggatatcctcattaactttctgtcccgttgatctgtctaatgttgacagtggggtgttaaagtctcccattattattatgtgggagtctaagtctctttctaggtctctaaggacttgctttatgaatctgggtgctcctgtattgggtgcatatatatttaggatagttacctcttcttgttgaattgatccctttaccattatgtaatggccttctttgtctcttttgatctttgttggtttaaagtctgttttatcagagactaggattgcaacccctgcctttttttgttttccatttgcttggtagatcttcctccatccctttattttgagcctatgtgtgtctctgtacatgagatgggtttcctgaatacaacacactgatgggccttgactctttatccaattttccaatctgtgtcttttaattggagcatttagcccatttacatttaaggttaatattgtcatgtgtgaatttgatcctgtcattatgatgttagctggttattttgctcattagttgatgcagtttcttcctagcctcgatggtcttcacaatctggcatgtttttgcagtggctggtaccagttgttcctttccatgtttagtgcttccttcaggagctcttttagggcaggcctggtggtgacaaaatctctcagcatctgcttgtctgtaaaggattttatttctccttcacttatgaagcttagtttggctggatatgaaattcggggttgaaaattcttttctttaagaagttgaatattggccgccattctcttctggcttgtagagtttctgctgagaggtcagctgttagtctgatgggcttccctttgtgggtaacccgagctttctctctggctgcccttaacattttttccttcatttcaactttcgtgaatctgacaattatgtgtcttggagttgctcttctcgaggagtatctttgtggcgttttctgtatttcctgaatttgaatgttggcctgccttgctagattggggaagttctcctggataatatcttgcagagtgttttccaacttggttcaattctccccatcactttcaggtacaccaatcagatgtagatttgatcttttcacatagtcccatatttcttggaggctttgtttgtttctttttattcttttttctctaaacttctctgtttgctttatttcattcatttgatcttccatcactgataccctttcttccagttgatcgaatcagctactgaagcttgtgcattcgtcacgtagttcttgtgccatggttttcagctccatcaggtcctttaaggacttctctgcattggttattctagttagccattcgtctaatcttttttcaaggtttttaacttgttttccacgggttcgaacttcctcctttagctcggagaagtttgatcatctgaagccttcttctctcaactcatgaaagtcattctccgtccagctttgttctgttgctggtgaggagctgcaatcctttgaaggaggagaggcgctctgatttttagaattttcagtttttctgctctgttttttccccatctctgtggttttatctacctttggtctttgatgatggtgatgtacagatggggttttggtgtggatgtcctttctgtttgttagttttccttctaacagtcaggaccctcagctgcaggtctgttggagtttgccggaggtccactccagacgctgtttgcctgggtatcagcagcagaggctgcagaacagcgaatattggtgaacagcaaatgttgctgcctgatcattcctctggaagttttgtctcagaggagtacccggctgtatgaggtgtcagtctgcccctactggggggtgcctcccagttaggctacttgggggtcagggacccacttgaggaggcagtctgtccgttctcagatgtcaagctgcatgctgggagaaccactactgtcttccaagctgtcagacagggacatttaagtctgcagaggtttctgctgccttttgtttggctatgccctgtccccagaggtggactctaaagaggcaggcaggcctccttgagctgcggtgggctccacccagtttgagcttccaggctgctttgtttacctactcaagcctcggcaatggctaacaaacagcctcgctgctgccttgcagtttgatctcagactgctgtgctagcaattagcgaggctctctgggcgtaggaccctctgagccatgtgcgcgatgtaatctcctggtgtgccgtttgctaagactgtgggaaaagcgcagtattagggtgggggtgacccgattttccaggtgctgtctgtcatccctttccttggctaggaaagggaattcccttgtcccttgtgcttcccgggtgaggcaatgcctcgccctgcttcagctcatgctcggtgtgctgcacccactttcctgcacccactgtctgatagtccctagtgagatgaacccagtacctcagttggaaatgcagaaatcattcatcttctgcgtcactcactctgggagctgtagactggagttgttcgtatttggccatcttggaaccgccccaagtgttcctttttctctgcaattttgccaacatctgtttttttgactttttaataatcaccgttctgactggcatgagatggtacttcactgtgctgaatgtgtgtcttttgagaagtgtcacttcatgtccttttgctcactttttaatggggtttttttttcttataaatttgcttatttttagactctggatattagacattcatcagatggatagattgtaaacattttcccccattctgtaggttgtctgttcattctgatgatagtgagaggtgacagcatgctggcagtcctcacagccctcgctcactcttggcgcctcctctgcctgggctcccactttggcggcacttgaggagcccttcagcctgccgctgccctgtgggagcccctttctgggctggccaaggccggagccagctccctcagcttgcgaggaggtgtggagggagaggcgcgggtgggaaccgggcctgcacacggtgcttgtgggccagcgtgagttccgggtgggcgtgggctccgtggactctgcacttggagcggccagccagccagccccaccggccctgggcagtgaggggcttagcacctgggccagcagctgctgtgctcaatttctcacccggccttagctgccttcccgcggggcagggctcgggaccttcagcccgccatgcctgagcctccccgccctctgtgggctcctgtgcggcccgagcctccctgacaagtgccaccccctgctccacagtgcccagtcccatcgaccacccaagggctgaggagtgcgggcgcacggtgtgggactggcaggcagctccacctgcagccctggtgcgggatctgctgggtgaagccagctgggctcctgagtctggtggggatgtggagaacctttatgtctagctaagggattgtaaatacaccaatcagcactctgtatctagctcaaggtttgtaaacacaccaatcagccccctgtgtctagctcagtgtttgtgaatgcaccaattgacactctgtatctagctactctggtggagccttggagaacctttatgtctagctcagggattgtaaacacaccaatcggcactctgtatctagctcaaggtttgtaaacacaccaatcagcaccctgtgtctaactcagggtttgtgaatgcacccatcgacactctatatctaactactctggtggggacttggagaacctttgtgtggacactctttatctagctaatctagtggggacctggagaacctttgtgtctagctcagggattgtaaacgcaccagtcagcaacctgtcagaacagactactcggctctctgtaaaatggaccaatcagcaggatgtaggtggggccagataaaagaataaaagcaggctgccggagccagcaatggcaacccgcttgggtccccttccacactgtggaagctttgttctttcgctgtttgcaataaatcttgctactgctcactctttgggtccacactgcctttatgagctgtaacactcaccgcgaaggtctgcagcttcactcctgaagtcagcgagaccatgagcccactgggaggaatgaacaactccagacgtgccgccttaagagctgtaacactcaccgtgaaggtctgcagcttcactcctgagccagcgagaccacgaacccaccagaaggaagaaactccaaacacatccgaacgtcagaaggaacaaactctggacacgccgcctttaagaactataacactcactgcgagggtccacggcttcattcttgaagtcagtgagaccaagaacccaccaattctggacacaatagtttcttttgctgtgcaaaagttctttagtttgatgagatcctatttgtcaagttttgcttttgttgcaattgcttttggctttttgttgtcatgaaatatttgcctgtgcctatgtcctgaatgctattgcttggattttcttctagagtttttatagttttgggttttacatttaagtctttaatctatcttgaattaatttttgtatatggtgtatggaaggggttctagtttcaattttctgcgtatagctagccagctcttccagcatcatttattaaatagggggccctttccgcattgcttgtttttgtcaggtttgtcaaagatcagatggttgtaggtgtgcaagtcttatttctgagttctctattctgttccattggcctatgtgtctgttcttttaccagtaccatgctgttttagttactgtagccttgtaatatagtttgaagttaggtggtgtgatgcctccagctttgttctttttgcttatttgggctcttcttttgttccatataaattttaaaatagctttttctaattctgtgaagaatgtcaatggaagtttgatgggaatagcattgaatctatacattatttggggcagtatgtccattttcacgatatgattcttcctatccacaagcatggaatgtttctccatttttttgtgtcacctctgatttctggagcagtgtttgtagttatccttgagaaggtccctctcactttctttgttagctgtattcctaggtattttattctttttgtagcagttgtgaatgtgagttcaggatttagctctctgcctgcctgttgttggtatataggaatgctagcaatttttgcacattgattttgtatcctgagactttgctgaggttgcttatcagcttaagaagtttctgggccaagacaatgggttttctagatataggatcatgtcatctgcaaacagggataatttgagttcctctcttcctatttgaatactccttatttctttctcttgcctgacttcccaggccagaacttccaacactgcattgaataggagcaatgagggagggcatccttgtcttgtgcctgttttcaaagggaatgcttcaagcatttgcccattcagtatgatattggctgtcggtttgtcatatatggctctgattattttgaggtatattccttcaatatctagtttattgaaatttcttaacatgaaaagatgttgaattttattgaaagccttttctgcatttattgagatagtcatttttttttgtcttaagttctgtttatgtgatgaatcacatttattaatttgtatatgttgaaccaaactttcatcctggggatgaagccaacttgatcatggtagataagctttttgatgtgctgctggattcggtttgccagtattttgttgcggatttttgtatcgatgttcatgaaggatattggctttaagttttctgtttttgctgtatctctcccaggttttggtatcgggaggatgctggatacaatcagttagggaggagtccctccttttcagttgtttggaataatttcagtagaaatggttcccactcttctttttacctttggtagaattcagctgtgaattcatctggtcctgggagtgttttggttggtaagctatttggtaaagctgcctcaattttagaactcattattgatctgttcagggattcaatttcttcctggttcagtcttgggagggtgtatgtgtccaagaactcatccatttcttctagattttctagttcatgtgcatagaggtgtttatagtattctctgctgattgtttgtatttctgtggggtcagtggtgatatcccccttataatttctgattgtgtttatttgattcttctctcttttctttattagtctagctagtggtgtatctattttattaatttttttcaaaaaaccagctcctgaatttgttctttgtagggtttttcatgtctctatctccttcagttcagctctgatcttggttatttcttgtcttctgctagctttagggtttgtttgctcttggttctctagttcttttagttgagatgttaggttgttaacttgagatctttctagctttttgatgtgggcatttagtgatataaattttcctctgaacactgctttagctgcatttcagagattctgatacgttgtctctttgttctcattagtttcaaagaacttcttgatttctgctttaatttcattatttacctgagtcattcagggacaggtggttattttccttgtagttgtgtgattttgactggatttctttctttctttctttcttttttttaaatgtgtctatcagaatgactttatttcagtacactgagccccatcaggcagtgtggtttgtgcaaggctgtgcgagggacaggcttgggctaagagaagggaggtgagttgttaagtgcactgcagtctgtggggtgctacatcgctttcacacacacctgctcctttggcccatacctggcaggggcctttggtcataggacagcatgggggagactactgcatggagtctgggattggggtgggtcatggtgtcacaggtgagggtgccggtgaagacaggctggccccagctttgcaccacctgggctaaaggcctttggactactcctaggagtcaggcctggctccattagctcctggcactctggtctggccctctccctccttaaccaagcaggtccaaggtcaagagtggcccaagatcagccaagagggggccatcccacctctacagcttagttgcctggtcagctatagtggcaaaaggcaacatggttaattgcagctttctccagtcctaaggacactggctctccaacaccccttccttgtttaggggcctctgccaaagaaaaattctacctcctgtttcagaaaatctaaccagcaaccagcctgttgattctatggcagtgagcaagagaaagagggagaaagaggctggtgggagtgtctttgagtatagctaccaatttcaaatggtcctgcaacctgtggacactgtccgcttaccatcagcagggagaggcggggccctggaggctaggctaagcttaggtgctataaacattagtgtggcagggcaggaggcagtgagctccctctctccatccccttactgaacaaacacttcaataaataaaactgtttgaagatggcattgcaacaagaacggatggaaagcaaggacctggaatcagcaggcaccttaaactctcccaaggcccctggaaggggaatgggctgggaacattatctctgcagccattcagggggagtactactcctgccctcctccagtggctggtgtggtcctgttccctggtgaacatgagggcttcctgctccctcctgactttccagtctctgtattagctcttgggatgcttttctagcctcccaaaccaaaatggcaacaaaaccagacagaggtcaaccccagccccagtcctcagtgcccagtcagggggcattgatagcggagtgaccagcaaggggaggcagcagctgcctgggtcctcagggcaccctggtgggtgggagtgagggtggggccagtccagcctaggatgggcagcagcaaggtctcccagggggtggtttatctccctctgtctccccgtggtagtaaacggagttccctgcagccagtcagaggcccacctgaggagggagtgcagcctctgccagtgttcttccctgtcaggagccagttaatggtcacccccaggcctcaggccatcaccatcgtgggtagttcctcatcctttctggacctggggtccctgggccacatggcacttgcatgtgctcacacacttgtatacacacatgcactcacacacacaggcaattcctcacaaacactctgactcaacaaagcgagttttaaagtggagttaacttcagagagaggtgaagatgatatcccaacattagaaggttttcctgtggatagatcaggcaccgtcttcctcatattccttcttggagacccacatcttcttaaaggtgtcatggaggcaaggatagagccctcaatccacgtggaatacagtctctcctgaggtgcaaatatcctgatcttcacttcactcagtagcctgtcaccaaaacctttgaacaaggtagagcctcccaagaggacgatgttggagaaaagtgtgaactgcaggtccatgtctgacttctggatggcgaacaccaggaccttgtggatgccttcactctcctccctgatcaagtctggcctgaagagcagctcaggggcccggaattgggaaggaccaatctcaatggtgctgccatcaggcaggtagtactgagccttctctgtctctagtgtctcttccttctgggggtttatggataggtaggagggtctttcttttatggccttgacaatctcaaactcaaaggatgagtggaaatctcaaacgatgagtggaaatcatagccctccttatgcaggtagaggtgcaggaagcgagagatgttccagcttgcgatgtcaattcgcatgatggagtggggcatggcaaagccctgatagatgggcacagcatgggtgatgccatccccagaatccagcaccacccccgtggtcctgcctgtggcataaaggctgagcacagcttacatggagatgaaaatagcaggcacattgaagctcttgaagaaaacgttggcagctcattcctggtgtctttgtgggtttaaaggtgcctcagtgaggagcacgagatgctcctctgagaaagtctgcagctggtccttagaatagacatattgccagatgtgttccatgtcgttccagtccttgacaatgccatgctccgtgagatagcagattgagagcagcccttggtgctccttggctttgaagccaatgaagatgtcaccttcaagggctcctgccatgatacgaatatgcatgggtaggcccacatactttggaaagcagtatttgtggatctgatcaccagcaaaaccagctttaatcacaccagattcattgtcgatcatgacaggctggttggtgattgtatcgtaagactccacggcagaggaatctctcctggggaaggaactaccagttgggtctgccgctagtgccattcatgaatttcttaatcttgagttctaatttgattgcattttggtctgtttgttataatttcagttctttttcatttgctgaggaatattttatttccgattacttgatcaattttagagtaagtgccttgtggtgatgagtagaatgcatattttgttgtttttgggtggagagttctgtagatatctattaggttcacttgatccagagctgagttcaggtcctgaatatctttatcaattttctgtgtggatgacctgcctaatattgtcagtggggtattaaagtctcccactattattgtatgggagtccaagtcactttgaaaatcataagaacttgctgtatgaatctgggttgccgagaccagctcggtcatggagaccctaacccagcggcgctagaggaattaaagacacacacacagaaatatagtgtgtggagtgggaaatcaggggtctcacagctttcagagctgagagcattgaacagagatttacccacatatttattgacagcaagccagtgataagtattgtttctatagattatagatttactaaaagtattccttacgggaaataaagggatgggccgaaataaaggggaggttctggctagttatctgcaacaggaacatgtccttaaggcacagatcgctcatgctattgtttgtggttcaggaatgcctttaagcagttttccgccctgggtgggccaggtgttcctttccctcattctggtaaacccacaaccttcaccatgggcatcatggccatcatgaacatgtcacagtgctgcagagattttgtttatggccagttttggggccagtttatggccagatttcggggtctcttcccaacatgggtgctctttttttgggtgcatatgtatttaggatagctcttcttgttgaattgaaccttttaccattgtgtaatgcccttctttgtcttttttttatctttattggcttaaagtctgttttgtcagaagctagaattgcaacccctgcttttttctgttttccatttgcttggtaaattttcctccatccctttattttgaacctatgtgtgtctttgcaaatgacgtggatctcttgaagacagcataccgatggatcttgactctttatccagcttgccattctgtgtctttttaattggggcatttaacccacttacatttaaggttagtattgttttgtgtgagtttgatcctatcatcattattctagctggttattttgcagatttgtttatgtggttgcttcatagtgtcactggtctgtgtacttcagtgtgtttttatagtgggtggtatcaatttctcctttccgtatttagtccttccttcaggagctcttgcagggcaggcctggtggtgacaaattccctaagcatttgcttggtctgaaaaggatcttatttctccttcatgtatgaagcttagtttggccggatttgaaattctgggttggaaatttcttttctttaagaatgatgaatattggtccccagtctctgctggcttatagggtttgggtttccactgagaggtatgctgttagtctgatgagcttccttttgtaggtgagctggcctttctctctggctgcctttaacttttttttttttcattttgaccttgaagaatcatgattatgtgtgttggggttgatcttctcatggagtaccttactggggttctctggatttcctgaatttgaatgttggcttgtcttgctaggttgggggaattcttctgtatgatattctaaagtatgtttttcaacgtggttccatttttcctgtcttttttaggtaccccaataagtcacgggtttggtctgtatacataatcccatatttctctaaggttttgttcattcattttcattcttttttccctattcttgtccgcctgtcttaattcagaaacataatcttcaagctctgagattctttcctctgccttgtctattctgctattgatacttgtgattgcattataaagttcttgtgtttttcacctctatcaggtcagttatgttcctctcttaattggctgttctggctatcagctcctgtattggtttatcatgattcttagcttctttgcagtgggtttcaacatactcctttaactcaacaaagttttttattacccactttctgaagcctccttctgtaagttcagccatctcagcatcatcccacttctgtgcccttgctggagtggtgttgtggtcatttggagcagaagaggcactctggctttttgagttttcagcattttgtgtcaattatttctcatctttgtgggcttatttgcctttgatctttgaggttgctgacctttaaataggatttttgttgagtttttattgttgatgttgttgttgttgttttctgtttgtttttcttttaacagtcaggacactctactgtagtgttgctgtggtttgctgtaccccagaccctaattgcctcagtttttcccatacctggaagtatcaccagtgaaggctgcaaaacagcaaatatggcagccagctccttcctctggaagctctgtcccaggagagtactgatttgttgccagcccaaacgcactttgtaggaggtggctggaaaccccttttgggaggtctcacccagtcaggtggaatgggattacagacccacttaaagaagcagtctggctgctttttggtagagcacatatgatacattaggaggggactctttcttctggaccatttgtattctccaaagccagcaggctagaatggctaagtctactgaaccccagagatagcagccacccctgccccggtaacttggaactgcctcagaaagattccagactgctttggttggctggctggaattccaagccagtgggtcttaacttgtgagttgccatggaagtgggggccatggaagtggggcccacggaacaatgctgcttggctccctggattcagctccctttctagggatatatacagatggatatccccccttgctggggatcttggggccagagtatataaaattcctgggtcactgtatgtgcctgagcagctgctctgctgagacaccacacagttctgtgtattggacccaaggccctggtggcatgaactcaggagatctcctgatctgtgggttgcagagatccgtgggagaaacatggttttctgggcagggttgcatggtcactcaccacttctcttggttggggatgggggttcctttggctgcatgccactcccaggttggctcttgttccccttgttccctggcttttctacattctcatgggtcaaggtgtttgccttgtcagtctcaatgtgagaacctggatatttcagtttaaagtgctgaattcacttgcccttcttcattcctctcagtgagtgccatagaccacagctgcttctaattggccatcttggatcaacgttgttattccctttttcactgcttatttcatttcactcacatctataagcaaaaaaaaaaaaaaaaaaaaaaagactcaaacggcataaaaaagtgacttttgtaggttattgtttagtaaagcatttgaattaaaaaaatctcatcatgagctatagctcatatttggtcattttttgtacttctcatttgggtatctaagacttaatgctgaattgaggcatctgtggaataaataaaactctggacctgtctggacaagcaagctcaaagcaggagtgtgctgtggtgggaataggccaactgtggaatcctaaactgccttcatattgttgctgtaccattgagcagctatgtggacttggtacacatagcttgagaagctatgtagaacttctctttctttaagtggagtgagggttgttatgaggcttaaatgaggtaatgtttgtaaactgcttaacatggttggcacacagtaaactttaggtactattatcagttttgtctctgaggctagttcctaggtttatggagttgtagagctggagaagcattttaaagtccagcgttcttccttattttagagagaggaaactgatgcccagagacactgaaggtttctgaggcttggttatcatgtctatgtgttttacagcttggctatgaggatcatctgagctaataggtggaaaagcatttatatgtcagttttttagtattgttcatacagtggctaattgccttgcctgctcaacgactgaatgattttataaaatagctttctggttctgataatagaaaaatcaatatattttcttttttttcttaatttagatgtatccagttaaagcaggcaatagatgaaaataaaaatgctcttcaaaaattaagcaaagtaagtattgaggttaatcacattattaaaacatctcttcctatacaagtatttttattaagtggaagttaattcaagttggtaagttcctgggtttacgttagtgatatagtctaactgcagccagtgctggcttgccgaacaggcttgctaagtctgtgcttgggagcaaagcaaaatccagggctccaactaccgaaaaatgttcagctttgatgaactcacctgctattaaggattcagacaatcctggaaggagctatttttatttttgcattttgtgagttgttttacagtttagaattatttttattttaatttctttgtggggaaataatgcataatctggccctgagggtaagtggtaaagaagcttcttgtatcaaatggcagctctgatatcaatgtctctgcagaaacaagaggaacaggaatttaaccttgacaatcccttcaggatttttttttttttttcacatgagccttggctacagctagatgtccaggtccagagactcatggagtctttaaagtggaaggcacctgaaagtcagctctccagctgtatattactcccctttactgcatctgagatatgtggtcactgaagagctcctccaaatttctccagtgacacaaaacttttcaacttagactgtttgaaaacctaattatttctgtttcacaggtgaggaaattgaagctctcagtggtgaagcatccatgcctcttctgtcaataagtggcagaacttgggattggtgcctgtctcattgactttaaagccgatcttctgtcagaacatatctcttactgactatggaaggtctataatacttagcaagaaaataaaagagaaacctaaaacaagtggtataattttattttttcatttggtttgcattccaacacaattgcctgtttcttttaaatctaatttatttccctaagataggtgtaatgtcacactgatatttactttgttatatagcacttattggaattttttgttgttcttttgaaattaggaaactgaaattaattttttagtgaaatagacctatattctctcataggctgatgaatctgcacctgttgcaaactataatcagagaaaagaagaggagcatactcttttggacaagcttacccaacaactgcagggccttgctgtgacaataagcagagaaaatataactgagtatgcttcctttctacctttcttttttcttttttaaagatatatcaccaatagctttaatgtttaactcaaagacatatagcagtatagatataaacaaatgacactaacaatagaatcagtcaacatttatttattgtgtataatagaaggtgttagatcccatgagagatggaaagaagtgtaagtcatagtctctgccctcaggcaatttataatttagttgaaacaaaacagagatctgaaaagctaaatgaacaaatgttagaaaataaagatgatatatttaatgtcaatgttgatgtgtaaaagggaaatgatttggaatgtctacttgcattgttctccctttcataaacattctttaaaaatttgaagcaaagactgagtgtggtgactcatacctgtaatcccagcattttggaaggctgaggcaggaggatcacttgaggccaggagttcaagaccagcctgggcaatacagtggaccccatctctacaaaaaaacccaaactagtcaggcttggtggcacgtacctgtagtcccagctacttgggaggctgaggcaaggaggattgcttgagcccagaagttccaggctgcagtgagctataatcacctcagtgcacagcctgggcaacggagtgagacactgtctctattaaaaaaaaaaaaaattgaagtagggacatgcattgtttgtctgccagagtgtatgttaataatagcttctgaaagttgtaaagaagacttacatatacaagttgagtattccttatctgaaatgcttgggatcagaagtatcttcagttttggattgttttggattttggaatatttgcattgtacttacttgttgagcatccctaatctggaaatctacattttgaaagactccaatgagcatttccttggagtgttattttgatgctccaaaagtttcagatttaggagtatttcggattttggattttctgattagggatacccaacctgtacgaacaaacccaatttgtgggaagcaaaagaaaaaaatcagttattcagactatttcagtgttgttctccaacctttatactgtatcctgggaaaaaatgctgaaggtggtagatgcaaggatctagaatttccaccgattcttagtactgagaatggcagagtagttggtattggactaaccttcccaccataaatgactataaagtctggacaaaatatacaaagcatctgtttgaagccactgagcatctaccaagcagggttgatattcttgatatagggagacacatgaagcaaatcctacattcacctagaccttttccctgggaataatttatgagctgtggtggaggaaggtagattccaagcagggaatagtagtcttactcgactgaggagacagagatcacactttggagctgctcagttcactgagagttgtggagcaaggtgccatagagagaagggagctgcacagaaacaactccagcaatctgaaaggtctcctgggctgtatagggcatgatgcctgcaaggcctggcagaaagtacctgctgggagactaagagcttaatggattctggtaatcatatagtcctggaaaaacactggagtttgtacctagttctagtaaagagacttgggaaatgtttcaggcatttagtagaggacacagaaggcccaggccctaggagtaaagaaaacaccctgagagtaacaaccatgatctaggaataaagacaaagctgaggtaggtcttctctaaaagagcctaaaagcagaccttatcaggaacaagataatttaactgtgtaacattaaaataatttaaaatttcttagaggaatataacataatccaaagtctgtaagtgagtcatgtaatgtgtccatcacagcaaccagtataaaaaaaatcagaaatgcaaaaaagcaggggaaaatacatgatcaataagtgacaagatggtcactaaaaacagacccagatatgatccagatatagagttagctgacaaggacttctaaataaaatgattaatacagtaaagaaaatagaagaaaagatgaatgaaatgggaaatgggtgtatttaattcaaatatagaaaaatcaaatgaacattctataactaaaaaatacaatatttgataaagtaatgactgagaacttccaaaatctgattcaacatatagactcaaaaatctgggaaatatattaaaatcaagagaataaataatcagtagctcggagatgtgagaattagcaaataaccataaaacaacaatttttaatatgttaaataatttataggaaaagattgataagatgaatagagcgaaatcttaagcagagaaatgggaactaataaagaccaaaatgaaaattctggaactaaaaaaatacaatatgtgaaataaaattgctgagtggtttaatagaagattggatacaacagaagaagggatcagtgaacccaaagacagcttaaaagtttttcaaattgatacacaaaaataaaaaaatgcaaagaacaaaacagaatgtaagagagaggtgggacactgttaaaagttgtaacagatttgtaattgaagtctcagaataagagagagaatgaagcacaagaaatatttaaagagatagtgactgaaaatatttaaaaattatgatctaagagagatatcaatccactgatccaagaatctcagggaaccccaaacagaatcaatataaagaaacccacacacaggtacctcaaactaccgaaaaccaaagataaataggagatcttaaaagctgccaagggaaaaaaggaaacatgtagagacaaatgacagaattacagttgacatcttatgagaaaaaatacaggtcagaagacaatgcagtaacagtaacatcttgaaaacgttgaaagaagaaaccatcaactcagaattctgtatccagcaaaagtataaaaaattaaagtgaaataaagacattttcaggcaaacaaaagctgagaaaatttgtcaactgatctgcagtataagaaatgttaaaggaagttcttcaggctagcagacaatgatcccacattgaaatttggaccttcaaaaaggattgaagaagatgggtacgtgggtacatataaaagcctattttttcttttctatatgcctttgaaagacactcaattatgtaaagcaaaatatatatttggggatttataatatccagttgattctcattatttacagtagttatgttctataaagttgccaggaatactcgattagtaaatgctaaaccattgctcctggggaaatgcagacttaagactcctgtgagcctctggtcacaatgtttttgtcaactgagtaacatacaaccttgtgttactgtttaaagacactttatttcatatattttattgattcattaacattgaattcacactaacagcactatcactcatgcatgaacaagtcttatctaacacacttattttctccagaggtacattatagccttcttgtgcttaggaataccacatggctcttcagcgctatgtttgggagccattttaaacaacaaaatcaccaaaaaaaaaaaaaagcacaaaaatgcaaaaactgtggcactaaatagactgcaaaaaagggacactttcctgtatgagagctgaaaaaaaaaggcaggtgtcaccatgttcagcttcagttgggaatgtgtacgccagacaactcaaattttttgctgctttgtgtatgtccacaaatgaccacaaaagcactgtgagtattaattaggaggttacaaataaagtttagtgagccaatgaattcataaatacagaatctgcatgttacaaggactgactatatgtagaaggaaaatgtgacaatagcacagcatagcacaaaggctggcaggtaaatggaattatttatcttaaagttattttatctttggtgaaatgtgatatttaaattagactatgataagttagggatgcatattgtaatacctaaaacaatcactaacaaaataatacaaagaagtgtagcttgtgaaacaacacaataaaatggaatactaaacgtgatttgattaacccaaaaaaggcaagaaaggagaaataaacagatgagacaaatagaaaccaaatagtaatatggtttcaatgcagccatttggatagttacattaaatgtaaatggagtaacactccaattacaacaaagattgtcagattgaatttttttaacccaaatatatactatttagaagagatagactttagtatgcagttatagagagagtgaaagtaaagaactggaaaaaggtattccatgttctacaacaaagatattatttgttttataaccaaaacaaaggtgatacggttacaataatatcagatatttaaggctaaaagtaatttactatttaagaaaggacatttcataatgataaaagaaagggtcgattcagtaggaaaaaaaatcttcctaaatgagtatacatttaataatatgggttcaaatgtataaagcaaaagttgccagaactaaaacagagctagataattcacaatccttaaccaccgtgatctaattacatgtatagtcaagcctttcttagtgatagggatatgttctgagaaatgagtcattaagtgatttcatcattgtacaaacatcatagaatgtacttgcacaaacctagaaggtgtaggttaccatacacttgggttatatagttatagtatagcatgttgctcctaggctacaaacctgtacagcatgttactgtgctgaatactgtacacaattgtaacacaatggtgtatttgtgtatctaaacatatccaaaaataggaaatgtacagtaaaaatatggtattatatgtatggggccatcattgtatatgtggcccattgttgactgaaacattgttgtgcagcacatgactatatatgtgtagaacacagcacctaagtatgtattatgtaaatacatattcttttcagtgcatctgtaacattaaccaaaatgaaccatattggaccataaagtaattgtcaccaaatttcaagagtttgaaattatgtagaatatatatatattttctttgatgacttggaatgacattaaaacccaatgacagaaaaataattagaaatcactgcatgtggccaggtgcggtggctcacgcctgtgctgaggcgggcgaatcacgaggtcaagagatagagaccatctggccaacatggtgaaaccccatctctactaaaaatacaaaaatgagctgggcatggtggtgcatgcctgtagtcccagctactcgggagtcggaggcaggagaatcgcttgaacccgggaggtggagattgcagtgagccaagatcataccactgcactccagcctggtgacagaatgagacaccgtctcaaaaaaaaaaaaaaagaaaaagaaaaagaaaagaaattactacatgtttgcaaattgtcacacacttctatataaactgtgagtcaaagaaaatataacagtggcaattagaaaatatttggaatgataataaaatgactgggttgcaaccagcatagtgcttaaagggaaaatttctatcttttgtttgtttgttttggagacagggtctccgttacccagactgggtatagtggtgcaatcttggctcactgcaacgtccacctcccaggctctagtgatcctctccacctccgcctccctgagtagctgagactacaggcgtgtgccactacgcttggcaaattttttaaattttttgtagaggcagggtctcactatattgctcaggctggtcttgaactcatgggcttatgcaatcctcccacctcagcctcccaaagttctgggattacaggtgtgagccgccacacctggccagaaatttatatctttaaatgtatagtttgaaaaaaaagttgaaaatcaattactaaaacatccaactttaggggccagaaaaaggacaacaaacccaaggagagcaggaaagaaataataaaaataaaagcagaaaacagtgaacaataaacagacatacagtaggcaatatcaacaaagccaaactggtttttggaaaattaattaaatggataagctgctagcattactgatcaagaaaagagagagagaaaaaaaatcaatacagattccacaagcattaaaaagatactatgaaaagactatgaacaacttgtgtgaataagtttgaaatttagataaaattagtttctttaaaaagaaaatgtactaaaattgacacaagatgaacagaaaatcttaaaagttctactaaaatatttactaaagaagttgaatctgtaattaaaagcctttccacagattaaactctcaggtggctttactggtgaatttattgtaaacatttaagaaagaaatagtgccaatattaaaaaatcattccagagaacaaagaagaaacactttcaaatcattttataagctttcaataacactgatatcaaaacatgacaagaacactagaagaaaattgcaaggccctcatgaacacatgcacaaactcagtataaaatattagcaagtaaaatctagaggcatttcaaaagggtaatacatcatgaccaagtggaatttgttccagagtgtgaggttggcttaacattaaaaaatcaatcattgaaattcactacattaatgaaggggaaaaaccgttatcaagttcacattattttcggcaacattttagaataattgacccatataaaatatgtgcaaaatatctcctaaagaaggaaagagacgcgttgaaaatcaatatgacattttatggattttttagtcttgtggtataaaaatggttgttacatccctgtttatgttttagatcattgtggtataagagtgtcctaccattattttaaacaaagttcagctaatattcctttttattccagagaaaatcttgtagttgactagttttatagttaatgatgttcatttgcattagtctaagtattgttttcccattttaaagataagcttctctcatgtaagctttaggagggcaaagatcttggttttgttcattgttatagcccaagcacatagtgtctgtcacacagtaggtgctccccaaaatttaaactttgctgaatgttgaatgagtaaataaaattcagaaagatttagtgacgtgcccaagctaacattattttggcatttctctcttcctcaccctcagattcacctcctttctcttcatccctatgctgttttcttagttcatagtgttgtcacttctcactttcaacagccaccctcacctttagcctttcttctaatctgttccccacattatacctttgtctcctttctaaagtgggaatcatatcatgtccttcccctactcatttttaggggcgactttaaaggtaaagctcacctgggctacattccgcgtacctcttttcagcctcaactctcactcattttccttaagccttgccctaccattcatgagctacttgatgtttcctaatcttaaatctcctttctcctctccctgcccttcctttctactcccattttacctgattaattccatatcatctctcaagacctaattatagccttttatgattcccattcgtgcaacctgggttaggtgtccctcttgtgtgattgatttcttagtatcctgtgtatacctctactctagtacctattgcactattttataattctccattttctagattgtctcactgcaagctccttgaggatggggaatcatgtctggtttacctttgtgtccactgtgtatctctctgacacggaacttgacctacagcatcagtgtcatcatcataactgacttttatggaaagcttgctatgggcaagcactgttctaaacactttgcaagtagtaactcatcttaatcctcatgacaatcttagaaggcaggttctattattatctccactttaccaatgagaaatggagagcttaaaagaagcctactcaaggtcacccagcaaagagggaatagagccagaatttaaatttagcagagcctatgctctaagtacttcataataatgcttcaacagcattttctgaatggatgaatccaagacttgaattcggagtctcctggcctcaagtccagtgatgctctgccatctcacatacatgactcagctccctctccgcctcagtctctccaggcacacggtcttagctagatggtagaaactgttctttgtattttcccttatttcttttatttgccagctccaaatatgggatattcatgtatatgtagaagttacactcatagctggtctgttcttgtatattatttcaagtagtcctactcagaaacactttttgtagagttggggcacctactgaagaagaggaagaaagtgaaagtgaagatagtgaagacagtggtggggaggaagaagatgcagaggaggaagaggaagagaaagaggaaaatgaatctcacaaatggtcaaccggtgaagaatacatcgctgttggagattttactgctcagcaagttggagatcttacatttaaggtaggtagaataagactgaaacctaacctaagggtcgatgtccatacctaacagaataagaaaactctgcctgtacacctgtattacagattcttaaaatgcagttttataacaatctatttaaataagtaataattacaatttacaagcagtagtaatatgagattgtgttactaaagttacctcttctaaagatttttgaaagtagctttaatgttgagaattcctaatttaggggtaaaattttataatttgttattgaatgtcatgtataaattcattcaagtgagttaggcaatgtccataggtggaggtagaagggagcacttcctgccattttgtagcagtctttcctgttagcttagatatgagaggggcttacatccatgcttggttggcctgggcataaataagtggcaggtgggacagaacaataaagttgtgatttttaaagttgtgattttgagcctgtgttttctgctagagaaatgagccaaagaaatttaagtgaatatatgaattttagttcttatattaaacttcaaagtttagtaactgattaataataaaatacataagaatattatgcaaataattatatggtttgatttatagatttttttttcaaattctcctggaaaatggtatcaatattagacaataatgtatattttaattaagtgtttgcttttgtagtgtccttagtggtggaaatgcttttgtcttcaaagatgaattttatttttataaatgagtgagtgttattcaaaacatatctggtgaattaagtgggtaattatattcagtaaatactatttttgctcaaaaatagggtttaactttaatggaattgatattctttgggaatttatatgctgcttctgaaagacacttttccagagatattaaaacattcaaaaatattttacgcagtaattgaatttttggaataagtatggggccttaaaaatgattgtgaaaaatggttcccatttgcataaatggctcaagtgtatgttaggtaaccaaaaggaatgattcattaaactatgtcacatttatggttttaggtgagttaggcagaatacataggggtcgggtgatagggaagcttttgataaaccttaggataaatattggattaaaaaaagattttgcctttttttcagcacatattttgaatcattggtattgacatatactcatgattattgaattttatttaaaatggtttactttgttttgctttaagaaaggggaaattctccttgtaattgaaaaaaaacctgatggttggtggatagctaaggatgccaaaggaaatgaaggtcttgttcccagaacctacctagaggttagtcttggtttatgccttccttttctaagacttttttttttttcgcttttaataaaacatttagctgtgttcttttgtcagttgactagtgaatgacttgagatatagaatttgctttaattttggagggacaggacctgggaaaaacattgtgtattaatggtcctggggacctgtgaagtgctcttacgcatgtgagccctggaacgtgatctcacaatgaggggatgctttgtggattaatgctgatcataacaaataataggtgtctattgtttattgtaaaacataactgcagttaactttgtgttaacttccacaaatatgtgatccccttactaaaatgtgaacatactatacatgtgtgtttgtagcttgtattttcttatttcataaaataacatggtcattttctgtgccaagatatatagatttctgtctggatcagcactgtccagtagaactatgatgcaaaccacacatgtaatttaaatttttcagtagccacactgagatatctttttgctgatgccacttctgacaccaagtatgtggtttttctctgacaccaaatatgtgttattacatcagttcttctacaccaaccggtgtcagcaattcaattcgattctgatgctaatgcctggagctagcacagacccccacaggttaaaggctcagtcccacaagattgctgctcacttccgttgccagtcacaagtcccaagagccacccatacttctgactgactggctatacattcacgagttcccataccatcacctcaggggttcagtaatttactagaatgattcacagaactcaggaaaacactttccttgcatttaccagtttattataaaggatgcaactcaggaacagccatagagtgaggtattggttgggggtggctggcatgcactctctgggccttccaccttcccagcacttcgctgtgttcaccatcctggaagttcctggaaccccatcatttaggggtttttctgaaggtttcattagccatgtttaactaaatcattagcaattggtgattaactcagtctccagctcctctcccctctttgaaggttggagggtggggctgaaagttctaacctctaatacctgggttggtttttctggtaacctgtccccttcctgaagctgtttaggtgcccacctagaattacctcattaacataaactcaggagtgactgaaggggactcttgatgagtaagaaaacatactcctatcattcaggaaattccaagggtttcaggagctctgtgccaggaatcagtgacaaagaacaaatacatgtttttcattacacacatttttaaaaagtaaaaagaaacaggtagaattatttttaataatatattttatattatccagtatatcaaaaatactattttgacatatcaatatttaaaaatattgagttgttttgcttttttaacattaagttcaaaatccaatgtgtgttttacatttacagcacttctcagtttggattaatttcaagagctcactagctacatgtggccaaagggctattgtattacatagggcaggtctagatcatctttttcaatggcagcaagtcttctaatctcatttagatggtcattgaagttgtttccaacctataatcactatcgattatgttgcaaagaacatgggattagcatccactgtcagttgcaaaaagatccccccaaaaagtagcttaaataaggtagaagcctatttctctcaagcataaaagtgtggagaaaagcaatcaataattggttaagatcctatccagtattttatcctgtttctgatgtgaggctgctctgcctagagttatctctttagttttaagtcagctgctggatcttttaaggattccaaggagcaaaaggggaaagaattcaaaaggcataagctgctgcctttttaagaaggtttcttggaagttacacaaaaaaactttcaactgttgctcattgaccagcatttagttctctggcaacagttagctgcaaggaagtcttgggaaatgtagtcttttaactggatcattgttaaatcagggattttgtttgaaaaaggaggtggggaataggtggtagccagccagcaacttgtgttgtcatcaagcctgcgtgcatctttgcacacttgcccgattatccccttagataaattcctagatgttcatcactggttcaaagggtttatagctttatattttgatttatttttccaatttgccttttagaaaagttatgccaatttgtactcccacctctaacaatcagtgagtgctgtttcctcacacaattgccagtgatggctgttagcaatctttaaaatttttgccaatatgaccagcaaaaaaagtgtcattagtggtttaatgtgcatttactgtactcctaatgaggttaagcatcatctcatatgctttatgaccatttgtatatcttctttgcgaatggcactttcggttttctttattgatacataatattttatgtatttgtgtgagtgctttttacttgtatggattgtgtaataatcaagtcagggtatttgagatttccatcaccttgagtgcttatcatttttatgtgttggtaccttttcagttcttttggatatttttttctaagggatttaaaaaactctttcattgatttctaagagcttttataatattttaataatcaggatattaatccttagatatttgtgtgagctattttctttttttcccctcaggatatgcttaagttatgtgttagatattttctttgttgactttaggtcatgtttatttattatgtagctaaatctgtcagtgtttccacttatgatttttgattttgtatcatgattggaaagggcttccccatctctagattattttcttctaatgcttttatgtttcttttatttttatctttacgtcttttcttttttatttaagtaaattccatctggaatttattttgattaaacttgctgtctatctcagttcttattttttcaaatagcaaagttattaaccatgtgttgaaaatttatttcccactgagttttatatgctcatcatatatactaaattcccatctatgctcaagattttctgaaagtactgatgcttttgtttttttgtttttaaacagaaaagcttgtttttgtttttactggagggttaggtggcagtactggtatttttattggttgttttttgcattagttaaaaagcacttcacatttcaatggttttttagccttatagtgaagaagaagaaggccaagagtcaagtgaagagggcagtgaagaagatgtagaggcggtggatgaaacagcagatggagcagaagttaagcaaaggtacaaaagtgggaaaggatatcaaagtaggtttaggaaacattttatttgtttatttttattattataactaattcaatactttcttgaaatggagacaacttgtacctggagagcttttcatactattgtctgcttaaagatcattactgttttagttttgtaattatttttaatacatttagctctacctcgttttcatctggaaactgttagattttcaaaacttactgatgattatcaactgtgattaaagaagttccctaattgagtgaataggcataacctgacctgactcactttgctattttgtctccccagaactgatccccactggagtgctgttcagaaagcgatttcagaggcgggcatcttctgtcttgttaatcatgtctcgttttgctacctaatagttctgatgcgaaataggatggagactgtggaagacaccaatggatctgaaacagggttcagggcatggaatgtacagagcagaggacgtatatttctggtttctaagcctgtgctccaagtaacatttctcattagtttttttttttttttgtacaaaaagaatagataattcatggtgtcacttgaggacttggaaacattctcattgatcctgctttcctatcatttgagtggaaacagatgttaaattttatttactattcgaaaaatcctgaaagcctttaataaaaagtaagaaattggccaggcatggtgattcacactggtaatcccaacattttgggaagctgaagcaggaggatcacttgaggccaggaattcaagaccagcttgagcaacatagtgagaccctatcctacaaaaaataagaaaaattagccaggtgtggtggctcatgcctgtagtcccagctactcgggaggctgaggtgggaggattgcatgagtttgggaagtcaaggctgtagtgagctgtgattgtgccactgcactccagagcatgagtgacagggcaagaccctgtcttaaaaaaaaaaaagtaattaattacatttttttaaaggagaaatgatccataattctgtcattaaaaaaaaattacaggccgggcacagtggctcatgggcacagtggctcacacctgtaatcccagcactttgggaggccaaggcgggtggatcacctggggtcaagagttcaagaccagcctagtcaacacagcgaaacctcacctcgactaaaaatagaaaaattagctgggcgtggtagcgcatgtctgtagtcccagctcctggggaggctgaggcaggagaattgcttgaacctgggaggcggaggttgcagtgagccgagaatactccactgtactccagcctgggcgacagagtgagactccgtctcaaaaaacaaaaaaataattacatagccaaatgaaaattctcttcctcaaactcataagtaatcaccattaacaatttagtacgtgtccttcctgacctttttcgttatttattacttataagtacatccttgtatgtgtgagggtgtgtgtctatgagtagtgtgtatgtgtatacaaaaaaaatccattaattcttcagtgcatgtgatttgccaatagacattaacttacctgtgaaatggaagcgcagggtggagcaggacaggagcagggacattttgataagggtatacttgaagcagctgctccggaacacacagctctgcacgctgggcactgtatggggcttaggtccttaggagaggccagggtgctgtgatggcatcctctcaggaatttggggccaaatcgtattattcttccactaaagtctgtatgtttatatttttcttttttgggttatagttactctagtgataaagtattatagagatgcagaaacatgactgaaaacaaatccattttgatgttactgtcttcagcagataaacactgttgatgtgttaactacgatgggagctattcctgcagggttcaggccttccacgctctcacagcttctggaggaaggtaatgcgtgcctatcagccactgcactctttcagcaaagcagtcaagatccacgtctaatttttctgtcacaggcaaaacacattgttgaagaagatgttgaatctcacatctctttggtgctcatcttttcctcatccttcctatgacagtgaggaaagatccctgatcctatcagaggccagcctgtttaccagtgctccgggttccagcccctttctttttttcaaaaatgtgactcctttaattttcagccctttcctgtgtctttagctggcccaccttccccacactggttcattccctcatctgtgctatcagcacacctaattctccccaccttaaaggatcagccccttgaatcctatcccattctagccaaaacctccttttctctgatcttcttccaagcaagacttttccaaagaattatctccatttggaattttcattttccttactcattcttggctttccctgtatttggcaacttttgtctataagctcattttaaagaggattcatgctgggggacaaggggtgtcctgtataccctgagttgttgagttgtcatggaagggctgctttgaggatgcctttgctgggaaggttcttcccagtactccctaaattcccatcttttcatccttcaggtctcgcggtaaattctgccttcccagagatgccttccttgagtaatgtgggtttcccttactcccattcatgtgaacaccctttatagctctatgtcccctaataattattttatttatttgcttgtctacttattttctaagaaaattttcctcccattcaactgtaaactatggagggcaggggacatatctctgatttatctttgtatttctagaacctggtgtagcatctggcaagagtagaagctcaaaaattatttctcgaatggataaatgatgttattaaaagtattattcatgactaaagcatggaggaagagcataaaatgcttttgtgttaagaagtaaaactaacgactttgttttttctgaagtctccaaaaagtgctcatagatttctgcattttacaaaaatatttgaatgaatccttgtcatcatggggcatattattggcctaaaagtctttcttaaaggtgctttaagatgatcttttatgtgtttgtatctgtaagttttgtactgctgtttttatccataaatctatattggcgcttctattttggaaagcaagttcttagtaagcagcgtggcattttggaagtgcctgtactctagttcatagcataacattatggatttttgatttggagtttctttctttgtaagaaaatgaagaaaaaatgattttttcagggaatcaatttcgagcaaattacttcttacaaccagagctcatgccttcacaactggccttcagagatctgatgtgggatgctacagaaggcactgtaagtatagttactatcagtaaaagtgtaactcttccagattttgtcatagttgcaattagacaaacaacatgttaattgactaatgaattataaaaaacaaaaaaattgtttatgataattttgaaaatagcgatatttttataactaaggcagaatttggacttgctaccttgactttatcttgtttctcttctccattgcactcttctctcattgttagaaaggaaataatactaggtttctatcttaatcattctttgcctcaatttcttcatctgtaaagatggagtaatagtaatgcttccaacataaagttattttgataattatgtgtgtgaagggttttgaataatgcctggcatatgaaaagaactcaatagatgttagccattattatcatttatagtagtagtagcagtagtagtagtatttttgagacagggtctccctctgtcacccaggctagagggcagtggtgtgatcatggctcactgtaacctcaaattcctgggctcaagcgaccctcccacttcagcttcctgagtagctggggccacaggcctacaccaccatgcccaggtaatttttgtattttttgtaaagatggggttttgccacgttgccaggctggtctcaaactcctgagctcaagcaatctgccctcctatccctcccaaagtgctaggattacaagtgtgagccaccagtcccagtctaatataagttatttaaatgaaaaggcttatgaccgtaaagcagaatgtaaagtttaatgaattgaagctgttcttaaaaaataaaaaatcagaatgccaatttatttactcacaatctgaattatacctatgaagcagatctgaataaatatatcagatagtgcattctctctgttaaaacacctattaagaaactaaggaactatgcagataattgcttggaataaaaaatagtggggataatcttaatgccaggtggcattggttttatgctgcgttagccttctgcacttacccacattctgtaggagtgaaccgggactggaatacagtgattctatagtcatagatcatatacattttgcctgccaatatttattgttcctttcatcacagcttttaagtatttaagaaaaatgcaatatttcaaatgtaactctatgaaaaatttacctaaaatgactgatttaattttcaatgaacagagtattgaaacttttattgtatatgtgtaaattttttcttttttaaaaattctgtatacattttcataagccgaattcacaaaagacagatttgtgttagaaatcataaaaataaacttttttataactaatttttctttcagattaggtcgagaccaagtcgtatttcattgattctgacattatggagctgtaaaatgattcctcttccaggaatgagcatacaggttctcagcagacatgtacgcctctgtctatttgatggtaataaggtaaggttactgagaagtaaatcaattcatactaggattatggagaaacattcccttagattcttttccattcaactcctccccaattcccaagagagtattttttacctagtaccaaagaaaaatttgaatgactctttgaaaaattcattttttaaatgagatacaggttaaacagtacttagatggaaatttatagttttaattgtgtatattaaaaaaaagataaaagatttaaagtcagtgatctaagctagcaaatcaagaggctagaaaaagaagagtgagttaaacctgaagaaagtagaaagtgggaaataatacagataagagtagaaattaatgaaatagaaaacagatggaccaaagagaaaattttaaaaaagacaaaagttgattctttgaaaacattaataaaactgaaagatgcatagtgagactattaagacttttttaaaaagtaaaagaaaacaaactattaacatctgacatggaaatagagacattatcacagatccttcagacattaagaggccaataaggagatattataaacagctttataccagtaaatttgacaacattgatgaaatagataaattcctggagaaccataatttactgaaactggcataagaagaaatagaaaatgtgaataacctctggtaaagatattaaacctataattaaaaaaaaatcttgccacaaagaaaacttcaggcctaggtggcttcacctgtgaatttcttcaaacatttaaagaagaaataataccaatcttatacaaattcttccaaggaacagatgaaggagaaatgtttcccaacttatttcataaggccagaaaaaacatgaccccagaatatgacaagacattacaagaaaggaaaattaccagacagtatccttcatagatatagaaagtaaaattctaaacaaaatattattaaattgaatctagcaatatataaaaaggacattatgtcataaccaattggggtttatttcaggaattcaaatgtacattcctgggtaatcacatttaacatttgaaaatcaatcattataatttgccataagaaaaatcatatgatcatcttaagaggtaaggaaaaaacatttgacaaatttcaacacccatttatgatttttaaaaaattatctacaaactaggaatagaagggagagtcctcaaattgcaaaatgcaacaagaaaaaacctaaaactagcattatcttacttaacagtgaaatactgaacacttttttcctaagaccaggaacaagtcaaagatatccaagaaataaaaagataactcagttttctaaagggacaaaagacttgaatagcctcttcaaaaaagaagtatcaaaaaccactagaagtataaaaagatagtcaacatgtaagaagtcatcagggaaatgcaaatgaaaaccacagtgagagagactgacctatatgttatatataagaagcccaccttaaatattatgctataggtagcttaagagaaaaaaaggatgagaaaagatataccattcaaagtagacttcaggcactacatagtgataaaagagatcgttcaccaagaagacatagtaatcctaagtgggtacatacctaacatctgaaatttaacacacaagaaataaaaatggttagaactgaaaagagaaaccgacaaagtcacaattatagttggggcctctattatagttggggagtttaacacttctctctcagtaatataggacaagcagacagaaaattagtaaggatgtaagagaactgtataacatatcaacaaactggattagattgatattcacataacacttcacctcaaaatagtaaaatacactttctcttaagtacatatggaatagtcaccaatatagacggtcctgggtcagaaaacaaacctagacaaattgaaaagaattggaatcatataatatatggtccttgattacatggaattaaatttgaaatcagtaacaggaagataaatggaaaaatacttaaatacttgtaaatttaaaaactacttctaaataatcaaagggttaaaaggaaatttcatgggaaattagaaaatattttgaactgaacaaaaaatgaaaatgcaacatatcataatttgtggaatgttagctaaagcattgcttagagggacatttatagcactagatgcttatgttagaaaagaattctcaaatctacagtcaaagctccttcctgagaagacagtgctgcttgagctgataacggtcaatgtgaaattaaatgagttaatgtaagggaagttatcagagtgatgttatacatggaaagaacatagttctttcaaagagtgtctggatgagaggtggtgatgataacttagagaggtggaggtggagatgagagatgtggatagagatatctgggagtaaaaatcaacgaagcttggtgatggactggatatggaggagagaggaggagtggggtataggcatgacacctagtctctgacttccgcatctggatggatggtggcaacattcaatgagatggggaacactggaagaggaccacgtttggaggagttgacatgggcttggttttgcacatgctgagtatactgctaacccccagcatgaagaaaatgcctttatttcatctgaacttggggtaaagaaatgaacttatgttatgacggtaatcctccctcacttccataatacattctgcacaaaatcactgccacaaatgagccagtaggtgtcctcagtgaccaagagctgaattggtttctgtttcatacatctggtttgatactttttcctgtacctctctgtgttctcatatataagaacataaaaaggaatggaattttattttcaataatatatcaaaataatgaaatttactttatgaaagaaatttatgtgagatttccaaattgagagttatggaacatatttaatagctgcacagatactcgtgctgtttatgtaagagtgcttctttaataaatctaagcctagttatgaataaaaagcattgggctgggcgcagtggctcacgcctgtaatccccgcactttgggaggccgaggcgggcagagcacatggtcaagagatctagaccatcctggccaacatgatgaaaccgcgtctctactaaaaatacaaaaattagctggacgtggtggcgtgtgcctgtagtcccagctacttgggaggctgaggcaggagaatcacttgaacccaggaggcagaggttgcagtgagccaagattgcgccactgcactccagcctggtgacagagagaaactctgtctcaaaaaaaaaaaaaaacagaaaccaaaacacatacacacacacaaaaccaaaggcattgttgccaaaactaactaatgagacacaacttccagtaatgtttgagtcagctcctcttggaccaccccacccagagagggtaattgtaaactctgggcaaagtaaaaagcaactacctgaaggcactgcagagcattcagaagcaggcagacactggagaggagcctcaagcctttagtccactgatttattttttttctctttgttttctctcttttttgtttgtctcttttctttttcctatcttcctgtattagtttgttctcacgctgctgataaagacatacccaagaaagggcaaattacaaaagaaaggtttattggacttacagttccgcatggctgaggaggcctcacaatcatggcagaaggtgaaaggcacatctcacatggtggcagacaagagaacagagattgtgcagggaaaactcccatttttaaaaccatcagatctcatgagaatcattcaccatcatgagaacagtgcaagaaagacctgcccccatggtggcatgtgcctgtaatcccagctactcaggaggctgaggcaggagaattgcttgaaccgggacctgggaggtggaggttgcagtgagccgagatcatgtcactacactccagcctggactacagactgagactcttgtctcaaaaaaaaaaaaaaagaaagacctgcctccataattcaatcacttcctactggtttcctcccacgacatgtgagaattgagggagttacaagtcaagatgagatctgggtgaggacacagccaaaccatatcattcctcccctagtcccttccaaatctcatgtcctcacatttccaaacctatcatgccttctcaacagtcccccaaagtcttaactcatttcagcattaactcaaagttcacagtcccaacatctcatctaagataaggcaagtctcttctgcctatgagcctgtaaaatcaaaagcaagctagttattttccagatacaatggaggtacaggcattgggtaaatgcagccattccaaatgggataaactggccaaaacaaagaggctacaggccccatgcaagtccaaaatccagctggacagtcaaattttaaagctccaaaatgatctcctttgactccatgtctcacatccaggtcacgctgatgtaagaggtgggttcacatggtcttgggcagctcagcccctgttgttttgcagggtataaccccactcctggctgctttcatgggctggcactgagtgtctgcagcttttccagcagcacggtgcaagctgttggtggagctactgttctggggtctggaagatggtggccctcttctcacagctccactaggtggtgccccaggagggactctgtgtgagggggctccaaccccacatttccctttcgcacttccctagcagagattctccatgagagccccgcccctgcagcaaacttatgactggacattcagacatatcatacatcctcttgaaatctaggcagaggttcccaaacctcaattcttgacttctgggcacctgcaggctcaataccacatggaagctgccaagagtttgggcttgcaccctctgaagccacagcctgagcttatcttggccccttttagtcacagctggagtggctgggacacagggcaccaagtccctagactacacacagcatggggaccctcggcctggcccatgaaaccattttttcctcctaggcctcctggcctgtgatgggaggggctgctgtgaagacctctgacatcctctggagacatttttcacattgtcttggggagtaacatttggctccttgttacctatgcgaatttctgcagccggcttgaatttctcctcagaaaatgtgattttcttttctatcgcattgtcaggttgcaaactttccaaacctttatgctccacttcccttatgaaacaatgcctttaacagcacccaagtcatgtcttgagtgctttgctacttagaaatttcttccaacagataccctaaatcatctctctgaagttcagagttccacaaatctctagggcaggggcaaaatgccaccagtctcttcactaaaacataacaagagtcaccttttctccagtgcccaacaagttcctcatctccatcagagactacctcagcctggaccttattgttcatatcactatcagcatttttgtcaaaaagccattcagcaagtttctaggagattccaaactttcccacattttcctatcttcttctgagccctccaaactgttccaacctctgcctgttacccagttccaaagttgcttccatatttttggatatcttttcagcaacaccctactcctggtcccaatttactgtattagttcattctcatgctgctgataaagacatacctgagactgggcaatttacaaaagaaagaggtttactggacttacagttccacgtgtctgaggaggcctcacaatcatggcagaaggtgaatggcacctctcaaatggtggcagacaagagaagagcgcttgtgcagggaaaactcccatttttaaaatcatcagatctcatgagactcattcactatcacaagaacagcgcaggaaagacccatccccataattcaatcaccacccactggattctcccatgacatgtgagaattgtgggagttacaattcaagatgagatttgggtggggatacagtgaaacctatcacttcctgtgtgtcacttgagcatttttttttttttgagatggagttttgcttttgtcacccaggctggagtgcaatggcgcaatctcagttcactgcaacctctgcctcctgtgtttaagcacttctcctgcctcaccctctctagtagctgagattacaggtgctcactaccacacccagctaattttttgtatttttagtagagatggggtttcaccatgttggccaggctagtcttgaactactgacctcaggtgatccacctgccttggcctcccaaagtgctgagattacagttgtgagctaccgcacccgccccacttgaacattttttagaactccattctgagttatctgtagtgttgatgagtgtatctttttggctagtttccttagtggttgcttctaggtattaagtttatacatgcatagcttaccacagtctactagtgttaacattccagttggagtgatgtataaaaccttaccttcctttagttctttactttccctagcttgtaatatagttgtcttaaatatttcctctacatacattaagaatcttatcacacagcaccaaacataatttggaaaacctgaaagaagatccatagtatttacctatatttttactatttccattgtttattctttcttcctgatgctctaagagtcttctttttatcatgtcctatttagagaatctcctttaaccattcttttagggtaggtctgctggtgacagatttttagactttatctgagattgtccctgtttcctcttcattccaaaaggatattttaattagatagagaattctgagttgacagttatttttgtttgacacttgaaaactattgtgtcatttccttctgttctccgtggcttctaatgagaaattcatcatcattcaaattgtttttttcctgttggctaacctaaatgctgtttcttactgttttcaaggtattttcgttgtgtttcagttttcagaagtttacggtgtatctggcatgaatttctttggtttaccctgcttggggtttgctcagcttcttcaatctataggtttatgtcttttgtcaaatttggggatttttttcagccattattttctcaaatacctttgcaactccaattatttcttccagtgccgtttccctctatctagtagtgttgtggtttttattaacagtacatcaccctcctctcccaaccccagttcagaaccagatcttgacgtagagtttagagttcttgatctaagatgatgtcagatatgtcactgatccattaaaaggcccacttgttgacatggttctgcttctggtgtcatggctatgtctttgtcctcctacttgcttaggctcactactttttatgagaagcaggggcaaccttttttttttttttttttaaccctactggcttccagcaacaataaagcaatatctatttctctatcatggggtgatatatagcatacaaatccagccccttgctaccccatgctccttctggactcagagcccaggaaacctctagtttttgtctcactttactcttctatcttctatttgtggtccattgacatatttatcttacttttgggtattactctgtctttttaactatcactgcttcattgcttcatatgtggagcagaatggttgtgttgaagcataaactggttgagaagttcttgtacattcttagaaaaaaaaaaatagagccaaggtttcactatgctgcccaagctggtcccgaactcctgagctcaagcaatctccctgccgtagcctcccaagtagttagactacaggcacgagccactgcacccagcccctcttgcgtttttaatgcagtttgctgaacgaaatctctgtaaattattttgactcttcagttcttcattctttgggtctggttttgcacagaaagcagtgtgattctaagccagtcattcaccctctgtggctgcagttttctgaaatgcatagtgagatggttggactaagtcctttttagttcttagagtcaatatgtcaagaaagatataaaattatcaaacagaagaagttactcttgattccaaacttcaaaattaggattctccaaattgaaaagataaaagcagaggtagtataggatttcaattttgattatagcaaaggacttcttggccattagaagtagaaaacatttcttgaaaaacgaagaagaaccttagaataacatgcagtcttacagtaatcacaaggtagtaattataaggagtttgtattccaagagtccaggtggtaaatatacataatttcaggaaaagtttaaacatatatatattagcaatcgaaggaagtgggattttgttaatgtggaaaacaatccagctgcccataaaatactcctatattcctactactagggatgtggaatacagtgagtggaatttgacctaatataacacatttgggattattttaaattatcattttaaagctttgttttggaagtgttataataaaatattttcatctaaaataaaaattaactattatccattcctttggaagatgtcaattttggccataacattttagaatttgaattcttcattccataaatccctttgtgtttcattgttttatgtaagttttatgatgaacttcttgcatagagcattttataagagattgaatttcaataaaaatataatttatgggcctagagatcttgaggaaaaatataactgtatctgaactattaggactgtctgtcttagtgacagagtaatgaactgcatgtgaaatgcttgtatgggtcacatcttttttttttttttttttttcttgagactgaatcttgctccatcgctcaggctggagtgcagtggtgtggtatcagctcactgcaacctctgtctcccaggttccagcgattctcctgcctcagcctcctgagtagctggaattacaggcacacaccaccacacccagctgatttttgtgtttttagtagagacagggtttcatcatgttggccaggctggtctcaaactcccaaattcatgtaatccacctgcctcaacctcccaaagtgctgggattacagtcgtgagccactgtgctcaactgggtcacatcttttcttttaaaagaccatttttttgctgggtgcaatggctcacacctgtaatcccagcactttgggaggccgaggcaggcagatcacctcaggtcaggagttcgagaccagcctggccaacatggtgaaaccccgtctctactaaaaatacaaaaattagctgggcgtggtgacagggacctgtaatctcagctacttgggaggctgaggcaggagaatcacttgtacctgggaggcggaggttgcagtgagcctagatcatgccactgcattccagcctgggcgacagagcgagactccttctctaaacaaataaataaataaaaggccatttttacctaaaatttcaattacttttctggcaaacctatctcagatattaaggaattcacttaatataatttattactagcataggagtccaactctgaattcatttatgtcatacctgatataaaaagaaaaacattacagaattacatgaagtaaaaagtgaaagttctccccttgccatcttcctcacttagtgtagccactgttaactctttgggacatggaaatggtgacatttcaaagagctttttacatgatttcaaaagggaaaatctcatttcaggttctgagcaacattcatacagtcagagccacatggcaacctaaaaagcccaaaacatggaccttttctccccaggtaagtaatctgctgaatgagtggagtgagtgaatttcaaagtagaacatattcatatttctataaatagcacagagtatgtgggaacagatataaatctttagattctttggtgttctttgaggacattgataaaaattactcatgtttctgactcaccaatgttagtaattcctatgaatcatcccattcaatcagtttcagggttcatttttagaaaattctcatttgatgaaaaatgaaaacataaagataacatttaggaagtggggtgtttttcaaagatgaaatcttccaactgtgctaataaaagctgtgctttcttcagataaagtcagggatgacgcctgagggactgctacattacacccacacactgtcaagactggaatggcattaggtgggtttaaaccactgagtcagcattgcatagacgtagggaggacaaagatgtcttcgtgttgtttttatagtatcaattgtccatattttattttacattactttcgtctacctccaaggtctcattaatttagtatttacttccttcccacagctaactcccttgtataactgcatcctgaaaacccttagttacctttcctcttattgcatcaaaagatcttaaggcaagatggaggttcagtgagagggctcagggtgtggatgaggccagccacctcaactgtgtgctgtgcctgtccagacttgtcgagagcacacctcctaaaagtccatcttgatcttcttagcacccttcctctggtgagaagcatggcctctcttttggcacagtacttcacaattctgttattgcgtctctgtgtatgtgaagagtttagggtagaattttttaatgtttttcctggggtagaaggaagaactgttgggagtatgtgttattctgttgaatgaaattaaacatcagttatgtgcaagcattttttcctaggcacgtggaaactttttcatgccagtgaagttcctattccagcaaaattagtaggggaaaatacatacatgaagaataacaatatcatctacttatggaaccctaactgtgtgctaggccctgtgccaggctcttacgtacattaccttatttaatcagagtagccatgtggggcaagtactgttggtaactaccactcaggcagattgtaatggctttggagctccaagtgctttggaagcacacaggagggtaaagttaattctagtcctttggctcagggaaagttttctagaagagaaactagatcttgaaggttggatagattttacagtcaagaagggagggatacagttgtcgagggagagtgaattgaatgagcaaaagagaaaataaatgaaaattcacaaggcacacattaggaaagttgagcaaatatgtgtattcagtctttaatttttgttctgtttatgaagaacagtggttaatataaatatcttataatgtctataaactattatttgtaacacctctggagacctaggcacagtactattagcctctactctaagcaaaaaataagcaaaggtaaaggtattttccctttaaaagtgaagttaaatttttaaaatttgtaatcattggcattgatgaattcagtccatctgctttttgtttttcttaaaaggcttttattataatgcaaaggcataaactatttactaacaaatagggctgaaaccctgtgtgaggccgttcttgcattgctataaagaaatgcatgaggctggttaatttataaagaaaagaggtttaattggcccctggttctgcagactgtacaggaagcatggcacaggcatctgctcagcttctagggaggcctcaggaagcttccagtcatggcagaaggtgaagggagagcaggcatctcacgtgacagtgcaggagcaagaaggaggaaggaggtgccacacacttttaaaaaaactgatctcctgagaacgaactctctgtggtgaggacagtaccaaaccatgagggatctgccctcatgacccaaacacctcccaccaggcctcaccttcaacattgggattacaattcaacatgaaatttggtggggacatttattcaaaccacatcaaacccccttcccattttttatttttatcaataactttaatttctttatcatttcaggttactcgcatcttaccatgtttgcttgatggtgattgctttatcaggtctaattctgcatctccagatcttggaatattatttgaacttggaatttcttatattcgcaatgtatgtccgttgaaagataaggctttctaatgtatcagttaaaagggaaggttaaaaaatgtgtctattgacaaggaaatccttgaagtctttatgtgtaattgaattttaatcccttgaggaatgagaatgccagtgattctaattttatgtgtgctgatttgttttcgtagcatttaaaataatagtacttattcacatttatagcttgagtgaactccagtgcttttaaagaataaaaattcaaaaaggatgggactttgcagaaagtgagaaaagatgctcactggcatcccagcgccatggttcacctctgtcttccaggggcagagtatacttagccttgtaactgaggtttctaattaagggacttagcagagtagtgacttttataaagtgagtttaacttatgtcatataaactactgaaccagtgggtggggctctgtgctagtaattaaatgtttccacatactaataatagcttgataggtatagtatatatagttgacctcatggtaacccagagagcgttacagagatgttacattaatggtattacactgtccattcatttgtttaaggcaaattcatccatatgtattgtggagggggtaggactggggaaaggagcaggccccccaaaggaagccttaggggcctctagcaactgacagtgggggtaaaattccaagcagaaaagcccttgaatgattaatatctgcattctatctgtcagtgaaacaaaggttcatcatcccatgtagtactgatatgatttgagatcactccacagaatgcttatatcagtcaagagacaatggcagcagttgccacatcattggtttaagggattttcgagagcaattttgacaaaatatgattatcacttgatatactacctttaatatctgacccgcaggcaaaatgagattctactgtgtttcattttattttcttgtgaagaactttttagttctaaaggtgaatactaattttgttcctttaaaaggacttggtatgtgcttataaatttgactagttcagaccttaagtttcatatacttgtcttatttcctagtcaactggtgaaagaggagagttaagctgtggctgggtgtttcttaaactttttgatgccagtggagttcctattccagcaaagtaagttggctatatattcctaacgaatgaatacttctgtaaaaattcattttttagactcttgatacctcaggtttgttctatgagcatgccaataacttttggggagaggactttttatgttgactttagtgttgtttaggcagtgtatgaaaacagcatgcacagtctcatcctaaggaggaagaaatgactcctagagaagaggtattttaaaagatgtttgcactagccatctgctgagaatattctttcagtaatttcctatggtattaacacatttcaccatgctgaaaacagagcctagttgtcttcaaagagtgggaaagttaagtccagagtccagaggtcctctgtgagtctctacccttcctctgtaggtgggacattgaaatcacagtggcaaccacggtaaatgatttaaactttaagatcaaaaggcagactggaagcaaatactgcaatatgtacagaagagttagaagatcattatccctaatataaaaggaactctcaaaaattaataagaaaaagatcatctaaattttaaaatggaggaaaagaaagatctaaatctaggatataaacaagaaattcaagaagggacacaaatgggcaggcagtaggatggtgattaagatcccaaatttggattataaaattttgggctccagtcccagctctacccatgtaactgtaggtggatttcttaacatctccaagtctgaatttcacctatctttaatctggaagattgtaataattcctactccaaaggcttgttgtgaggattaatttagataatgcgccttatgtggcctcctgccacattggcagaggtagaagtcctgactgtacaagtcctttgacatcatcctagagggtgcattacctggggtgccaggtttcttgtgattgttatttgcttttttgtttttgtcttttaatatgctcagggtttttagttgtgcttagtggaagaaataaggaattgtatatctattccatctttctgaaagtgaagtcacagctatttttttaaatgaggtagagctctgtgtattaatatagacacattttcagtgtattagtatatggaaaaagttgcagaatattttgaatactgtgactccacttttgttcattaaaaactatttgtgggccaggtgaggtggctcacaatgcctgtaatctcagcactttgggaggccttggcgggaggatcacctgagcctgggagttatagaccagcctgggcaacatggtgagaccctgtctctacaaaaataaaaaaattagccaagcatggtggcacacgcctgtaatcccagctactcaggaggctgagctgggaggattgcttgaggctgagaggtcgagactgcagtgagcagttttcatgccactgcgctctagcctgggtgacagagcgagattctgcctccaaaaagcaaaaacaaaacaaagcaaaactgttcccagaagttgcctctgaggagcagaattgaggaggtggtgcattacaattaaagggctcttttaccttcttctttctacacttagtatgtgacttcaaaagaaaagcatgtagagtgttagttttgaagcatgtgttagttttgaaattcaccgtgtttatacatttgtttgcatttgcatagaaaagatagggcaggagattaaccacactagagaaggcggcatggggagggatttttcactttttacttatcattcctctgccattcaaactttttataataatctacacgttacttttatattttaaaaataatataagttcatagtggcctcatttcaaataatgatttaacacatttgaaaaatacattaaaaaaaatcacttgtcattaatgtaagtcattaaggtctgaacacgttaatgacttgaattaatttttctcattttcaaggaaaaatgtattttctacagtgtatagttaggaaagataattttctgcagcttataattaggaaagaaagactgtttatttgcccagatagtacctcatggagggatcaacaattattcttttcatttaccaacgaggcataaatgaaatgtctgagtatattagtgctaaaaaatatttaactactgactccagtgttttctacatgcccacagcttatatctgtcattgtatgttattcttttatagaacttatgagcttttcttgaatggtggtactccttatgaaaaaggtattgaagtggacccttcaatatccagaagaggtatggctctcatgtgttgtcttcctttccttaaagattaaacaaatagaagcatctgagaggtagctacattctaataagcatagcgttttttacttgaattcacacttttaaaaatatgtcatttgatataaaaattttaatcatttttaagtacttattttcttggtaacacatatgagactctaagacatcatgaagaatgaaatcatgaagaatgagaactaatgcattagttccttttcattgaccactgaactgatacttgtgactaatacagagactgcctattgctgggtcaaaggatgcagacatttgaaacagtaatatgcatgccaaattgccctctagaaatattgagcatcttttactatgttcattaaccaggcactgtgctagataatgggagaatgaagagcaagacagatatggtcattgcctcatggggctcagagcctgacagatttggaattccatttccactcctcagccacccctctatttgtttggtgattcaagacatgccacctctgctgaccccacaacgccagtcctgccttcttggaacagaaaggagtttggggtctgggatgcagttggttctacctggagtcagacatgctgttttcctttgtaatctggcagcaataatgctgtaactcatgtgatttagcaaacaatcctgtgcccttagggaggtctctcagctcatttagggtatatggatgactcttgcctttcattcaattcagcactactgggtggtatattttcatgaaatacttgttttattatactcactgtctcaagtacttaaagtttcgtgagttacttttgatttttcttaaaagcacacggcagtgttttctaccagattatgacaatgagaaggcagcctcaacttctagtgaaactgagatccttgaacagaagatcaagaaatgtactaaggtgggtacctgcttttacctgtccagtgaatttgggatcattcagcacttggagaccatctctgcttttggcttttcctcatatttagtcatcttttgttataatatttttgtcctctttaattcttcccccaaaggtcagtagggaaatgggtaacaaagctgaaattagcttactcttctatttactagttagctcttctaaccaaatctgttatttgagccatctagtaaatagaagacttgactaaatggggcttaccaatgcatgattctaccctcagggaacttttttaaatgtcaagtttattgagatataatttacatgcagtaaaatttactctttttagtttataattctttgtgttttgacaaatgtatactgtcatgtaattaccactacaatcaagatagagaactttccctcactctaaaaagttatctcatgcccctttgtagtcagctctgtatccccagcctcaggcaggcacacctattttctttctcagcagttttgctttgtccaaaatgtcatacaaatggaatcataacactcaggagccttttgagtctggcttctttcacttagcctagtgcatttgagacttacccatgccattgcatgtgccagtaatttgttcctttttgttctaaatagtacagactgtccctgacttactcaagatttttcaactttaccatggtgcaaaagcaaaacctgttcagtagacactatacttcagtacagattcaatgaattacatgagatatttatactttattacaaaataggctttgtattagatgattttgcccaactgtaggttaatgtgttatgagcatgtttaaggtaggcctgtctaagctctgatgttcagtagactagttgtaggctgggcatggtggctcacacctataattgcagcactttgggaggtggaggtggtagaatcgcttgaggccaggagttcaagaccagcctgggcaacatggcaagaccccatctctaccaaaaaaaaaaaattagctgggtatggtgatgcacacctgtagtcccagctacttgggaggcttaggtgggaggattgcttgaggattgcttgagcccaagaggttgaggctgcagtgagctgtgatggtgccactgcaccccagcctgggcagcagagtgagaccctgattaaaaaaaaaaaaagtctaagtgtattaaatgcattttcaacttatgatattatcttcaacttatgatattttcaatttatgatgggtttctggggctataacccaccataagttgaggagcatctgaattccctttgatagatatactacaatgtgtttattcattcacaaattgaagggcatttgggttgtttctaggtttgggcaattataaataaagctgctttaaacatttgtgtacaaattttctgcatgtggatatatgtcttcatctctcatgggtataaatacctaggagtgagattactgggacatatggagtttaactttataagaaactgccaaactgttttcatttttctttttctttctttttttttttttttttgagacagagtctggctctgtcccccaggctggagtgcagtggcaccatctcggctcactgcaagctccgcctcccgggttcacgccattttcctgcctcagcctaccgagtagctgggactacaggcgcccgccaccacgccctgctaatttttttgtatttttagtagagacagggtttcaccatgttggccaggatggtctcgaactcctgacctcgtgatccgcccacctcggcctcccaaagtgctaggattacaggcttgagccaccgcatccggccctaccaaactgttttcaaaatgactgtagcactttgcactctcattagcaatgtatgagagttccagttactctatattcttgacagcacttgatatgatcagtttttctgttttggccattctaataaatgagaatagtggtttctcatggtgttttaaatatacattttcctcagggagtttgtaaactaataaaatctcagatctatcagtttctcactcagtaccctcctagactagtcatttaacatctctatcagggtcttaatgtctacatctttaaaatggacataataataataatatcaaccccataaaggtgtaatgaggtttaatggaaagaaaatacataaaacagccagtatttacagtgtgtggcacatggtaactaacacaatagtgttagctataattatttactactataattatcttatatatagataaatgtaaacataaagccaggtagatggtgctatatcataaaatttgttcaaatgaagatgtgtagctggtaaaatcagggggcatttgaaatcacctttgaaggattgggaagatgcagaggaaaggagctccacagaggaggcacaaggccaagagggggaaggaagagcatggcatgggacagagactgttgcagctgaactgtcccaccatgacctgctcattgctcacagattattaagaagtagggaagtcagtgaagacttggcatgctcctgtgaatggtttttctcattccagatcatagtcttagcttaaatatcccttgttcttaccactactactgaaatttattttataattatagtgttaacagttcaatctttcaatagccattaataatgtgttcatgggtattatttactctcttagcttttttcccccttggatgttcatagagcctgtaaatcctcttttttggccagcctttccttggaaaattgttatttttcaagattagaaagaaagcagcacagtagtagtctttgtgaaagaaaacccaaatcttgtttggcctcattcttcctacatctttggcctccccactcctcatcttgttgataagcttccaagagtccggaagcactcccatgtgtatatttcaagtacagctcttaatagtgtttctttggcccccaaatactggttttcagacactttgtatgacctcaagatcaaattggactgtgtggtgcagaagttagcaaggcagccccttcttcttaagcagtgaatgctctactgtatgctgggttcttaaaggtcctgtgtccttgtgctccatacctcaggactgcgtcatttgtttcattacagtacagaataggcacccgaaaaatgtttgtgaaataatttcaaagcagagctctccctgctagtgtgaaaatatactcctcaggacttccgctcagcttccacctgtccctggcctccctctgccttgtcttggtgtgtgctcttccacagagagacttgagtgctggcttgaaattgcctctccactttgcatgaccccaaaatatacattcctgggaatttcaaacgtgagttgggacacactgctggtgcaactccaggctggctcgcacagaaaccagcttatgggcagtgaaacctgggccttgcagcagggctgggggctgtagtcagggggcggggtggggctgtgctgtgggttcaaggtaagagactaggcaccagcctgggcccttttggacatcactgagcctgtgcatcctggaggtggagactgaagcaggactgatccatttcaacatcctctctcctcccctgacccgaaaccttcggtaggtgggagaacaagacgggtaatgacaccaatagtccttctcctcctctccttcaaaggcacgccccgcctctatcctcaccctcccttctttacaaacttcacctttgtttatgcaaacttctctgctcaaaggagaaaggacaggggctctttccattatgccaaaggacatgagacagtggagacaaggccaagggcagaaagcctagttagagtttgcattagtgcccatttttacccagtgcccttgctgtttggctttacactgccctctctgactcagccagcagtcctacacatgtatatcttttggatatcaggaatcctgtgaaaatgtgaattattcggtgtagaccactggcaccagagtcctgctcacggggcttggcagtcttcttttgtggagtaggttgtgatcatggcgaccttgtcaacataagaaaaagagagcaaatagatgcttcagtttcaccaagatttgtcttttggagctatttttcaaaagggtttaacttgatgtgatttgaccaaaagcatgtgtataaacccctgaggagggaaagccctgaatttgacttcagattttcagtgcatgagttctaaatatcaagaaaccctgatctggagaagtaggttgcgtgtgtgtgtgtgtgtgtgtgtgtgtgtaaatttgctataaattcattatccttttttttgatgcattccatcttttttctcctttactttcattatatcgttgctaaaaataaataaggtaataatgttagttgcttgaatgcttgagacccattcattgtgttcattgccagagtttgctggtctacatgtgaattcaggaggaagtatatttttacttacttaattcagctaacctttagcagcccagaactttctattcgtcttaagtttgggaaaatcagatgctttctctaaagaatatctaataaagggcaagcagcattgcttcatgttgtgagaaagtgccagaaggaaaggagtgcccacactgggtggaccaatgcctgccaggcaaagcaggcaggtctacgagaaaaggagagggccaagcagaaggaaggaagttcccacccctttccctggcaaaaccttggctgttcttcatcatgagccctgagtttgggcatgcagctgaaacactgtgcaatgggaccgtggaccaaagggcagaacatgagcatgttgttcatgctcaggtcgttctgccccttgctcatgaacatgtccatggtcccagaacaacccagaatcagagcctgatccctgagaaagcatgtggtgacactgaggcagctgaaatggtcccctgcatcccgtctttaaaatgtaggtcaaatgtatacaagatcagaatttagccaggttgaaaaaagacagtttaaaaaagacagtttctgaccttatgtatcacatgctgtatatcaagataactgtgctaagagaacctgtattatatttttagatgtttctagaaattcaggatttaaagagtggtcaaggatacttctttaattccatgaaacttttttttttattataagttttagggtacatgtgcagaacgtgcaggttagttacatatgtatacatgtgccatgttggtgtgctgcacccattaactcatcatttaacattaggtatatctcctaatgctatccctcccccaccccaccccacaacaggccccggtgtatgatgttccccttcctgtgtccgtgtgttctcattgttcaattcccacctataagtgagaacatgcggtgtttggttttttgtcttgcgatagtttgctgagaatgatggtttccagcttcatccatgtccctacaaaggacatgaactcatcattttttatggctgcatagtattccatggtgtatatgtgccacattttcttaatccagtctatcattgttggacatttgggttggttccaagtctttgctattgtgaatagtgccgcaataaacatacgtgtgcatgtgtctttatagcagcatgatttataatcctttgggtatatacccagtaatgggatggctgggtcaaatggtatttctagttctagatccctgaggaatcaccacactgacttccacaatggttgaactagtttacagtcccaccaacagtgtaaaagtgttcctatttctccacatcctctccagcacctgttgtttcctgactttttaatgatgactgttctacctggtgtgagatggtatctcattgtggttttgatttgcatttctctgatggccagtgatcatgagcattttttcatgtgttttttggctgcataaatgtcttcttttgagaagtgtctgttcatatccttcgcccactttttgatggggttgtttgtttttttcttgtaaatttgtctgagttcactgtagattctgtatattagccctttgtcagatgagtagattgcaacaattttctcccattctgtaggttgcctgttcactctgatggtagtttcttttgctgtgcaggagctctttagtttaattagatcccatttgttaattttggctttggttgccattgcttttggtgttttagacatgaagtccttgcccatgcctatgtcctgaatgagattgcctaggttttcttctagggtttttatggttttaggtctaacatttaagtctttaatccatcttgaattaatttttgtataaggtgtaaggaagggatccagtttcagctttctacatatggctagccagttttcccagcaccatttattaaatagggaatcctttccccattgcttgtttttgtcaggtttgtcaaagatcagatggttgtagatatgcggcattatttctgagggctctgttctgttccataggtctatatctctgttttggtaccagtactgtgctgttttggttactgtagccttgtagtatagtttgaagtcaggtagcgtgatgcctccagctttgttcttttggcttaggattgacttggcaatgcgggctcttttttggttccatgtgaactttaaagtagttttttctaattctgtgaagaaagtcattggtagcttgatggggatggcattgaatctataaattaccttgggcggtatagccattttcacaatattgattcttcctgtccatgagcatggaatgttcttccatttgtttgtatcctcttttatttcattgagcagtggtttgtatttctccttgaagaggtccttcacatcccttgtaagttggattcctaggtattttattctctttgtagcaattgtgaatgggagttcactcatgatttggctctctgtttgtctgttattggtgtataagaatgcttgtgatttttgcacgtggattttgtaccctaagactttgctgaagttgcctatcagcttaaggagattttgggctgagacaatggggttttctagatatacaatcatgtcatctgcaaacagggacaatttgacttcctcttttcctaattgaataccctttatttccttctcctgcctgattgccctggtcggaacttccaacactatgttgaataggagtggtgagagaggacatccctgtcttgtgccagttttcaaagggaatgcttccagtttttgtccattcattatgatattggctgtgcgtttgtcatagatagctcttattattttgagatacgtcccatcaatacctaatttattgagagtttttagcatgaagggatgttgaattttgtcaaaggccttttctgcatctattgagataatcatgtggtttttgtcattggttctgtttatatgctggattacatttattgatttgcatatgttgaaccagtcttgcatcccagggatgaagcccacttgatcatggtggataagctttttgatgcattccatgaagcttaattactcgtggaatccattgctgtcacctcatcacagtggtcacattcatcctgttctcttccaacaggctggaagcctgaatattacctctgtgataattttcccttctaaaaatctaatcttaggaattaagataaaggattaatttacaaaaagtaagatctctttttaaatctttggtgatttttctcagcccaaagacatcttccttttgatagaagacaacatatcatttgtaaggtttttgagattttctatatggtccttcctcatgcttaatgacagagtttatatatttctaaaaatagtattagaaatatatattagaatgatctaagatattttcttgagtactttcaaaggttaaatcttgtgcatgatacattcccagtatttactatacatcatgtgtgagggtcttaaagaactcacttttttttttttttttttttttttttttgagacggggtctcgctgtgtctcccaggttggagtgcggtggcgcaatctcggctcactgcaagctccgcctcccgggttcacgccattctcctgcctcagcctcccaagtagctgggactacaggcgcctgccaacacgcccagctaattttttgtatttttagtagaaacggggtttcaccgtgttagccaagatggaagaactcacttttcatgtttccagattattattttgaaatctaaatattgaaattttttatatttttaaatttctgactattttttgatgctattgtaaattgttttgttggtttccttctcaaattgtgcattgttagtgtataaagtacgatttttacgtgttgattttgtattctgcaactttgctagtcatttattctgaaggtatttttcatggagtatttagggttttctacatatattctacatatttctacatcattttgtctgcaaacaaagacacttttctttttttagaaaaatatttccattattgtgttgagtaaaagtggcaggagcaggatccttgtcttgttccttatcttagaggaaaagctttcagtgtttcaccactgagtatgatgttagctgtgggcttttcatatatggcctttattatgttgcagtagtttctttctattcctagtttgttgagtgtttttatcatgaaagggtgtcaaattttaggctttctcagcatcaattgagaaaataatgtgggtttttccccttaattctgttaatgtagcacattatgttgattgatttttggatgttgagccatccttgaatttcattaataaatttgacttggtcatggtgtacaagctttttaatgtgctgttgaattcactttgctagtattttgttgaggattttgcatcaatattcaggaatattggcctgtagtttttttttttttttcttgtagtattgttggcttttttactagggtaattctgacctcataatgagtttgatagtgttttttcctcttcattttttggaaaagtttgaggaaaattggtgttaattcttctttaaaggtttggtagaattctccagtgaagccatctgatgctgggcttttctttatcaggagattttttaaattactgattcaatctccttacttgttattgagattttctatttctttgtgattcagccttagtaggttgtgtatttctagaaatgtgcctgtttcatttaggtcatccaacttgttggcatacaactatttatagtactctcttacacattttttatttctgtaaaatcaatagtaatatcccctctttcatttctgattttagttgagtgttccttagtcattctcactaaaggtttgtcaattttgttcatcttttcaaagaacagagtcttgctttcattgattttctctattgtttttctattctttattttgtctatatctgacctaatctttattatttcttccttctgctagttttgttcttctagttccttagggcataaagttaggttgttgacttgagctcttccttcttttttaatgttaagtatttatagctataaatttccctcttaggactgttttcactgtatcttgtaaattttggtatgttgtgttttcatttcatttctcaagatattttctagtttctcttgagatttcttctttgagccattgttgtttaagtatgttgtttaatttccacatatttatgtgttttccagttttccttctgcttttgatttctagtttcatttcattatgattgaaaaaagatattttgtatgatttcaatatttttaaatttattaagacttactttgtgactcaacatatggtctttcctggagaatatgtcatgtgcacttgagaaaaatgtgtattctgctgttgccgggtagagtgttttgtaaatgtcagctagatccaattagtctacagtgttattgatcttctgtttcattgttctataccttatcgaaagtaggatattgaaatcttctctattattatagatctatgtattgctcccttcaattctgtcagtgtttgcttcatatatttaggagcactgatgtttggtgcatatatgtttataattgttatatattctgaattgactgttttatgattgtacaatatcctttgtctcttgtaacttttggggggcttgaagtctattttgtctgatattaatatggctaaacatgttctcttttagttgctatttgcatgaaattttttttctgttctttcactttctacccatgagtgtcctaagtctaccgtgagtctcttatagataacatataattaaatcgtgtttttttagtgcatcctgccaatctgtatcttttgattgaggagtctaatttatttacatttaaagtgattactaatagagaaggacttacttttgccattttattactcatttgctgcttatcttatagctttttttgttcttaatttcctccctcactgattttctttgtgtttgatttttcatagtgacaaattttgattcccttttactttccatttgaaaatattctatagttattttctttgtggttaccatggtattacatataacatcctaaagttataacaatctattttaaactaataccaacttaacttggtattgcatacaacatccttaggttatagcagtctatcttaaactgataccaatttaacttcgatgttgaattattttctattttttagcccttactgtataccagacactacattaagcactccatacttatttcatttgttgttgttgttttgttttgagacagagtcttgctgtgtcacccaggttggagtgcagtggcacaatcttggctcatggcaacatccaccgcccaggctcaagggattcttctgccttggcctctgagtagctgggattacaggtgcccgccaccaaacctggctaatttttgtattttcagcagagatatggtttcaccatgttggccaggctggtctcaaactcctgacctcaagtgattcacctgtctcggcctcccaaagtgttaggattacaggtgtgagccaccatgcccagcccacacttacttcattttaatccttttagtaaccttctgaaatgcaagtattactattggtatccaataaatgaggaaaccaaagcacaaggagatgaattaattaatttaaagtcacatagctaagaagtgacaaagtcaggacttattccaggtctgtcacaccctcccatgttccacccagtactgtgaacagcctgaattatttcttctgcattcaccaaatcaggcatggcagccacatgcctttgttaaagcttgtagctgactagtccccttctttccaaaacataattagtggcttcccgtttttatttgacatttaacataggtatatatgctaacatggaagcacaaaaatggcaacacagggttgagactcgaaagtgtaaacaaatataaaaagttatctgaaatttaatgtggcctacttgtagtagaaatttttctttaaatagttaaaaatgtgttccagtaatgaagcaaaatttgggactgtttattaaagtaatatacatcaaaacattataagttggattgtaggggattgtctaatgaatacatttttttcttctttaatagtctactgccagaaacattaattggaaatatgtgttctattcacttgttgatattttatcgacaaattcttggagatgtgctcctgaaagacaggatgagcttgcaaagtactggtaagtgggctttgccacttccttatgtgcagtaatgcttcatactctgagtaaaggtaacctataccatcttgtatcttctgtttctggttgtgacttttggaataaaatatttagaacagcattgatgttaatacattacttatgggacatcttcagatccaaagcattgagctttgtgaactcgacacatattcagttctttcaaacatatgtattttcacatttcaaattctagagttttgagatcccaagagtcagatatagtcatattttcccttaatgtctctgagtaatctgttttttcccatgtgtttggtatgcacataatcattttgaagagaaaccaaaatcaaccaaaatagctggttcttagtgcatgaagtataagtatcaaatggattagtttaaattggtgaatccagatatggagtatttgggtgtcctatgtactgtctttattcttgcaacttttttgtacgtttgaaatttttaccaagtaaaatgttaaaaaataagtttaaaaatcaatgagtcaccatacatgattgaacctgcaaagataaatgcatgtgttatagtaattgccttcaaaaagaaaagcagtttaattgtattggctcttctttcagttcaataaatcagtaaccagatatgtactgagtacctggtatgtgccagatattatgctaggcccagtgatgaatgagacaggcataggcgtcccaggcctcaaacacataatttcatgaataatcctctccacccttttgaaataagtgctgtgaaggaaaatacacaacgagaacatgcactgggaagacttgattaatgtgtagggtaaggaaaggcttctttgagtgagtaatatttaacaaaagatgtgagagaggaattagacctatgagggaagtgtgtggggaaggattctttctgggtagaggggccagcatgtctgaagacccaaggaaagaagacatgcatgtgttggagggcttgaaattgaggcaggccagtatggatggagcagagtgagtgagaggcttagcacttgtggacaaataacattcataggcaggagtcctctcccagggacttatcacctggatagataggtagaagtggaactcaaaggcagagaagcgcagaaagttctcaaggaatcattataactctaagggggaggacgggtaagccttttaatcaccattgcctttgaattcattttcatgactcttgagaaacttcatgaatgatgtgacctcttaaagaggataaggcttgttagttttcccaataggtaagaagtttactcagaattgttgacttcatttgaatttaatcattagaataaaatatcctaataatatctaaagaatgaatttttctctactgaggacaccagattatagaataccttgcccttgccatttcaaaagtgtctgctatggtttcagtgtgtcccatctaaaattcatgttaccaatgtaatggtattgaaaagtggggcctttgagtggcgattaggccatgagggctgttgccttatgaatgggattagagacccttacagaagggcttgacaagggaattcgtctcacccttttgccttcagccacgtgatggcacagtgttcctcccctctggaggatgttgtaagaaggcccttaccagacaccaaatgccattaccttgatcttggatttcccagcctccagaacttggagaaataattttattttgtttatgttacccagtctcaggtattccactacagcagcgcaaacagactaagacatgtctttcctgatgtgcttctttgcacagatttttcatgtgctgttatctattgtgaaatgtcaatattctccctcactgtgtttggtcatatggccagaatcctcaattcctaattcttccagtttcacctaccactgtctgctggctccagacacaagtttgggtccttccctgagcgctggtggcctggaatcagacctgagcagcaggtcctctgtctcctttccccccaatgcttcctagtttctgctcagtctcccaagagcagggctacctctaaggggaagattccttttaccatgccacagccataaggaagaaagagaagttgaagaaaaacacagaacaaaattttctagtcttattctgttcagagcctccttgcccttactctaaaagctccattaatttggtacaggaactcaccaggatatgggtataggggcaaatgaaggttgaagggacagctttgagctctcctagaagtcaaagtgtgtagaatgtgttatcaacaaatcatttggcacaataattttcatctgaatatttttgtgtctattgcaataaaatccattgagtgaagtttgcataaaattctttctgttgttttgcatttcagatttaattagccatcccatgctggccaccttccccatgctcttggagcagcctgatgtgatggatgctctcagggtgggtagcatgcattgcaatggaaacctgctggcttatggaagcagttatacactctgtgttaatgagttctgtctaggcctttttttttgttactaggatgatgtctcccaatccctatccattgtctaggtaactcagtcctcatctttcccatcttagcataaattcccaagggctgccttccctgacccagggagcaggtggagtgcctgctatgtacactattgcaatctttgcccattttttccttgacttaggatggccactgattgtgtcctaagagcaaaaatccaaaatggtctgtaagataaatcaattgaatttgcaggggagaatcagggcatgcacatcatctttaattccatgtgtgctgtttgctgtctgaaataactgttgagtgttatgttaaatcgtatgaaatctccaattttcagccatttttggcctaagtggcagtttcatatggtttagcctaatacatcagggtcaataagtagaagagctgcatgcatgcaaggcagatacacaggtaacatcacaagtgccatgggggaggtataacccaggaccttgaagatttaaagaaggcagcaaagaaggatccaaattctgtttcactagagaggtcctgcatgagagagcctaataaaggccagggccaagaggattttgacctgctgagatgggggtgaagacgttgcaggtagaaggcttagcatgagcagacgtttgaggcaggaaggaatagagctgacagtccagcttggcatgtcagatgcaagtaagggagtggttggtagatgggcaaggtaagcctgagtctcggtgtggggctgagggcggtggtaggtggtgggtaacccaggaaggtttcttctttaggcaaactctgccaagtgcaaagaggcagaacatgtgcaggagggaggtgagcatattagggggtgactcctgctgataaaaactaggccatatgcacctgacagcagaaacagaaggaggactcagtcatctacaaagattcttattagactttgaaaccaattcatatgctagcttggctgggttggggggtgtcaatagtaataatgacattttcaacagagatgtttaagaaaatgttcatggtacatatgatctcctgtaattttagataagttcgtctggcactatagctagataatgcagaatttctctttcttctcctataaagtcactagtatcataataattattcattacacagaacatatatacactgattcttcaacaaagatttcacaagagcctactatgtattaatataaggcactgtgctggccacaggaatatttccctaggtgtgtaacaggaatctgcaccttgttcttaggaggaaacttaggatccctaatctagtctaaaatctgcatttccctgatgagcagacagcttggagatgtgcagtgacttggccggccatggagctcagccatgacccagccggggctgtccctgcgggtcagctctgggtgcacccagaatgtgccacgggctgcttgaaagcatgagggtaaagttgtgcacatatgttatttagcaaaaagaccccatttgagccataataagtataaatatatatacatttatatacctgcctgtgaaaagatctggaagaatatattccagagaggtattggtgaatatctctggatcttggattattttatctacattttcttaattttttcacattgaattatttgtgttatgataattttaaaaaagaaagtggtggttgtttctacacccatgagccttcttctctccgtggcatagtgtattacttaggagaagcttggctgtgctgtggtggttagcacaggtttatttcttacccatggtatgtatccagcatggatcagtggaagatgctgctccacagtcacccaagggtacaggctggtggagcctctactgtctcacagcaccatctggaacaagtagctgcctctgttgccagtttccctgcagaagagggagaatggagaattgttcttgggctttcactgcctttgcttcaaaggggcctgggccacttctgctcacattgcattggccaaaaccagtcacacggtccatttaacttcaaaggaggtatagtcttctttttgttccagaagaaaggaagtggatcttggtgaggtaatagtgacctttaacacgtttgctattcccaaatgagttactctaagtgaaacatcctactatttgctggtggctgaatgaaaaataaggtgggacattgacatgtaactaacaaaaatagacaaattttaccagacactaagtctacatttgctaagtgatactcacgttaaaccatattattaggttggtgcaagagaactgtggtttttgccataaaagtagtagcaaaaaccacaattacttttgcaccaactgaataaaatttaaaatgtacagcatgtgagcctcctagagtttacttacctagcacagttcagtttgtggatgacattttaataataagaagaatggcacttggcctgtttagtaaaacactctggttctgtaagggtcctcttcaaactcctaaggacccatagcacagcagttaatagggtggaggaccatagtcccctcacgtggtaataggtatgaacattccaaaatgttctcatgagtggcatagtctgttatctcctgctgagaaacgctctatcaatgcatcatttattttatggagaatctctttattggtgccatatgttatgttcatcccagggcctccctgctgagaaaggtctgatgctttcaggttactcatgatatcaggtgccaacaggaggatatctactgacatgcacagaacccagaccctggaacaggcagccgtgagactggtcatattccacccacgcattcagtttgccaggaaatggcacagtgaaagtcttaaattcatacttctgtgggactaattgaactctggggtttttatttatttgaggaaatttctgtgaagccctgtggacagattagaaatatttactcacaaaattgtacttcagtctgtctcattctgaccattgtcatcatcatgacagagagaattgtagaaaagtttggtatttggcagtgttttctattttcattactgtcttacttggaaagcttaatactattttattattcaggtgctgtggttgtatagttttcatggatgtgttagtgtttcgctgattctattcttaagttagttttgatttataattatcatgggcttctacggcatttttcacagatacatctgcctggtcattctggtgctgggtcatttgcaatagattcctaattacagattcacttcttgcttgtatagaatctgtacagcatttttaaccctgtccataagtttatttacagagtaaatttgcataagtgttgcaaggacttgttactacttggactaacataatatttctgtttgctctttagagttcgtgggctggaaaagaaagcacattaaaaagatcagagaaggtaaaatatgagtctccacactgaactccatatttgcagtacctggtgtttgcttgcctattctaatcatgtctcttttttagcaaaagtagccatagtcataatccctcttaaccagggaaactgtttcattatggctgcaaaaacacattccaagagggttacgcatgatcgttagctaatgtgagaaggaatacttgttcaagacagccatttcagattactgagttttatttaaataaaggggaagtttctaagccaaagtctctcagttgtgtatcaaatttcttttatttttaaaaaacttctctagctctcaaagcctgtatcaccaagagaagggaaaaaaaaatggcctgagctgtaccatatattgaaaacaatgcattgctcctgcttaccttgctataaaatcatggtaattaccaatccgaacttgctttaatcggtgagtcgtggtttgactgctctcatccaggatttggcaaatgggaagggctatagatggaaaatcttcttggcttttcaggtcttgtggtctctgtcacactactcagctctggtgttgtaacacaaaagcagccacagacaatatgtaaatgaccaaatgtgactgttttcctataaaactttatttatgaaaagaggtgagagtccacatttggcccacagtccatactttaccagtcctgatctaaagtattcattatctacaaggaaaatgaagtaacaaatgagctgaaaaccctaaaaattaggaaacaatttatacattgtatccttatttcagcctccatttgatcagtaccatctacatacatgtgactttgccaaaactgccaggcttagtgctattctagtacagcagccttgggcctgtagacattgcccttatgtggacatgtgtggtgggatgggtgatatctctgtgtagactctgctgcctgtggacagctctgccctcaacttgctgtgctctctgagattcccaccatggcctgtgggcatcggggcttgacatgggtacagctgatgctgcaccattcttatctgtgaagggtctgacatcctcatcaccaaaggacccctcgacctccatcccaggcattgctggaaataagccaacaactctggatcctatgcagaacacctgctacaattatcttagataacatgacagttacctctgatatgctgtcagtaagtaggttcagctgacttggcattgttttagttatatttacccctaaccacactggtgtcaccaaaattagactgcaataccttgacagaatgtgtgagacaccctccatggagcttaggagacaccctggtctcatggagccacgtagaggctctcagggagaactgctccactgtactctgtgtaactctgctcacttccacttctgaagtgccatgtcctgcctgagcagctggctcagagccgatacctgccaggcactaatggcaccctccatcctacctcttaggtggcttttagttaatagagttcacagaatttaacactttaaaaataacaatgttatttgtgggggtggtgttttcccagagagacaaagagttcctgaagtccacgtttctcctggtttaccatgactgcgtgctcccacttctccactccacacgcctacccccattcaggtgggcagaagaagagactgagactgcacggtggaaagttatcactgacttccttaagcaaaaccaagaaaaccagggcgccctccaagctctgctgtcaccagacggagttcatgaaccttttgacctttcagagcagacctatgacttcttgggtgaaatgagaaagaatgcagtgtgacagtggcagcctctagccctcagcttcccacggaatcagatggatcctccacgattacgtgaataaaatgatggaaccaaaaa

SEQ ID NO: 15699 - DNA, 81731 bp, Homo sapiens
ggggctgggaggcgggcgcacatcgatggcgtcaccttctggcgccgccggttggtttccctggcaactggagcaatcagagcaccgcagccagggagatgctggcgagacgacagcgagatcctctccaggccctgcggcgccgcaatcaggagctgaagcaacaggtatggtcaggctgtgcagagggccctggggcgggcgacaggcggacgcagctgcgcgcactgcgccttcccaccgtgaccccacctaatcctgggagcttgcccccaacctacttaccttcccaggttgtaacgcccccttaccccataacattccagcacccaaccccgattcaaacccctcctgatcccaactcaacccccagccaaaggcgaaacctcccaaaattcgtgaccatcaactaagcgccccctcctccgaccctcactcccacctaacgtctcaacctcctaccctaacaactcactaacccaccttatctcccaatctaaacttagtggtgtaaccatttccaacccaactctgagcctagctcctctcctccactttccaagcccatttcctttcagccttcctcaagtggagattattattgcctccgtgaactcaagcgaaataggtgtcaagaaatagtcttaatatgcaagaacattaagatctgataaatgagcaaaggaggtgaacgagagaggaaatacaagtaactcataaacatacgaggaatgttaacttcaaagatactcaagtaattgcaaagcacataaggtatcacaaaaatgttaaaaatcacaacactctgtcttgaggaaggtgtgatgaagcaggcacattcactgctcccgtgtataaggtgcttgtacagcatttcaggaaagcagcttgacaaggtgtaacatatgtgtatgcacctaggctcaaaaattacatttccagggatctgctatgtgtaataattagaaagtaggacagagattgatgtataaaagtattcatcacattgttacttatataatatacacagaacagcatagaagggaacaggctaatatggtatttctgtgtgacaggatgctgatgattattatgattttctttattctttttcatatttataaaaatttttaggccaggtgtggtggctcatgctagtagtaccagctacttgggaggctgagacaggaggatcacctgagcccaggagttcgagactagcctgggcaacataacaagacttggtctcaaaaaaaaaaaaactttttaaaaatacactgagttcttattaaaaataagaaaaaagtaaatagcaaccagtgggtttattttctgacattttaatttcactttaatttttttcatgtgatctattaccaagtatttttccactgagtaaaattattttataatctgaggccggtaagagattcactgatgctcatattttatccatttttgttctcttgtttaaagtaaaaaggatttggaaggtaaatatttaggtgactgtgtattggaatcacagtggtgcaacaaaagctaaatactcttctggtagaaataaaaaataaaacttgatggggcattgacttatgctgaacttcggtggatcttaatatggttctgtgtcttattttaaaatttcaacttttattttagattcagggggtacatgtgcaggtctgtcacatgggaacactgtgttatgctgaggtttggggtacagatgagcctatcacacaagcagtgagcacagtacccaataggcagtctttcagtcttcattcctcttccctcccccaccccactccagcagtcaccagtgtccattgctcccatctttatgtccatgtgtactcaacgagtgagaacatatggtatttggttttctgttcctatgctaattcacttaggacaatggcctccagctccatccatgttgctgcaaaggacatgatttcattcttttttatggttgcatattttttcatggtgtatatgtaccacattttctttatccagtccaccattggtgggcatctatgttgattccatgtctttgctattgtgaatagtgctgtagggaacatacacatgcatgtgacattttggtagaatcatttcttttttgggggtatatacacggaaatgggatttctgggtcaaatgatagttctgttttacgttgtttgggaaatctccaaactgctttccacagtggctgaactaattttcatgcccaccaacagtgtatatgtgtactcttttcttgtcagcctcaccagaatctgtcatttcttgattttttaataatagccattttgaccagtgtgagatggtacctcattgtagttttaatttgcatttctctgatgattagtcatgatgagttaattttaaatttagtgggacattaggagaaccaggaaaagttttagaaggaaactataaaaatgattattaaaacaaactattagaaagattattctccctggagaaatattggctctggagccttttgataccttgactatctggaaagtttgttttgatagtattagctaattcttccctgtcttcacagaggacacctgaagctgaatatggaacagattttctattcggtgtctgtaggacaagtaatcaacagcccctctgagtcaggcctgtgatgactggctctatcactaggtgtgtgaattttgtaaataacactcagatggatgccaaattgcaagagtagagaagaaactaatggaattttctcttttttcatccactttatcttctctacgtaatctatagaaaacagaccaaagaagtatgtgcctttttggagagtatattgacaaagttacatatagtgttagtaaacaaactactaagtcaagagaaacaaagtcatgatacattcaatacaatggataccactcagtaatgagaaggaatgaactaatggtacacacaacaatatggaagtatctcaaaaacatgctttgtggaaaggttacacaagagtgcttactgtatgagtccatttatataaaatttcaagaacaggcaaaactaatttatgttggaaaaatatcaaaacaggtttgtctgtggaggaataaggaggggatttactggcaagggcatgagggaacttactagggtgatggtagttttctacatcttgataagaattttggttacacagatgtatgcatttgtcgaaactcagcaaatgtatgcctcgtatttgtgcatttcactatatacatattttacatcaactattgaactttagttagtgacatccatagtccattatttagggagaaatgtattgataactgcaacttactttgaaaggcataaggtgggttgacggatagatcaaataagtatagtataatgttaatgttttttctaggtagcgggtatatgggttttcactgtaaaatttttaaaactttgttgtatgtttaaaagtgttcattataaaatattggataaaaaaagaagttttctttcctaaggcgatatggtatttaataatgtgatattttaaatggtctccataggttgatagtttgctttctgagagccaactgaaagaagctctagaacccaataaaagacaacatatttatcaaaggtaaagtatgctaaattatataagctttacaggaaccgcacttacatttcaatgcatagtatttaaggcatagagattggtcctttggaatcaaatggaagaatcacatagtgttgtaagttgaatgtagaagaaaccaacctaaacctgatggttgcggacttgctgttgtgacagcaactataaaaactgcttaatgtaaacataggtgacatgggcaggattaccctaaatccttagcctatgtagcccagatcctgtgacctggtcagaaacctctgtctataagcaattagtacttcattgggatgtcaactttaactcccatgagaagacaacactgttttctaggtgggtgttttttgttttgtatttgtttttacttaaaaaaaaatccttgggagagtttaaatagacgtgatgaactacatcaaatttagactattaattcataacatttgtattaagtttaggacatcattaagataatctttgtttttgagatatttaaggattttattacattccaaagaacatgagattcattctattaatttaagtgaattgtaattgtttggagaagttttacttaagtcaggcattcagagtgcttaaaggcaaaacaaatgaattttgaaatgtcaaatgaatttaatttataatagtaggattgattaagggatttagttcaagctgaattaacagtaatgaaagaaaagcaaaggttattgttcttgctttactagatttaaaaacagagtaagatttatagactgaatttgaaggccaagggaaaactacgtttttaaattttatgttagtaaactaaaaatcataattattattattttattttttgagactaaatctcactctgtcacccaggctggagtgcagtggcgcaatctcggctcattgcaacctgcacctcccaggttcaagcgattcttctgcctcaggctcttgagtagttgggattacagtcgtgccccaccacacctggctggattttgtattttgagtagagatgggtttcatcacgttggccaggctggtttcgaactcctgacctcaagggatcccccagccttggcctcccaaagtgctgggattataggtgtgagccactgtgcccagcctaataattgttatgttttattttttttgagatagagtctctctctgtcgcccaggctggagtgcagtggcatgatctcggctcactgcaagctccacctcccaggttcaagcgattctcctgcctcagcctcccgagtagctgggattacaggtgcccgccaccatgcctggctaattttttgtatttttagtagagatggggtttcaccgtgctagccaggatggtctcaatctcctgacctcatgccccctgctttggcctcccaaagtgctgggattataggcgtgagccaccgcgcccggcccctaataattatttttaagcccaagtaaccatagtcttctctgtgcatgaaaagaagattgttactgtcatttaaaaactcactttgacatttgcatatctgaaaatgtcatttaggtatcatttttatctgctcagtgctctgagtcttttcagtttgaaaactcatgtctcatgagctctgggagattttattttacaaaaagattatttcgttaattccatttgtctgtttcttcctgaaacacctttgagtcaggtattggatatcctggactgatcctctatatcccataacttcctgttaatagtttctgtttctttgtttgtatgggagatgtttttttggggggatgtggggggtctcactctgtcgttcaggctgtaatgaagtggcacaatcatggctcactgcaccttctgcctcccaggctcaagggatgcccccctcccccgccacgagctaccatgctagcaattctcttgactttaacacttttctttattacctatttcaacagccatattgttttatttcagcagtcatattggtttttttttttttaagatggagtctcactctgtcatgatcttggctcactgcaacctctgcctcctgggttcaagcgattctcctgccttagccttctgagtagctgggattacaggctcacgccatcacactcggctaattttttgtatttttagtagagacggagtttcaccatgttggccaggctgctctcaaactcccgacttcaggtgatccacccatcatggcctcccaaagtgctgggattacgtgagccaccgtgcctggccatcatcagtcatgttgttaatttacaagtgttttctcttgttctcgaattgttcttttttcatagcatcatgttcctgttttcatattgattgccttcttactacttccatgactaggaggctttttttttctccttaagttctcttctgttctctgaattgtctttgctttctctgggctcagattccttttaattagttaattaattaatttatatttggttattcttaaattttatcttcacgttgccggttttctttattaggtctggcttatctatttttattgaacaatgagggactaggttgattattccagagagctctcatgggcttttctactgttagatagagaggggtccttcctgctagtaccatcccctgaataagaatgaaattttgtatgttgatagggcttatcagaggctcggaagtagcttttagtctgaggatcccccagtgccagaatagggccggctctaaccctggtgtatgggaaacttctttagcagtcatgattctcttcaggtcgtttgttaattgtttttgtttgtttttttgtttttagggaagaatcccctggtaaggagggagagcagagaggggaaaagggagctaactggctcaggttttctgtaaatagacttttaaaagaaagaaccccaactaaatctaaacgtaatcagtatcattaatcttcccttgactaatataaagaccttagattgctttaacattgatttccctcctcaaagcttagatgtatgcatatgatttaatttacacaatataacacaataatattagataatttataaagtaaaccccagccactgtgcatgtcttttcatcagcagaatttcataatgtgtccctctatgatttagtttagttaacctttggtcctttatgtctgctgactcaagtcctagagttttcggcctggcagattatctccctcttatgcttgtgttgcgtcttccaccctttataggagaacatgcttccagcctttttccatggagcagaaatttgttgaaatctcttgctggctagttgtccttctttccttctttgcagtgttcagagtttgttaccttttcaaacgttttaatcattttttgtggggtttcaggagccagtgaagatgaatgtgtgcttagtttttatcctgaaccaggagtcttaaaatatcaactgtttgaggattttaataattacatagttataaaggaggtaattgtaataagtaatttattttcttggtacattatattaaaatagttttccactctgggctttaagcgaaatttctgagtctaagtttcagtagagatttttttggtcaagtaacatgacacctgccaaaataagcggctttactgtcagtctcatttgacaaaagcctgcagctaggttctctcagggtggattcatggcttgtgatatcctcaaagaccagcctttgatgtcattccactctgccatcctttgcttgttggtgatgtctctcctcatggttacaaagtccataccctcagtatctaagagcagatgtaggagagattcttttcatgcctggtaagggaggataaaatgggaggcaatcccaatatacgtgttttatgttacactggcagccgtgggccccctgctcaccctgcctgcagtggaggctgagaacataggtgccagtgggaagctgactgccagcaaagaggaagggtgggaaaggggcttttggggaggttgctagtagggtcagccccagtttgatgtttccccttctcttttgctacccttttgacaaaggacttttgttccctttaaaacgttttttatttattactgttttttatttttttctttaagttcagggatacatgtatggcattgtgcaggtttgttacataggtaaacgtgtgccatactggtttactggacagatcatcccatcacctaggtattaagccctgcatccattaattattcttcctgatgctctccctcctctaatacctccttcctacaggccccagtgtatgttgttaccctccttgtgtccatgtgttctcatcattcagctcccacttataagtgagaacatgcggagtttggttttctgttcctgcattagtttgctgaggataatgacttccaactgtaaccatgtccctccaaaggacatgattttgttcctttttatggctgcacagtattctatgagaacatgcagtgtttggttttctgtccttgtgataatttgctcagtatgatggtttccagcttcatccatgtcccttcaaaggacatgaactcatcattttttatggctgcatagtattccatggtgtatatgtgccacattttcttaatccagtctatcattgttggacatttgggttggttccaagtctttgctattgtgaatagtgccacaataaacatatgtgtgcatgggtctttatagcagcatgatttataatcctttgggtatatacccagtaatgggacagttgggtcaaatggtatttctagttctagattcctgaggaatcgccacactgacttccacaatggttgaactagtttacagtcccaccaacagtgtaaaagtttcctatttctccacatcctctccagcacttgttgtttcctgactttttaatgatcgccattctaactggtgtgagatggtatctcattgtggttttgatttgcatttccctgatggccagtgatgatgagcattttttcatgtgttttttggctgcataaatgtcttcttttgagaagtgtctgttcatatcctttgcccactttttgatggcgtcgtttgtttttttcttgtaaatttgtttgagttcattgtagattctgtatattagccctttgtcagatgagtagattgcaacaattttctcccattctgtaggttgcctgttcactctgatggtagtttcttttgctgtgcagaagctctttagtttaattagatcccatttgtcaattttggcttttgttgccattgcttttggtgttttagacatgacgtccttgcccatgcctatgtcctgaatggtaatgcctaggttttcttctagggtttttatggttttaggtccaacatttaagtctttaatccatcttgaattaatttttgtataaggtgtaaggaaggcatccagtttcaactttctacatatggctagccggttttcccagcaccatttattaaatagggaatcatttccccatttcttgtttttgtcaggtttgtcaaagatcagatagttgcagatatatggcattatttctgagggctctgttctattccataggtctatatctctgttttggtaccagtaccatgctgttttggttactgtagccttgtagtacagtttgaagttaggtagcgtgatgcctccagctttgttcttttggcttaggattgacttggtaatgtgggctcttttttggttccatatgaacttaaagtagttttttccaattctgtaaagaaagtcattggtagcttgatggggatggcattgaatctataaattaccttgggcagtatggtcattttcacgatattgatacttcctacccatgagcatggaatgttcttccatttgtttgtatcctcttttatttcattgagcagtggtttgtagttctccttgaagaggaccttcacatcccttgtaagttggatttctaggtattttattctctttgtagcaattgtgaatgggagttcagtcatgatttggctctctgtctgttattggtatataagaatgcttgtgatttttgcacattgactttgtatcctgagactttgctgaagttgcctatcagcttaaggagattataggctgagacgatggggttttctagatatacaatcatgtcatctgcaaacagggacaatttgacttcctcttttcctaattgaataccctttatttccttctcctgcctgattgccctggccagaacttccaacactatgttgaataggagtggtgagagagggcatccctgtcttgtgccagttttcaaagggaatgcttccagtttttgcccattcagtatgatattggctgtgggtttgtcttagatagctgttattattttgagatacgtcccatcaatacctaatttcttgagagtttttagcataaagggttgttaaattttgtcaaaggccttttctgcatctattgagataatcatgtggtttttgtcgttggttctgtttatatgctggattacgtttattgacttgcgtatgttgaaccagccttgcatcccagggatgaagcccacttgatcatggtggataggctttttgatgtgctgctggatttggtttgccagtattttattgaggatttttgcatcgaggttcatcagggatactggtctaaaattctctttttttgttgtgtctctgccaggctttggtatcaggatgatgctggcatcataaaatgagttagggaggattccctctttttctattgattggaatagtttcagaaggaatggtaccagctcctccttgtacctctggtagaatttggctgtgaatccatctggtcctggactttttttggttggtaagctattaattattgcctcaatttcagagcctgttattggtctattcagagattcagcttcttcctggtttagtcttgggagggtgtatttgtcgaggaatttatccatttcttctagattttctagtttatttgcatagaggtgtttatagtattctctgatggtagttggtatttctgtgggatcggtggtgatatcccctttatcattttttattgcatctatttgattcttctctcttttcttctttattagtcttgctagcggtttatcaattttgttgatcttttcaaaaaaccagctcctggattcattaattttttgaagggtttttttgtctctatctccttcagttctgctctgatcttagttatttcttgccttctgctagcttttgaatgtgtttgctcttggttctccagttcttttaattgtgatattagggtgtcaattttatttctttcctgctttctcttgtgggcatttagtgctataaatttccctctacacacagctttaaatgtgtcccagagattctggtatgttgtggctttgttctcgttggtttcaaagaacatctttatttctgccttcatttcgttatgtatccagtagtcattccggagcaggttgttcagtttccatgtggtttagtggttttgagtgagtttcttaatcctcagttctagtttgattgcactttggtctgagagacagtttgttataatttctgttcttttacatttgctgaggagtgctttacttccaactatgtggtcaattttggaataggtgtggtgtggtgctgagaataatgtatattctgttgatttgggttggagagttctgtagatgtctattaggtccacttggtgcagagctgagttcaattcctggatatcctcattaactttctgtcccgttgatctgtctaatgttgacagtggggtgttaaagtctcccattattattatgtgggagtctaagtctctttctaggtctctaaggacttgctttatgaatctgggtgctcctgtattgggtgcatatatatttaggatagttacctcttcttgttgaattgatccctttaccattatgtaatggccttctttgtctcttttgatctttgttggtttaaagtctgttttatcagagactaggattgcaacccctgcctttttttgttttccatttgcttggtagatcttcctccatccctttattttgagcctatgtgtgtctctgtacatgagatgggtttcctgaatacaacacactgatgggccttgactctttatccaattttccaatctgtgtcttttaattggagcatttagcccatttacatttaaggttaatattgtcatgtgtgaatttgatcctgtcattatgatgttagctggttattttgctcattagttgatgcagtttcttcctagcctcgatggtcttcacaatctggcatgtttttgcagtggctggtaccagttgttcctttccatgtttagtgcttccttcaggagctcttttagggcaggcctggtggtgacaaaatctctcagcatctgcttgtctgtaaaggattttatttctccttcacttatgaagcttagtttggctggatatgaaattcggggttgaaaattcttttctttaagaagttgaatattggccgccattctcttctggcttgtagagtttctgctgagaggtcagctgttagtctgatgggcttccctttgtgggtaacccgagctttctctctggctgcccttaacattttttccttcatttcaactttcgtgaatctgacaattatgtgtcttggagttgctcttctcgaggagtatctttgtggcgttttctgtatttcctgaatttgaatgttggcctgccttgctagattggggaagttctcctggataatatcttgcagagtgttttccaacttggttcaattctccccatcactttcaggtacaccaatcagatgtagatttgatcttttcacatagtcccatatttcttggaggctttgtttgtttctttttattcttttttctctaaacttctctgtttgctttatttcattcatttgatcttccatcactgataccctttcttccagttgatcgaatcagctactgaagcttgtgcattcgtcacgtagttcttgtgccatggttttcagctccatcaggtcctttaaggacttctctgcattggttattctagttagccattcgtctaatcttttttcaaggtttttaacttgttttccacgggttcgaacttcctcctttagctcggagaagtttgatcatctgaagccttcttctctcaactcatgaaagtcattctccgtccagctttgttctgttgctggtgaggagctgcaatcctttgaaggaggagaggcgctctgatttttagaattttcagtttttctgctctgttttttccccatctctgtggttttatctacctttggtctttgatgatggtgatgtacagatggggttttggtgtggatgtcctttctgtttgttagttttccttctaacagtcaggaccctcagctgcaggtctgttggagtttgccggaggtccactccagacgctgtttgcctgggtatcagcagcagaggctgcagaacagcgaatattggtgaacagcaaatgttgctgcctgatcattcctctggaagttttgtctcagaggagtacccggctgtatgaggtgtcagtctgcccctactggggggtgcctcccagttaggctacttgggggtcagggacccacttgaggaggcagtctgtccgttctcagatgtcaagctgcatgctgggagaaccactactgtcttccaagctgtcagacagggacatttaagtctgcagaggtttctgctgccttttgtttggctatgccctgtccccagaggtggactctaaagaggcaggcaggcctccttgagctgcggtgggctccacccagtttgagcttccaggctgctttgtttacctactcaagcctcggcaatggctaacaaacagcctcgctgctgccttgcagtttgatctcagactgctgtgctagcaattagcgaggctctctgggcgtaggaccctctgagccatgtgcgcgatgtaatctcctggtgtgccgtttgctaagactgtgggaaaagcgcagtattagggtgggggtgacccgattttccaggtgctgtctgtcatccctttccttggctaggaaagggaattcccttgtcccttgtgcttcccgggtgaggcaatgcctcgccctgcttcagctcatgctcggtgtgctgcacccactttcctgcacccactgtctgatagtccctagtgagatgaacccagtacctcagttggaaatgcagaaatcattcatcttctgcgtcactcactctgggagctgtagactggagttgttcgtatttggccatcttggaaccgccccaagtgttcctttttctctgcaattttgccaacatctgtttttttgactttttaataatcaccgttctgactggcatgagatggtacttcactgtgctgaatgtgtgtcttttgagaagtgtcacttcatgtccttttgctcactttttaatggggtttttttttcttataaatttgcttatttttagactctggatattagacattcatcagatggatagattgtaaacattttcccccattctgtaggttgtctgttcattctgatgatagtgagaggtgacagcatgctggcagtcctcacagccctcgctcactcttggcgcctcctctgcctgggctcccactttggcggcacttgaggagcccttcagcctgccgctgccctgtgggagcccctttctgggctggccaaggccggagccagctccctcagcttgcgaggaggtgtggagggagaggcgcgggtgggaaccgggcctgcacacggtgcttgtgggccagcgtgagttccgggtgggcgtgggctccgtggactctgcacttggagcggccagccagccagccccaccggccctgggcagtgaggggcttagcacctgggccagcagctgctgtgctcaatttctcacccggccttagctgccttcccgcggggcagggctcgggaccttcagcccgccatgcctgagcctccccgccctctgtgggctcctgtgcggcccgagcctccctgacaagtgccaccccctgctccacagtgcccagtcccatcgaccacccaagggctgaggagtgcgggcgcacggtgtgggactggcaggcagctccacctgcagccctggtgcgggatctgctgggtgaagccagctgggctcctgagtctggtggggatgtggagaacctttatgtctagctaagggattgtaaatacaccaatcagcactctgtatctagctcaaggtttgtaaacacaccaatcagccccctgtgtctagctcagtgtttgtgaatgcaccaattgacactctgtatctagctactctggtggagccttggagaacctttatgtctagctcagggattgtaaacacaccaatcggcactctgtatctagctcaaggtttgtaaacacaccaatcagcaccctgtgtctaactcagggtttgtgaatgcacccatcgacactctatatctaactactctggtggggacttggagaacctttgtgtggacactctttatctagctaatctagtggggacctggagaacctttgtgtctagctcagggattgtaaacgcaccagtcagcaacctgtcagaacagactactcggctctctgtaaaatggaccaatcagcaggatgtaggtggggccagataaaagaataaaagcaggctgccggagccagcaatggcaacccgcttgggtccccttccacactgtggaagctttgttctttcgctgtttgcaataaatcttgctactgctcactctttgggtccacactgcctttatgagctgtaacactcaccgcgaaggtctgcagcttcactcctgaagtcagcgagaccatgagcccactgggaggaatgaacaactccagacgtgccgccttaagagctgtaacactcaccgtgaaggtctgcagcttcactcctgagccagcgagaccacgaacccaccagaaggaagaaactccaaacacatccgaacgtcagaaggaacaaactctggacacgccgcctttaagaactataacactcactgcgagggtccacggcttcattcttgaagtcagtgagaccaagaacccaccaattctggacacaatagtttcttttgctgtgcaaaagttctttagtttgatgagatcctatttgtcaagttttgcttttgttgcaattgcttttggctttttgttgtcatgaaatatttgcctgtgcctatgtcctgaatgctattgcttggattttcttctagagtttttatagttttgggttttacatttaagtctttaatctatcttgaattaatttttgtatatggtgtatggaaggggttctagtttcaattttctgcgtatagctagccagctcttccagcatcatttattaaatagggggccctttccgcattgcttgtttttgtcaggtttgtcaaagatcagatggttgtaggtgtgcaagtcttatttctgagttctctattctgttccattggcctatgtgtctgttcttttaccagtaccatgctgttttagttactgtagccttgtaatatagtttgaagttaggtggtgtgatgcctccagctttgttctttttgcttatttgggctcttcttttgttccatataaattttaaaatagctttttctaattctgtgaagaatgtcaatggaagtttgatgggaatagcattgaatctatacattatttggggcagtatgtccattttcacgatatgattcttcctatccacaagcatggaatgtttctccatttttttgtgtcacctctgatttctggagcagtgtttgtagttatccttgagaaggtccctctcactttctttgttagctgtattcctaggtattttattctttttgtagcagttgtgaatgtgagttcaggatttagctctctgcctgcctgttgttggtatataggaatgctagcaatttttgcacattgattttgtatcctgagactttgctgaggttgcttatcagcttaagaagtttctgggccaagacaatgggttttctagatataggatcatgtcatctgcaaacagggataatttgagttcctctcttcctatttgaatactccttatttctttctcttgcctgacttcccaggccagaacttccaacactgcattgaataggagcaatgagggagggcatccttgtcttgtgcctgttttcaaagggaatgcttcaagcatttgcccattcagtatgatattggctgtcggtttgtcatatatggctctgattattttgaggtatattccttcaatatctagtttattgaaatttcttaacatgaaaagatgttgaattttattgaaagccttttctgcatttattgagatagtcatttttttttgtcttaagttctgtttatgtgatgaatcacatttattaatttgtatatgttgaaccaaactttcatcctggggatgaagccaacttgatcatggtagataagctttttgatgtgctgctggattcggtttgccagtattttgttgcggatttttgtatcgatgttcatgaaggatattggctttaagttttctgtttttgctgtatctctcccaggttttggtatcgggaggatgctggatacaatcagttagggaggagtccctccttttcagttgtttggaataatttcagtagaaatggttcccactcttctttttacctttggtagaattcagctgtgaattcatctggtcctgggagtgttttggttggtaagctatttggtaaagctgcctcaattttagaactcattattgatctgttcagggattcaatttcttcctggttcagtcttgggagggtgtatgtgtccaagaactcatccatttcttctagattttctagttcatgtgcatagaggtgtttatagtattctctgctgattgtttgtatttctgtggggtcagtggtgatatcccccttataatttctgattgtgtttatttgattcttctctcttttctttattagtctagctagtggtgtatctattttattaatttttttcaaaaaaccagctcctgaatttgttctttgtagggtttttcatgtctctatctccttcagttcagctctgatcttggttatttcttgtcttctgctagctttagggtttgtttgctcttggttctctagttcttttagttgagatgttaggttgttaacttgagatctttctagctttttgatgtgggcatttagtgatataaattttcctctgaacactgctttagctgcatttcagagattctgatacgttgtctctttgttctcattagtttcaaagaacttcttgatttctgctttaatttcattatttacctgagtcattcagggacaggtggttattttccttgtagttgtgtgattttgactggatttctttctttctttctttcttttttttaaatgtgtctatcagaatgactttatttcagtacactgagccccatcaggcagtgtggtttgtgcaaggctgtgcgagggacaggcttgggctaagagaagggaggtgagttgttaagtgcactgcagtctgtggggtgctacatcgctttcacacacacctgctcctttggcccatacctggcaggggcctttggtcataggacagcatgggggagactactgcatggagtctgggattggggtgggtcatggtgtcacaggtgagggtgccggtgaagacaggctggccccagctttgcaccacctgggctaaaggcctttggactactcctaggagtcaggcctggctccattagctcctggcactctggtctggccctctccctccttaaccaagcaggtccaaggtcaagagtggcccaagatcagccaagagggggccatcccacctctacagcttagttgcctggtcagctatagtggcaaaaggcaacatggttaattgcagctttctccagtcctaaggacactggctctccaacaccccttccttgtttaggggcctctgccaaagaaaaattctacctcctgtttcagaaaatctaaccagcaaccagcctgttgattctatggcagtgagcaagagaaagagggagaaagaggctggtgggagtgtctttgagtatagctaccaatttcaaatggtcctgcaacctgtggacactgtccgcttaccatcagcagggagaggcggggccctggaggctaggctaagcttaggtgctataaacattagtgtggcagggcaggaggcagtgagctccctctctccatccccttactgaacaaacacttcaataaataaaactgtttgaagatggcattgcaacaagaacggatggaaagcaaggacctggaatcagcaggcaccttaaactctcccaaggcccctggaaggggaatgggctgggaacattatctctgcagccattcagggggagtactactcctgccctcctccagtggctggtgtggtcctgttccctggtgaacatgagggcttcctgctccctcctgactttccagtctctgtattagctcttgggatgcttttctagcctcccaaaccaaaatggcaacaaaaccagacagaggtcaaccccagccccagtcctcagtgcccagtcagggggcattgatagcggagtgaccagcaaggggaggcagcagctgcctgggtcctcagggcaccctggtgggtgggagtgagggtggggccagtccagcctaggatgggcagcagcaaggtctcccagggggtggtttatctccctctgtctccccgtggtagtaaacggagttccctgcagccagtcagaggcccacctgaggagggagtgcagcctctgccagtgttcttccctgtcaggagccagttaatggtcacccccaggcctcaggccatcaccatcgtgggtagttcctcatcctttctggacctggggtccctgggccacatggcacttgcatgtgctcacacacttgtatacacacatgcactcacacacacaggcaattcctcacaaacactctgactcaacaaagcgagttttaaagtggagttaacttcagagagaggtgaagatgatatcccaacattagaaggttttcctgtggatagatcaggcaccgtcttcctcatattccttcttggagacccacatcttcttaaaggtgtcatggaggcaaggatagagccctcaatccacgtggaatacagtctctcctgaggtgcaaatatcctgatcttcacttcactcagtagcctgtcaccaaaacctttgaacaaggtagagcctcccaagaggacgatgttggagaaaagtgtgaactgcaggtccatgtctgacttctggatggcgaacaccaggaccttgtggatgccttcactctcctccctgatcaagtctggcctgaagagcagctcaggggcccggaattgggaaggaccaatctcaatggtgctgccatcaggcaggtagtactgagccttctctgtctctagtgtctcttccttctgggggtttatggataggtaggagggtctttcttttatggccttgacaatctcaaactcaaaggatgagtggaaatctcaaacgatgagtggaaatcatagccctccttatgcaggtagaggtgcaggaagcgagagatgttccagcttgcgatgtcaattcgcatgatggagtggggcatggcaaagccctgatagatgggcacagcatgggtgatgccatccccagaatccagcaccacccccgtggtcctgcctgtggcataaaggctgagcacagcttacatggagatgaaaatagcaggcacattgaagctcttgaagaaaacgttggcagctcattcctggtgtctttgtgggtttaaaggtgcctcagtgaggagcacgagatgctcctctgagaaagtctgcagctggtccttagaatagacatattgccagatgtgttccatgtcgttccagtccttgacaatgccatgctccgtgagatagcagattgagagcagcccttggtgctccttggctttgaagccaatgaagatgtcaccttcaagggctcctgccatgatacgaatatgcatgggtaggcccacatactttggaaagcagtatttgtggatctgatcaccagcaaaaccagctttaatcacaccagattcattgtcgatcatgacaggctggttggtgattgtatcgtaagactccacggcagaggaatctctcctggggaaggaactaccagttgggtctgccgctagtgccattcatgaatttcttaatcttgagttctaatttgattgcattttggtctgtttgttataatttcagttctttttcatttgctgaggaatattttatttccgattacttgatcaattttagagtaagtgccttgtggtgatgagtagaatgcatattttgttgtttttgggtggagagttctgtagatatctattaggttcacttgatccagagctgagttcaggtcctgaatatctttatcaattttctgtgtggatgacctgcctaatattgtcagtggggtattaaagtctcccactattattgtatgggagtccaagtcactttgaaaatcataagaacttgctgtatgaatctgggttgccgagaccagctcggtcatggagaccctaacccagcggcgctagaggaattaaagacacacacacagaaatatagtgtgtggagtgggaaatcaggggtctcacagctttcagagctgagagcattgaacagagatttacccacatatttattgacagcaagccagtgataagtattgtttctatagattatagatttactaaaagtattccttacgggaaataaagggatgggccgaaataaaggggaggttctggctagttatctgcaacaggaacatgtccttaaggcacagatcgctcatgctattgtttgtggttcaggaatgcctttaagcagttttccgccctgggtgggccaggtgttcctttccctcattctggtaaacccacaaccttcaccatgggcatcatggccatcatgaacatgtcacagtgctgcagagattttgtttatggccagttttggggccagtttatggccagatttcggggtctcttcccaacatgggtgctctttttttgggtgcatatgtatttaggatagctcttcttgttgaattgaaccttttaccattgtgtaatgcccttctttgtcttttttttatctttattggcttaaagtctgttttgtcagaagctagaattgcaacccctgcttttttctgttttccatttgcttggtaaattttcctccatccctttattttgaacctatgtgtgtctttgcaaatgacgtggatctcttgaagacagcataccgatggatcttgactctttatccagcttgccattctgtgtctttttaattggggcatttaacccacttacatttaaggttagtattgttttgtgtgagtttgatcctatcatcattattctagctggttattttgcagatttgtttatgtggttgcttcatagtgtcactggtctgtgtacttcagtgtgtttttatagtgggtggtatcaatttctcctttccgtatttagtccttccttcaggagctcttgcagggcaggcctggtggtgacaaattccctaagcatttgcttggtctgaaaaggatcttatttctccttcatgtatgaagcttagtttggccggatttgaaattctgggttggaaatttcttttctttaagaatgatgaatattggtccccagtctctgctggcttatagggtttgggtttccactgagaggtatgctgttagtctgatgagcttccttttgtaggtgagctggcctttctctctggctgcctttaacttttttttttttcattttgaccttgaagaatcatgattatgtgtgttggggttgatcttctcatggagtaccttactggggttctctggatttcctgaatttgaatgttggcttgtcttgctaggttgggggaattcttctgtatgatattctaaagtatgtttttcaacgtggttccatttttcctgtcttttttaggtaccccaataagtcacgggtttggtctgtatacataatcccatatttctctaaggttttgttcattcattttcattcttttttccctattcttgtccgcctgtcttaattcagaaacataatcttcaagctctgagattctttcctctgccttgtctattctgctattgatacttgtgattgcattataaagttcttgtgtttttcacctctatcaggtcagttatgttcctctcttaattggctgttctggctatcagctcctgtattggtttatcatgattcttagcttctttgcagtgggtttcaacatactcctttaactcaacaaagttttttattacccactttctgaagcctccttctgtaagttcagccatctcagcatcatcccacttctgtgcccttgctggagtggtgttgtggtcatttggagcagaagaggcactctggctttttgagttttcagcattttgtgtcaattatttctcatctttgtgggcttatttgcctttgatctttgaggttgctgacctttaaataggatttttgttgagtttttattgttgatgttgttgttgttgttttctgtttgtttttcttttaacagtcaggacactctactgtagtgttgctgtggtttgctgtaccccagaccctaattgcctcagtttttcccatacctggaagtatcaccagtgaaggctgcaaaacagcaaatatggcagccagctccttcctctggaagctctgtcccaggagagtactgatttgttgccagcccaaacgcactttgtaggaggtggctggaaaccccttttgggaggtctcacccagtcaggtggaatgggattacagacccacttaaagaagcagtctggctgctttttggtagagcacatatgatacattaggaggggactctttcttctggaccatttgtattctccaaagccagcaggctagaatggctaagtctactgaaccccagagatagcagccacccctgccccggtaacttggaactgcctcagaaagattccagactgctttggttggctggctggaattccaagccagtgggtcttaacttgtgagttgccatggaagtgggggccatggaagtggggcccacggaacaatgctgcttggctccctggattcagctccctttctagggatatatacagatggatatccccccttgctggggatcttggggccagagtatataaaattcctgggtcactgtatgtgcctgagcagctgctctgctgagacaccacacagttctgtgtattggacccaaggccctggtggcatgaactcaggagatctcctgatctgtgggttgcagagatccgtgggagaaacatggttttctgggcagggttgcatggtcactcaccacttctcttggttggggatgggggttcctttggctgcatgccactcccaggttggctcttgttccccttgttccctggcttttctacattctcatgggtcaaggtgtttgccttgtcagtctcaatgtgagaacctggatatttcagtttaaagtgctgaattcacttgcccttcttcattcctctcagtgagtgccatagaccacagctgcttctaattggccatcttggatcaacgttgttattccctttttcactgcttatttcatttcactcacatctataagcaaaaaaaaaaaaaaaaaaaaaaagactcaaacggcataaaaaagtgacttttgtaggttattgtttagtaaagcatttgaattaaaaaaatctcatcatgagctatagctcatatttggtcattttttgtacttctcatttgggtatctaagacttaatgctgaattgaggcatctgtggaataaataaaactctggacctgtctggacaagcaagctcaaagcaggagtgtgctgtggtgggaataggccaactgtggaatcctaaactgccttcatattgttgctgtaccattgagcagctatgtggacttggtacacatagcttgagaagctatgtagaacttctctttctttaagtggagtgagggttgttatgaggcttaaatgaggtaatgtttgtaaactgcttaacatggttggcacacagtaaactttaggtactattatcagttttgtctctgaggctagttcctaggtttatggagttgtagagctggagaagcattttaaagtccagcgttcttccttattttagagagaggaaactgatgcccagagacactgaaggtttctgaggcttggttatcatgtctatgtgttttacagcttggctatgaggatcatctgagctaataggtggaaaagcatttatatgtcagttttttagtattgttcatacagtggctaattgccttgcctgctcaacgactgaatgattttataaaatagctttctggttctgataatagaaaaatcaatatattttcttttttttcttaatttagatgtatccagttaaagcaggcaatagatgaaaataaaaatgctcttcaaaaattaagcaaagtaagtattgaggttaatcacattattaaaacatctcttcctatacaagtatttttattaagtggaagttaattcaagttggtaagttcctgggtttacgttagtgatatagtctaactgcagccagtgctggcttgccgaacaggcttgctaagtctgtgcttgggagcaaagcaaaatccagggctccaactaccgaaaaatgttcagctttgatgaactcacctgctattaaggattcagacaatcctggaaggagctatttttatttttgcattttgtgagttgttttacagtttagaattatttttattttaatttctttgtggggaaataatgcataatctggccctgagggtaagtggtaaagaagcttcttgtatcaaatggcagctctgatatcaatgtctctgcagaaacaagaggaacaggaatttaaccttgacaatcccttcaggatttttttttttttttcacatgagccttggctacagctagatgtccaggtccagagactcatggagtctttaaagtggaaggcacctgaaagtcagctctccagctgtatattactcccctttactgcatctgagatatgtggtcactgaagagctcctccaaatttctccagtgacacaaaacttttcaacttagactgtttgaaaacctaattatttctgtttcacaggtgaggaaattgaagctctcagtggtgaagcatccatgcctcttctgtcaataagtggcagaacttgggattggtgcctgtctcattgactttaaagccgatcttctgtcagaacatatctcttactgactatggaaggtctataatacttagcaagaaaataaaagagaaacctaaaacaagtggtataattttattttttcatttggtttgcattccaacacaattgcctgtttcttttaaatctaatttatttccctaagataggtgtaatgtcacactgatatttactttgttatatagcacttattggaattttttgttgttcttttgaaattaggaaactgaaattaattttttagtgaaatagacctatattctctcataggctgatgaatctgcacctgttgcaaactataatcagagaaaagaagaggagcatactcttttggacaagcttacccaacaactgcagggccttgctgtgacaataagcagagaaaatataactgagtatgcttcctttctacctttcttttttcttttttaaagatatatcaccaatagctttaatgtttaactcaaagacatatagcagtatagatataaacaaatgacactaacaatagaatcagtcaacatttatttattgtgtataatagaaggtgttagatcccatgagagatggaaagaagtgtaagtcatagtctctgccctcaggcaatttataatttagttgaaacaaaacagagatctgaaaagctaaatgaacaaatgttagaaaataaagatgatatatttaatgtcaatgttgatgtgtaaaagggaaatgatttggaatgtctacttgcattgttctccctttcataaacattctttaaaaatttgaagcaaagactgagtgtggtgactcatacctgtaatcccagcattttggaaggctgaggcaggaggatcacttgaggccaggagttcaagaccagcctgggcaatacagtggaccccatctctacaaaaaaacccaaactagtcaggcttggtggcacgtacctgtagtcccagctacttgggaggctgaggcaaggaggattgcttgagcccagaagttccaggctgcagtgagctataatcacctcagtgcacagcctgggcaacggagtgagacactgtctctattaaaaaaaaaaaaaattgaagtagggacatgcattgtttgtctgccagagtgtatgttaataatagcttctgaaagttgtaaagaagacttacatatacaagttgagtattccttatctgaaatgcttgggatcagaagtatcttcagttttggattgttttggattttggaatatttgcattgtacttacttgttgagcatccctaatctggaaatctacattttgaaagactccaatgagcatttccttggagtgttattttgatgctccaaaagtttcagatttaggagtatttcggattttggattttctgattagggatacccaacctgtacgaacaaacccaatttgtgggaagcaaaagaaaaaaatcagttattcagactatttcagtgttgttctccaacctttatactgtatcctgggaaaaaatgctgaaggtggtagatgcaaggatctagaatttccaccgattcttagtactgagaatggcagagtagttggtattggactaaccttcccaccataaatgactataaagtctggacaaaatatacaaagcatctgtttgaagccactgagcatctaccaagcagggttgatattcttgatatagggagacacatgaagcaaatcctacattcacctagaccttttccctgggaataatttatgagctgtggtggaggaaggtagattccaagcagggaatagtagtcttactcgactgaggagacagagatcacactttggagctgctcagttcactgagagttgtggagcaaggtgccatagagagaagggagctgcacagaaacaactccagcaatctgaaaggtctcctgggctgtatagggcatgatgcctgcaaggcctggcagaaagtacctgctgggagactaagagcttaatggattctggtaatcatatagtcctggaaaaacactggagtttgtacctagttctagtaaagagacttgggaaatgtttcaggcatttagtagaggacacagaaggcccaggccctaggagtaaagaaaacaccctgagagtaacaaccatgatctaggaataaagacaaagctgaggtaggtcttctctaaaagagcctaaaagcagaccttatcaggaacaagataatttaactgtgtaacattaaaataatttaaaatttcttagaggaatataacataatccaaagtctgtaagtgagtcatgtaatgtgtccatcacagcaaccagtataaaaaaaatcagaaatgcaaaaaagcaggggaaaatacatgatcaataagtgacaagatggtcactaaaaacagacccagatatgatccagatatagagttagctgacaaggacttctaaataaaatgattaatacagtaaagaaaatagaagaaaagatgaatgaaatgggaaatgggtgtatttaattcaaatatagaaaaatcaaatgaacattctataactaaaaaatacaatatttgataaagtaatgactgagaacttccaaaatctgattcaacatatagactcaaaaatctgggaaatatattaaaatcaagagaataaataatcagtagctcggagatgtgagaattagcaaataaccataaaacaacaatttttaatatgttaaataatttataggaaaagattgataagatgaatagagcgaaatcttaagcagagaaatgggaactaataaagaccaaaatgaaaattctggaactaaaaaaatacaatatgtgaaataaaattgctgagtggtttaatagaagattggatacaacagaagaagggatcagtgaacccaaagacagcttaaaagtttttcaaattgatacacaaaaataaaaaaatgcaaagaacaaaacagaatgtaagagagaggtgggacactgttaaaagttgtaacagatttgtaattgaagtctcagaataagagagagaatgaagcacaagaaatatttaaagagatagtgactgaaaatatttaaaaattatgatctaagagagatatcaatccactgatccaagaatctcagggaaccccaaacagaatcaatataaagaaacccacacacaggtacctcaaactaccgaaaaccaaagataaataggagatcttaaaagctgccaagggaaaaaaggaaacatgtagagacaaatgacagaattacagttgacatcttatgagaaaaaatacaggtcagaagacaatgcagtaacagtaacatcttgaaaacgttgaaagaagaaaccatcaactcagaattctgtatccagcaaaagtataaaaaattaaagtgaaataaagacattttcaggcaaacaaaagctgagaaaatttgtcaactgatctgcagtataagaaatgttaaaggaagttcttcaggctagcagacaatgatcccacattgaaatttggaccttcaaaaaggattgaagaagatgggtacgtgggtacatataaaagcctattttttcttttctatatgcctttgaaagacactcaattatgtaaagcaaaatatatatttggggatttataatatccagttgattctcattatttacagtagttatgttctataaagttgccaggaatactcgattagtaaatgctaaaccattgctcctggggaaatgcagacttaagactcctgtgagcctctggtcacaatgtttttgtcaactgagtaacatacaaccttgtgttactgtttaaagacactttatttcatatattttattgattcattaacattgaattcacactaacagcactatcactcatgcatgaacaagtcttatctaacacacttattttctccagaggtacattatagccttcttgtgcttaggaataccacatggctcttcagcgctatgtttgggagccattttaaacaacaaaatcaccaaaaaaaaaaaaaagcacaaaaatgcaaaaactgtggcactaaatagactgcaaaaaagggacactttcctgtatgagagctgaaaaaaaaaggcaggtgtcaccatgttcagcttcagttgggaatgtgtacgccagacaactcaaattttttgctgctttgtgtatgtccacaaatgaccacaaaagcactgtgagtattaattaggaggttacaaataaagtttagtgagccaatgaattcataaatacagaatctgcatgttacaaggactgactatatgtagaaggaaaatgtgacaatagcacagcatagcacaaaggctggcaggtaaatggaattatttatcttaaagttattttatctttggtgaaatgtgatatttaaattagactatgataagttagggatgcatattgtaatacctaaaacaatcactaacaaaataatacaaagaagtgtagcttgtgaaacaacacaataaaatggaatactaaacgtgatttgattaacccaaaaaaggcaagaaaggagaaataaacagatgagacaaatagaaaccaaatagtaatatggtttcaatgcagccatttggatagttacattaaatgtaaatggagtaacactccaattacaacaaagattgtcagattgaatttttttaacccaaatatatactatttagaagagatagactttagtatgcagttatagagagagtgaaagtaaagaactggaaaaaggtattccatgttctacaacaaagatattatttgttttataaccaaaacaaaggtgatacggttacaataatatcagatatttaaggctaaaagtaatttactatttaagaaaggacatttcataatgataaaagaaagggtcgattcagtaggaaaaaaaatcttcctaaatgagtatacatttaataatatgggttcaaatgtataaagcaaaagttgccagaactaaaacagagctagataattcacaatccttaaccaccgtgatctaattacatgtatagtcaagcctttcttagtgatagggatatgttctgagaaatgagtcattaagtgatttcatcattgtacaaacatcatagaatgtacttgcacaaacctagaaggtgtaggttaccatacacttgggttatatagttatagtatagcatgttgctcctaggctacaaacctgtacagcatgttactgtgctgaatactgtacacaattgtaacacaatggtgtatttgtgtatctaaacatatccaaaaataggaaatgtacagtaaaaatatggtattatatgtatggggccatcattgtatatgtggcccattgttgactgaaacattgttgtgcagcacatgactatatatgtgtagaacacagcacctaagtatgtattatgtaaatacatattcttttcagtgcatctgtaacattaaccaaaatgaaccatattggaccataaagtaattgtcaccaaatttcaagagtttgaaattatgtagaatatatatatattttctttgatgacttggaatgacattaaaacccaatgacagaaaaataattagaaatcactgcatgtggccaggtgcggtggctcacgcctgtgctgaggcgggcgaatcacgaggtcaagagatagagaccatctggccaacatggtgaaaccccatctctactaaaaatacaaaaatgagctgggcatggtggtgcatgcctgtagtcccagctactcgggagtcggaggcaggagaatcgcttgaacccgggaggtggagattgcagtgagccaagatcataccactgcactccagcctggtgacagaatgagacaccgtctcaaaaaaaaaaaaaaagaaaaagaaaaagaaaagaaattactacatgtttgcaaattgtcacacacttctatataaactgtgagtcaaagaaaatataacagtggcaattagaaaatatttggaatgataataaaatgactgggttgcaaccagcatagtgcttaaagggaaaatttctatcttttgtttgtttgttttggagacagggtctccgttacccagactgggtatagtggtgcaatcttggctcactgcaacgtccacctcccaggctctagtgatcctctccacctccgcctccctgagtagctgagactacaggcgtgtgccactacgcttggcaaattttttaaattttttgtagaggcagggtctcactatattgctcaggctggtcttgaactcatgggcttatgcaatcctcccacctcagcctcccaaagttctgggattacaggtgtgagccgccacacctggccagaaatttatatctttaaatgtatagtttgaaaaaaaagttgaaaatcaattactaaaacatccaactttaggggccagaaaaaggacaacaaacccaaggagagcaggaaagaaataataaaaataaaagcagaaaacagtgaacaataaacagacatacagtaggcaatatcaacaaagccaaactggtttttggaaaattaattaaatggataagctgctagcattactgatcaagaaaagagagagagaaaaaaaatcaatacagattccacaagcattaaaaagatactatgaaaagactatgaacaacttgtgtgaataagtttgaaatttagataaaattagtttctttaaaaagaaaatgtactaaaattgacacaagatgaacagaaaatcttaaaagttctactaaaatatttactaaagaagttgaatctgtaattaaaagcctttccacagattaaactctcaggtggctttactggtgaatttattgtaaacatttaagaaagaaatagtgccaatattaaaaaatcattccagagaacaaagaagaaacactttcaaatcattttataagctttcaataacactgatatcaaaacatgacaagaacactagaagaaaattgcaaggccctcatgaacacatgcacaaactcagtataaaatattagcaagtaaaatctagaggcatttcaaaagggtaatacatcatgaccaagtggaatttgttccagagtgtgaggttggcttaacattaaaaaatcaatcattgaaattcactacattaatgaaggggaaaaaccgttatcaagttcacattattttcggcaacattttagaataattgacccatataaaatatgtgcaaaatatctcctaaagaaggaaagagacgcgttgaaaatcaatatgacattttatggattttttagtcttgtggtataaaaatggttgttacatccctgtttatgttttagatcattgtggtataagagtgtcctaccattattttaaacaaagttcagctaatattcctttttattccagagaaaatcttgtagttgactagttttatagttaatgatgttcatttgcattagtctaagtattgttttcccattttaaagataagcttctctcatgtaagctttaggagggcaaagatcttggttttgttcattgttatagcccaagcacatagtgtctgtcacacagtaggtgctccccaaaatttaaactttgctgaatgttgaatgagtaaataaaattcagaaagatttagtgacgtgcccaagctaacattattttggcatttctctcttcctcaccctcagattcacctcctttctcttcatccctatgctgttttcttagttcatagtgttgtcacttctcactttcaacagccaccctcacctttagcctttcttctaatctgttccccacattatacctttgtctcctttctaaagtgggaatcatatcatgtccttcccctactcatttttaggggcgactttaaaggtaaagctcacctgggctacattccgcgtacctcttttcagcctcaactctcactcattttccttaagccttgccctaccattcatgagctacttgatgtttcctaatcttaaatctcctttctcctctccctgcccttcctttctactcccattttacctgattaattccatatcatctctcaagacctaattatagccttttatgattcccattcgtgcaacctgggttaggtgtccctcttgtgtgattgatttcttagtatcctgtgtatacctctactctagtacctattgcactattttataattctccattttctagattgtctcactgcaagctccttgaggatggggaatcatgtctggtttacctttgtgtccactgtgtatctctctgacacggaacttgacctacagcatcagtgtcatcatcataactgacttttatggaaagcttgctatgggcaagcactgttctaaacactttgcaagtagtaactcatcttaatcctcatgacaatcttagaaggcaggttctattattatctccactttaccaatgagaaatggagagcttaaaagaagcctactcaaggtcacccagcaaagagggaatagagccagaatttaaatttagcagagcctatgctctaagtacttcataataatgcttcaacagcattttctgaatggatgaatccaagacttgaattcggagtctcctggcctcaagtccagtgatgctctgccatctcacatacatgactcagctccctctccgcctcagtctctccaggcacacggtcttagctagatggtagaaactgttctttgtattttcccttatttcttttatttgccagctccaaatatgggatattcatgtatatgtagaagttacactcatagctggtctgttcttgtatattatttcaagtagtcctactcagaaacactttttgtagagttggggcacctactgaagaagaggaagaaagtgaaagtgaagatagtgaagacagtggtggggaggaagaagatgcagaggaggaagaggaagagaaagaggaaaatgaatctcacaaatggtcaaccggtgaagaatacatcgctgttggagattttactgctcagcaagttggagatcttacatttaaggtaggtagaataagactgaaacctaacctaagggtcgatgtccatacctaacagaataagaaaactctgcctgtacacctgtattacagattcttaaaatgcagttttataacaatctatttaaataagtaataattacaatttacaagcagtagtaatatgagattgtgttactaaagttacctcttctaaagatttttgaaagtagctttaatgttgagaattcctaatttaggggtaaaattttataatttgttattgaatgtcatgtataaattcattcaagtgagttaggcaatgtccataggtggaggtagaagggagcacttcctgccattttgtagcagtctttcctgttagcttagatatgagaggggcttacatccatgcttggttggcctgggcataaataagtggcaggtgggacagaacaataaagttgtgatttttaaagttgtgattttgagcctgtgttttctgctagagaaatgagccaaagaaatttaagtgaatatatgaattttagttcttatattaaacttcaaagtttagtaactgattaataataaaatacataagaatattatgcaaataattatatggtttgatttatagatttttttttcaaattctcctggaaaatggtatcaatattagacaataatgtatattttaattaagtgtttgcttttgtagtgtccttagtggtggaaatgcttttgtcttcaaagatgaattttatttttataaatgagtgagtgttattcaaaacatatctggtgaattaagtgggtaattatattcagtaaatactatttttgctcaaaaatagggtttaactttaatggaattgatattctttgggaatttatatgctgcttctgaaagacacttttccagagatattaaaacattcaaaaatattttacgcagtaattgaatttttggaataagtatggggccttaaaaatgattgtgaaaaatggttcccatttgcataaatggctcaagtgtatgttaggtaaccaaaaggaatgattcattaaactatgtcacatttatggttttaggtgagttaggcagaatacataggggtcgggtgatagggaagcttttgataaaccttaggataaatattggattaaaaaaagattttgcctttttttcagcacatattttgaatcattggtattgacatatactcatgattattgaattttatttaaaatggtttactttgttttgctttaagaaaggggaaattctccttgtaattgaaaaaaaacctgatggttggtggatagctaaggatgccaaaggaaatgaaggtcttgttcccagaacctacctagaggttagtcttggtttatgccttccttttctaagacttttttttttttcgcttttaataaaacatttagctgtgttcttttgtcagttgactagtgaatgacttgagatatagaatttgctttaattttggagggacaggacctgggaaaaacattgtgtattaatggtcctggggacctgtgaagtgctcttacgcatgtgagccctggaacgtgatctcacaatgaggggatgctttgtggattaatgctgatcataacaaataataggtgtctattgtttattgtaaaacataactgcagttaactttgtgttaacttccacaaatatgtgatccccttactaaaatgtgaacatactatacatgtgtgtttgtagcttgtattttcttatttcataaaataacatggtcattttctgtgccaagatatatagatttctgtctggatcagcactgtccagtagaactatgatgcaaaccacacatgtaatttaaatttttcagtagccacactgagatatctttttgctgatgccacttctgacaccaagtatgtggtttttctctgacaccaaatatgtgttattacatcagttcttctacaccaaccggtgtcagcaattcaattcgattctgatgctaatgcctggagctagcacagacccccacaggttaaaggctcagtcccacaagattgctgctcacttccgttgccagtcacaagtcccaagagccacccatacttctgactgactggctatacattcacgagttcccataccatcacctcaggggttcagtaatttactagaatgattcacagaactcaggaaaacactttccttgcatttaccagtttattataaaggatgcaactcaggaacagccatagagtgaggtattggttgggggtggctggcatgcactctctgggccttccaccttcccagcacttcgctgtgttcaccatcctggaagttcctggaaccccatcatttaggggtttttctgaaggtttcattagccatgtttaactaaatcattagcaattggtgattaactcagtctccagctcctctcccctctttgaaggttggagggtggggctgaaagttctaacctctaatacctgggttggtttttctggtaacctgtccccttcctgaagctgtttaggtgcccacctagaattacctcattaacataaactcaggagtgactgaaggggactcttgatgagtaagaaaacatactcctatcattcaggaaattccaagggtttcaggagctctgtgccaggaatcagtgacaaagaacaaatacatgtttttcattacacacatttttaaaaagtaaaaagaaacaggtagaattatttttaataatatattttatattatccagtatatcaaaaatactattttgacatatcaatatttaaaaatattgagttgttttgcttttttaacattaagttcaaaatccaatgtgtgttttacatttacagcacttctcagtttggattaatttcaagagctcactagctacatgtggccaaagggctattgtattacatagggcaggtctagatcatctttttcaatggcagcaagtcttctaatctcatttagatggtcattgaagttgtttccaacctataatcactatcgattatgttgcaaagaacatgggattagcatccactgtcagttgcaaaaagatccccccaaaaagtagcttaaataaggtagaagcctatttctctcaagcataaaagtgtggagaaaagcaatcaataattggttaagatcctatccagtattttatcctgtttctgatgtgaggctgctctgcctagagttatctctttagttttaagtcagctgctggatcttttaaggattccaaggagcaaaaggggaaagaattcaaaaggcataagctgctgcctttttaagaaggtttcttggaagttacacaaaaaaactttcaactgttgctcattgaccagcatttagttctctggcaacagttagctgcaaggaagtcttgggaaatgtagtcttttaactggatcattgttaaatcagggattttgtttgaaaaaggaggtggggaataggtggtagccagccagcaacttgtgttgtcatcaagcctgcgtgcatctttgcacacttgcccgattatccccttagataaattcctagatgttcatcactggttcaaagggtttatagctttatattttgatttatttttccaatttgccttttagaaaagttatgccaatttgtactcccacctctaacaatcagtgagtgctgtttcctcacacaattgccagtgatggctgttagcaatctttaaaatttttgccaatatgaccagcaaaaaaagtgtcattagtggtttaatgtgcatttactgtactcctaatgaggttaagcatcatctcatatgctttatgaccatttgtatatcttctttgcgaatggcactttcggttttctttattgatacataatattttatgtatttgtgtgagtgctttttacttgtatggattgtgtaataatcaagtcagggtatttgagatttccatcaccttgagtgcttatcatttttatgtgttggtaccttttcagttcttttggatatttttttctaagggatttaaaaaactctttcattgatttctaagagcttttataatattttaataatcaggatattaatccttagatatttgtgtgagctattttctttttttcccctcaggatatgcttaagttatgtgttagatattttctttgttgactttaggtcatgtttatttattatgtagctaaatctgtcagtgtttccacttatgatttttgattttgtatcatgattggaaagggcttccccatctctagattattttcttctaatgcttttatgtttcttttatttttatctttacgtcttttcttttttatttaagtaaattccatctggaatttattttgattaaacttgctgtctatctcagttcttattttttcaaatagcaaagttattaaccatgtgttgaaaatttatttcccactgagttttatatgctcatcatatatactaaattcccatctatgctcaagattttctgaaagtactgatgcttttgtttttttgtttttaaacagaaaagcttgtttttgtttttactggagggttaggtggcagtactggtatttttattggttgttttttgcattagttaaaaagcacttcacatttcaatggttttttagccttatagtgaagaagaagaaggccaagagtcaagtgaagagggcagtgaagaagatgtagaggcggtggatgaaacagcagatggagcagaagttaagcaaaggtacaaaagtgggaaaggatatcaaagtaggtttaggaaacattttatttgtttatttttattattataactaattcaatactttcttgaaatggagacaacttgtacctggagagcttttcatactattgtctgcttaaagatcattactgttttagttttgtaattatttttaatacatttagctctacctcgttttcatctggaaactgttagattttcaaaacttactgatgattatcaactgtgattaaagaagttccctaattgagtgaataggcataacctgacctgactcactttgctattttgtctccccagaactgatccccactggagtgctgttcagaaagcgatttcagaggcgggcatcttctgtcttgttaatcatgtctcgttttgctacctaatagttctgatgcgaaataggatggagactgtggaagacaccaatggatctgaaacagggttcagggcatggaatgtacagagcagaggacgtatatttctggtttctaagcctgtgctccaagtaacatttctcattagtttttttttttttttgtacaaaaagaatagataattcatggtgtcacttgaggacttggaaacattctcattgatcctgctttcctatcatttgagtggaaacagatgttaaattttatttactattcgaaaaatcctgaaagcctttaataaaaagtaagaaattggccaggcatggtgattcacactggtaatcccaacattttgggaagctgaagcaggaggatcacttgaggccaggaattcaagaccagcttgagcaacatagtgagaccctatcctacaaaaaataagaaaaattagccaggtgtggtggctcatgcctgtagtcccagctactcgggaggctgaggtgggaggattgcatgagtttgggaagtcaaggctgtagtgagctgtgattgtgccactgcactccagagcatgagtgacagggcaagaccctgtcttaaaaaaaaaaaagtaattaattacatttttttaaaggagaaatgatccataattctgtcattaaaaaaaaattacaggccgggcacagtggctcatgggcacagtggctcacacctgtaatcccagcactttgggaggccaaggcgggtggatcacctggggtcaagagttcaagaccagcctagtcaacacagcgaaacctcacctcgactaaaaatagaaaaattagctgggcgtggtagcgcatgtctgtagtcccagctcctggggaggctgaggcaggagaattgcttgaacctgggaggcggaggttgcagtgagccgagaatactccactgtactccagcctgggcgacagagtgagactccgtctcaaaaaacaaaaaaataattacatagccaaatgaaaattctcttcctcaaactcataagtaatcaccattaacaatttagtacgtgtccttcctgacctttttcgttatttattacttataagtacatccttgtatgtgtgagggtgtgtgtctatgagtagtgtgtatgtgtatacaaaaaaaatccattaattcttcagtgcatgtgatttgccaatagacattaacttacctgtgaaatggaagcgcagggtggagcaggacaggagcagggacattttgataagggtatacttgaagcagctgctccggaacacacagctctgcacgctgggcactgtatggggcttaggtccttaggagaggccagggtgctgtgatggcatcctctcaggaatttggggccaaatcgtattattcttccactaaagtctgtatgtttatatttttcttttttgggttatagttactctagtgataaagtattatagagatgcagaaacatgactgaaaacaaatccattttgatgttactgtcttcagcagataaacactgttgatgtgttaactacgatgggagctattcctgcagggttcaggccttccacgctctcacagcttctggaggaaggtaatgcgtgcctatcagccactgcactctttcagcaaagcagtcaagatccacgtctaatttttctgtcacaggcaaaacacattgttgaagaagatgttgaatctcacatctctttggtgctcatcttttcctcatccttcctatgacagtgaggaaagatccctgatcctatcagaggccagcctgtttaccagtgctccgggttccagcccctttctttttttcaaaaatgtgactcctttaattttcagccctttcctgtgtctttagctggcccaccttccccacactggttcattccctcatctgtgctatcagcacacctaattctccccaccttaaaggatcagccccttgaatcctatcccattctagccaaaacctccttttctctgatcttcttccaagcaagacttttccaaagaattatctccatttggaattttcattttccttactcattcttggctttccctgtatttggcaacttttgtctataagctcattttaaagaggattcatgctgggggacaaggggtgtcctgtataccctgagttgttgagttgtcatggaagggctgctttgaggatgcctttgctgggaaggttcttcccagtactccctaaattcccatcttttcatccttcaggtctcgcggtaaattctgccttcccagagatgccttccttgagtaatgtgggtttcccttactcccattcatgtgaacaccctttatagctctatgtcccctaataattattttatttatttgcttgtctacttattttctaagaaaattttcctcccattcaactgtaaactatggagggcaggggacatatctctgatttatctttgtatttctagaacctggtgtagcatctggcaagagtagaagctcaaaaattatttctcgaatggataaatgatgttattaaaagtattattcatgactaaagcatggaggaagagcataaaatgcttttgtgttaagaagtaaaactaacgactttgttttttctgaagtctccaaaaagtgctcatagatttctgcattttacaaaaatatttgaatgaatccttgtcatcatggggcatattattggcctaaaagtctttcttaaaggtgctttaagatgatcttttatgtgtttgtatctgtaagttttgtactgctgtttttatccataaatctatattggcgcttctattttggaaagcaagttcttagtaagcagcgtggcattttggaagtgcctgtactctagttcatagcataacattatggatttttgatttggagtttctttctttgtaagaaaatgaagaaaaaatgattttttcagggaatcaatttcgagcaaattacttcttacaaccagagctcatgccttcacaactggccttcagagatctgatgtgggatgctacagaaggcactgtaagtatagttactatcagtaaaagtgtaactcttccagattttgtcatagttgcaattagacaaacaacatgttaattgactaatgaattataaaaaacaaaaaaattgtttatgataattttgaaaatagcgatatttttataactaaggcagaatttggacttgctaccttgactttatcttgtttctcttctccattgcactcttctctcattgttagaaaggaaataatactaggtttctatcttaatcattctttgcctcaatttcttcatctgtaaagatggagtaatagtaatgcttccaacataaagttattttgataattatgtgtgtgaagggttttgaataatgcctggcatatgaaaagaactcaatagatgttagccattattatcatttatagtagtagtagcagtagtagtagtatttttgagacagggtctccctctgtcacccaggctagagggcagtggtgtgatcatggctcactgtaacctcaaattcctgggctcaagcgaccctcccacttcagcttcctgagtagctggggccacaggcctacaccaccatgcccaggtaatttttgtattttttgtaaagatggggttttgccacgttgccaggctggtctcaaactcctgagctcaagcaatctgccctcctatccctcccaaagtgctaggattacaagtgtgagccaccagtcccagtctaatataagttatttaaatgaaaaggcttatgaccgtaaagcagaatgtaaagtttaatgaattgaagctgttcttaaaaaataaaaaatcagaatgccaatttatttactcacaatctgaattatacctatgaagcagatctgaataaatatatcagatagtgcattctctctgttaaaacacctattaagaaactaaggaactatgcagataattgcttggaataaaaaatagtggggataatcttaatgccaggtggcattggttttatgctgcgttagccttctgcacttacccacattctgtaggagtgaaccgggactggaatacagtgattctatagtcatagatcatatacattttgcctgccaatatttattgttcctttcatcacagcttttaagtatttaagaaaaatgcaatatttcaaatgtaactctatgaaaaatttacctaaaatgactgatttaattttcaatgaacagagtattgaaacttttattgtatatgtgtaaattttttcttttttaaaaattctgtatacattttcataagccgaattcacaaaagacagatttgtgttagaaatcataaaaataaacttttttataactaatttttctttcagattaggtcgagaccaagtcgtatttcattgattctgacattatggagctgtaaaatgattcctcttccaggaatgagcatacaggttctcagcagacatgtacgcctctgtctatttgatggtaataaggtaaggttactgagaagtaaatcaattcatactaggattatggagaaacattcccttagattcttttccattcaactcctccccaattcccaagagagtattttttacctagtaccaaagaaaaatttgaatgactctttgaaaaattcattttttaaatgagatacaggttaaacagtacttagatggaaatttatagttttaattgtgtatattaaaaaaaagataaaagatttaaagtcagtgatctaagctagcaaatcaagaggctagaaaaagaagagtgagttaaacctgaagaaagtagaaagtgggaaataatacagataagagtagaaattaatgaaatagaaaacagatggaccaaagagaaaattttaaaaaagacaaaagttgattctttgaaaacattaataaaactgaaagatgcatagtgagactattaagacttttttaaaaagtaaaagaaaacaaactattaacatctgacatggaaatagagacattatcacagatccttcagacattaagaggccaataaggagatattataaacagctttataccagtaaatttgacaacattgatgaaatagataaattcctggagaaccataatttactgaaactggcataagaagaaatagaaaatgtgaataacctctggtaaagatattaaacctataattaaaaaaaaatcttgccacaaagaaaacttcaggcctaggtggcttcacctgtgaatttcttcaaacatttaaagaagaaataataccaatcttatacaaattcttccaaggaacagatgaaggagaaatgtttcccaacttatttcataaggccagaaaaaacatgaccccagaatatgacaagacattacaagaaaggaaaattaccagacagtatccttcatagatatagaaagtaaaattctaaacaaaatattattaaattgaatctagcaatatataaaaaggacattatgtcataaccaattggggtttatttcaggaattcaaatgtacattcctgggtaatcacatttaacatttgaaaatcaatcattataatttgccataagaaaaatcatatgatcatcttaagaggtaaggaaaaaacatttgacaaatttcaacacccatttatgatttttaaaaaattatctacaaactaggaatagaagggagagtcctcaaattgcaaaatgcaacaagaaaaaacctaaaactagcattatcttacttaacagtgaaatactgaacacttttttcctaagaccaggaacaagtcaaagatatccaagaaataaaaagataactcagttttctaaagggacaaaagacttgaatagcctcttcaaaaaagaagtatcaaaaaccactagaagtataaaaagatagtcaacatgtaagaagtcatcagggaaatgcaaatgaaaaccacagtgagagagactgacctatatgttatatataagaagcccaccttaaatattatgctataggtagcttaagagaaaaaaaggatgagaaaagatataccattcaaagtagacttcaggcactacatagtgataaaagagatcgttcaccaagaagacatagtaatcctaagtgggtacatacctaacatctgaaatttaacacacaagaaataaaaatggttagaactgaaaagagaaaccgacaaagtcacaattatagttggggcctctattatagttggggagtttaacacttctctctcagtaatataggacaagcagacagaaaattagtaaggatgtaagagaactgtataacatatcaacaaactggattagattgatattcacataacacttcacctcaaaatagtaaaatacactttctcttaagtacatatggaatagtcaccaatatagacggtcctgggtcagaaaacaaacctagacaaattgaaaagaattggaatcatataatatatggtccttgattacatggaattaaatttgaaatcagtaacaggaagataaatggaaaaatacttaaatacttgtaaatttaaaaactacttctaaataatcaaagggttaaaaggaaatttcatgggaaattagaaaatattttgaactgaacaaaaaatgaaaatgcaacatatcataatttgtggaatgttagctaaagcattgcttagagggacatttatagcactagatgcttatgttagaaaagaattctcaaatctacagtcaaagctccttcctgagaagacagtgctgcttgagctgataacggtcaatgtgaaattaaatgagttaatgtaagggaagttatcagagtgatgttatacatggaaagaacatagttctttcaaagagtgtctggatgagaggtggtgatgataacttagagaggtggaggtggagatgagagatgtggatagagatatctgggagtaaaaatcaacgaagcttggtgatggactggatatggaggagagaggaggagtggggtataggcatgacacctagtctctgacttccgcatctggatggatggtggcaacattcaatgagatggggaacactggaagaggaccacgtttggaggagttgacatgggcttggttttgcacatgctgagtatactgctaacccccagcatgaagaaaatgcctttatttcatctgaacttggggtaaagaaatgaacttatgttatgacggtaatcctccctcacttccataatacattctgcacaaaatcactgccacaaatgagccagtaggtgtcctcagtgaccaagagctgaattggtttctgtttcatacatctggtttgatactttttcctgtacctctctgtgttctcatatataagaacataaaaaggaatggaattttattttcaataatatatcaaaataatgaaatttactttatgaaagaaatttatgtgagatttccaaattgagagttatggaacatatttaatagctgcacagatactcgtgctgtttatgtaagagtgcttctttaataaatctaagcctagttatgaataaaaagcattgggctgggcgcagtggctcacgcctgtaatccccgcactttgggaggccgaggcgggcagagcacatggtcaagagatctagaccatcctggccaacatgatgaaaccgcgtctctactaaaaatacaaaaattagctggacgtggtggcgtgtgcctgtagtcccagctacttgggaggctgaggcaggagaatcacttgaacccaggaggcagaggttgcagtgagccaagattgcgccactgcactccagcctggtgacagagagaaactctgtctcaaaaaaaaaaaaaaacagaaaccaaaacacatacacacacacaaaaccaaaggcattgttgccaaaactaactaatgagacacaacttccagtaatgtttgagtcagctcctcttggaccaccccacccagagagggtaattgtaaactctgggcaaagtaaaaagcaactacctgaaggcactgcagagcattcagaagcaggcagacactggagaggagcctcaagcctttagtccactgatttattttttttctctttgttttctctcttttttgtttgtctcttttctttttcctatcttcctgtattagtttgttctcacgctgctgataaagacatacccaagaaagggcaaattacaaaagaaaggtttattggacttacagttccgcatggctgaggaggcctcacaatcatggcagaaggtgaaaggcacatctcacatggtggcagacaagagaacagagattgtgcagggaaaactcccatttttaaaaccatcagatctcatgagaatcattcaccatcatgagaacagtgcaagaaagacctgcccccatggtggcatgtgcctgtaatcccagctactcaggaggctgaggcaggagaattgcttgaaccgggacctgggaggtggaggttgcagtgagccgagatcatgtcactacactccagcctggactacagactgagactcttgtctcaaaaaaaaaaaaaaagaaagacctgcctccataattcaatcacttcctactggtttcctcccacgacatgtgagaattgagggagttacaagtcaagatgagatctgggtgaggacacagccaaaccatatcattcctcccctagtcccttccaaatctcatgtcctcacatttccaaacctatcatgccttctcaacagtcccccaaagtcttaactcatttcagcattaactcaaagttcacagtcccaacatctcatctaagataaggcaagtctcttctgcctatgagcctgtaaaatcaaaagcaagctagttattttccagatacaatggaggtacaggcattgggtaaatgcagccattccaaatgggataaactggccaaaacaaagaggctacaggccccatgcaagtccaaaatccagctggacagtcaaattttaaagctccaaaatgatctcctttgactccatgtctcacatccaggtcacgctgatgtaagaggtgggttcacatggtcttgggcagctcagcccctgttgttttgcagggtataaccccactcctggctgctttcatgggctggcactgagtgtctgcagcttttccagcagcacggtgcaagctgttggtggagctactgttctggggtctggaagatggtggccctcttctcacagctccactaggtggtgccccaggagggactctgtgtgagggggctccaaccccacatttccctttcgcacttccctagcagagattctccatgagagccccgcccctgcagcaaacttatgactggacattcagacatatcatacatcctcttgaaatctaggcagaggttcccaaacctcaattcttgacttctgggcacctgcaggctcaataccacatggaagctgccaagagtttgggcttgcaccctctgaagccacagcctgagcttatcttggccccttttagtcacagctggagtggctgggacacagggcaccaagtccctagactacacacagcatggggaccctcggcctggcccatgaaaccattttttcctcctaggcctcctggcctgtgatgggaggggctgctgtgaagacctctgacatcctctggagacatttttcacattgtcttggggagtaacatttggctccttgttacctatgcgaatttctgcagccggcttgaatttctcctcagaaaatgtgattttcttttctatcgcattgtcaggttgcaaactttccaaacctttatgctccacttcccttatgaaacaatgcctttaacagcacccaagtcatgtcttgagtgctttgctacttagaaatttcttccaacagataccctaaatcatctctctgaagttcagagttccacaaatctctagggcaggggcaaaatgccaccagtctcttcactaaaacataacaagagtcaccttttctccagtgcccaacaagttcctcatctccatcagagactacctcagcctggaccttattgttcatatcactatcagcatttttgtcaaaaagccattcagcaagtttctaggagattccaaactttcccacattttcctatcttcttctgagccctccaaactgttccaacctctgcctgttacccagttccaaagttgcttccatatttttggatatcttttcagcaacaccctactcctggtcccaatttactgtattagttcattctcatgctgctgataaagacatacctgagactgggcaatttacaaaagaaagaggtttactggacttacagttccacgtgtctgaggaggcctcacaatcatggcagaaggtgaatggcacctctcaaatggtggcagacaagagaagagcgcttgtgcagggaaaactcccatttttaaaatcatcagatctcatgagactcattcactatcacaagaacagcgcaggaaagacccatccccataattcaatcaccacccactggattctcccatgacatgtgagaattgtgggagttacaattcaagatgagatttgggtggggatacagtgaaacctatcacttcctgtgtgtcacttgagcatttttttttttttgagatggagttttgcttttgtcacccaggctggagtgcaatggcgcaatctcagttcactgcaacctctgcctcctgtgtttaagcacttctcctgcctcaccctctctagtagctgagattacaggtgctcactaccacacccagctaattttttgtatttttagtagagatggggtttcaccatgttggccaggctagtcttgaactactgacctcaggtgatccacctgccttggcctcccaaagtgctgagattacagttgtgagctaccgcacccgccccacttgaacattttttagaactccattctgagttatctgtagtgttgatgagtgtatctttttggctagtttccttagtggttgcttctaggtattaagtttatacatgcatagcttaccacagtctactagtgttaacattccagttggagtgatgtataaaaccttaccttcctttagttctttactttccctagcttgtaatatagttgtcttaaatatttcctctacatacattaagaatcttatcacacagcaccaaacataatttggaaaacctgaaagaagatccatagtatttacctatatttttactatttccattgtttattctttcttcctgatgctctaagagtcttctttttatcatgtcctatttagagaatctcctttaaccattcttttagggtaggtctgctggtgacagatttttagactttatctgagattgtccctgtttcctcttcattccaaaaggatattttaattagatagagaattctgagttgacagttatttttgtttgacacttgaaaactattgtgtcatttccttctgttctccgtggcttctaatgagaaattcatcatcattcaaattgtttttttcctgttggctaacctaaatgctgtttcttactgttttcaaggtattttcgttgtgtttcagttttcagaagtttacggtgtatctggcatgaatttctttggtttaccctgcttggggtttgctcagcttcttcaatctataggtttatgtcttttgtcaaatttggggatttttttcagccattattttctcaaatacctttgcaactccaattatttcttccagtgccgtttccctctatctagtagtgttgtggtttttattaacagtacatcaccctcctctcccaaccccagttcagaaccagatcttgacgtagagtttagagttcttgatctaagatgatgtcagatatgtcactgatccattaaaaggcccacttgttgacatggttctgcttctggtgtcatggctatgtctttgtcctcctacttgcttaggctcactactttttatgagaagcaggggcaaccttttttttttttttttttaaccctactggcttccagcaacaataaagcaatatctatttctctatcatggggtgatatatagcatacaaatccagccccttgctaccccatgctccttctggactcagagcccaggaaacctctagtttttgtctcactttactcttctatcttctatttgtggtccattgacatatttatcttacttttgggtattactctgtctttttaactatcactgcttcattgcttcatatgtggagcagaatggttgtgttgaagcataaactggttgagaagttcttgtacattcttagaaaaaaaaaaatagagccaaggtttcactatgctgcccaagctggtcccgaactcctgagctcaagcaatctccctgccgtagcctcccaagtagttagactacaggcacgagccactgcacccagcccctcttgcgtttttaatgcagtttgctgaacgaaatctctgtaaattattttgactcttcagttcttcattctttgggtctggttttgcacagaaagcagtgtgattctaagccagtcattcaccctctgtggctgcagttttctgaaatgcatagtgagatggttggactaagtcctttttagttcttagagtcaatatgtcaagaaagatataaaattatcaaacagaagaagttactcttgattccaaacttcaaaattaggattctccaaattgaaaagataaaagcagaggtagtataggatttcaattttgattatagcaaaggacttcttggccattagaagtagaaaacatttcttgaaaaacgaagaagaaccttagaataacatgcagtcttacagtaatcacaaggtagtaattataaggagtttgtattccaagagtccaggtggtaaatatacataatttcaggaaaagtttaaacatatatatattagcaatcgaaggaagtgggattttgttaatgtggaaaacaatccagctgcccataaaatactcctatattcctactactagggatgtggaatacagtgagtggaatttgacctaatataacacatttgggattattttaaattatcattttaaagctttgttttggaagtgttataataaaatattttcatctaaaataaaaattaactattatccattcctttggaagatgtcaattttggccataacattttagaatttgaattcttcattccataaatccctttgtgtttcattgttttatgtaagttttatgatgaacttcttgcatagagcattttataagagattgaatttcaataaaaatataatttatgggcctagagatcttgaggaaaaatataactgtatctgaactattaggactgtctgtcttagtgacagagtaatgaactgcatgtgaaatgcttgtatgggtcacatcttttttttttttttttttttcttgagactgaatcttgctccatcgctcaggctggagtgcagtggtgtggtatcagctcactgcaacctctgtctcccaggttccagcgattctcctgcctcagcctcctgagtagctggaattacaggcacacaccaccacacccagctgatttttgtgtttttagtagagacagggtttcatcatgttggccaggctggtctcaaactcccaaattcatgtaatccacctgcctcaacctcccaaagtgctgggattacagtcgtgagccactgtgctcaactgggtcacatcttttcttttaaaagaccatttttttgctgggtgcaatggctcacacctgtaatcccagcactttgggaggccgaggcaggcagatcacctcaggtcaggagttcgagaccagcctggccaacatggtgaaaccccgtctctactaaaaatacaaaaattagctgggcgtggtgacagggacctgtaatctcagctacttgggaggctgaggcaggagaatcacttgtacctgggaggcggaggttgcagtgagcctagatcatgccactgcattccagcctgggcgacagagcgagactccttctctaaacaaataaataaataaaaggccatttttacctaaaatttcaattacttttctggcaaacctatctcagatattaaggaattcacttaatataatttattactagcataggagtccaactctgaattcatttatgtcatacctgatataaaaagaaaaacattacagaattacatgaagtaaaaagtgaaagttctccccttgccatcttcctcacttagtgtagccactgttaactctttgggacatggaaatggtgacatttcaaagagctttttacatgatttcaaaagggaaaatctcatttcaggttctgagcaacattcatacagtcagagccacatggcaacctaaaaagcccaaaacatggaccttttctccccaggtaagtaatctgctgaatgagtggagtgagtgaatttcaaagtagaacatattcatatttctataaatagcacagagtatgtgggaacagatataaatctttagattctttggtgttctttgaggacattgataaaaattactcatgtttctgactcaccaatgttagtaattcctatgaatcatcccattcaatcagtttcagggttcatttttagaaaattctcatttgatgaaaaatgaaaacataaagataacatttaggaagtggggtgtttttcaaagatgaaatcttccaactgtgctaataaaagctgtgctttcttcagataaagtcagggatgacgcctgagggactgctacattacacccacacactgtcaagactggaatggcattaggtgggtttaaaccactgagtcagcattgcatagacgtagggaggacaaagatgtcttcgtgttgtttttatagtatcaattgtccatattttattttacattactttcgtctacctccaaggtctcattaatttagtatttacttccttcccacagctaactcccttgtataactgcatcctgaaaacccttagttacctttcctcttattgcatcaaaagatcttaaggcaagatggaggttcagtgagagggctcagggtgtggatgaggccagccacctcaactgtgtgctgtgcctgtccagacttgtcgagagcacacctcctaaaagtccatcttgatcttcttagcacccttcctctggtgagaagcatggcctctcttttggcacagtacttcacaattctgttattgcgtctctgtgtatgtgaagagtttagggtagaattttttaatgtttttcctggggtagaaggaagaactgttgggagtatgtgttattctgttgaatgaaattaaacatcagttatgtgcaagcattttttcctaggcacgtggaaactttttcatgccagtgaagttcctattccagcaaaattagtaggggaaaatacatacatgaagaataacaatatcatctacttatggaaccctaactgtgtgctaggccctgtgccaggctcttacgtacattaccttatttaatcagagtagccatgtggggcaagtactgttggtaactaccactcaggcagattgtaatggctttggagctccaagtgctttggaagcacacaggagggtaaagttaattctagtcctttggctcagggaaagttttctagaagagaaactagatcttgaaggttggatagattttacagtcaagaagggagggatacagttgtcgagggagagtgaattgaatgagcaaaagagaaaataaatgaaaattcacaaggcacacattaggaaagttgagcaaatatgtgtattcagtctttaatttttgttctgtttatgaagaacagtggttaatataaatatcttataatgtctataaactattatttgtaacacctctggagacctaggcacagtactattagcctctactctaagcaaaaaataagcaaaggtaaaggtattttccctttaaaagtgaagttaaatttttaaaatttgtaatcattggcattgatgaattcagtccatctgctttttgtttttcttaaaaggcttttattataatgcaaaggcataaactatttactaacaaatagggctgaaaccctgtgtgaggccgttcttgcattgctataaagaaatgcatgaggctggttaatttataaagaaaagaggtttaattggcccctggttctgcagactgtacaggaagcatggcacaggcatctgctcagcttctagggaggcctcaggaagcttccagtcatggcagaaggtgaagggagagcaggcatctcacgtgacagtgcaggagcaagaaggaggaaggaggtgccacacacttttaaaaaaactgatctcctgagaacgaactctctgtggtgaggacagtaccaaaccatgagggatctgccctcatgacccaaacacctcccaccaggcctcaccttcaacattgggattacaattcaacatgaaatttggtggggacatttattcaaaccacatcaaacccccttcccattttttatttttatcaataactttaatttctttatcatttcaggttactcgcatcttaccatgtttgcttgatggtgattgctttatcaggtctaattctgcatctccagatcttggaatattatttgaacttggaatttcttatattcgcaatgtatgtccgttgaaagataaggctttctaatgtatcagttaaaagggaaggttaaaaaatgtgtctattgacaaggaaatccttgaagtctttatgtgtaattgaattttaatcccttgaggaatgagaatgccagtgattctaattttatgtgtgctgatttgttttcgtagcatttaaaataatagtacttattcacatttatagcttgagtgaactccagtgcttttaaagaataaaaattcaaaaaggatgggactttgcagaaagtgagaaaagatgctcactggcatcccagcgccatggttcacctctgtcttccaggggcagagtatacttagccttgtaactgaggtttctaattaagggacttagcagagtagtgacttttataaagtgagtttaacttatgtcatataaactactgaaccagtgggtggggctctgtgctagtaattaaatgtttccacatactaataatagcttgataggtatagtatatatagttgacctcatggtaacccagagagcgttacagagatgttacattaatggtattacactgtccattcatttgtttaaggcaaattcatccatatgtattgtggagggggtaggactggggaaaggagcaggccccccaaaggaagccttaggggcctctagcaactgacagtgggggtaaaattccaagcagaaaagcccttgaatgattaatatctgcattctatctgtcagtgaaacaaaggttcatcatcccatgtagtactgatatgatttgagatcactccacagaatgcttatatcagtcaagagacaatggcagcagttgccacatcattggtttaagggattttcgagagcaattttgacaaaatatgattatcacttgatatactacctttaatatctgacccgcaggcaaaatgagattctactgtgtttcattttattttcttgtgaagaactttttagttctaaaggtgaatactaattttgttcctttaaaaggacttggtatgtgcttataaatttgactagttcagaccttaagtttcatatacttgtcttatttcctagtcaactggtgaaagaggagagttaagctgtggctgggtgtttcttaaactttttgatgccagtggagttcctattccagcaaagtaagttggctatatattcctaacgaatgaatacttctgtaaaaattcattttttagactcttgatacctcaggtttgttctatgagcatgccaataacttttggggagaggactttttatgttgactttagtgttgtttaggcagtgtatgaaaacagcatgcacagtctcatcctaaggaggaagaaatgactcctagagaagaggtattttaaaagatgtttgcactagccatctgctgagaatattctttcagtaatttcctatggtattaacacatttcaccatgctgaaaacagagcctagttgtcttcaaagagtgggaaagttaagtccagagtccagaggtcctctgtgagtctctacccttcctctgtaggtgggacattgaaatcacagtggcaaccacggtaaatgatttaaactttaagatcaaaaggcagactggaagcaaatactgcaatatgtacagaagagttagaagatcattatccctaatataaaaggaactctcaaaaattaataagaaaaagatcatctaaattttaaaatggaggaaaagaaagatctaaatctaggatataaacaagaaattcaagaagggacacaaatgggcaggcagtaggatggtgattaagatcccaaatttggattataaaattttgggctccagtcccagctctacccatgtaactgtaggtggatttcttaacatctccaagtctgaatttcacctatctttaatctggaagattgtaataattcctactccaaaggcttgttgtgaggattaatttagataatgcgccttatgtggcctcctgccacattggcagaggtagaagtcctgactgtacaagtcctttgacatcatcctagagggtgcattacctggggtgccaggtttcttgtgattgttatttgcttttttgtttttgtcttttaatatgctcagggtttttagttgtgcttagtggaagaaataaggaattgtatatctattccatctttctgaaagtgaagtcacagctatttttttaaatgaggtagagctctgtgtattaatatagacacattttcagtgtattagtatatggaaaaagttgcagaatattttgaatactgtgactccacttttgttcattaaaaactatttgtgggccaggtgaggtggctcacaatgcctgtaatctcagcactttgggaggccttggcgggaggatcacctgagcctgggagttatagaccagcctgggcaacatggtgagaccctgtctctacaaaaataaaaaaattagccaagcatggtggcacacgcctgtaatcccagctactcaggaggctgagctgggaggattgcttgaggctgagaggtcgagactgcagtgagcagttttcatgccactgcgctctagcctgggtgacagagcgagattctgcctccaaaaagcaaaaacaaaacaaagcaaaactgttcccagaagttgcctctgaggagcagaattgaggaggtggtgcattacaattaaagggctcttttaccttcttctttctacacttagtatgtgacttcaaaagaaaagcatgtagagtgttagttttgaagcatgtgttagttttgaaattcaccgtgtttatacatttgtttgcatttgcatagaaaagatagggcaggagattaaccacactagagaaggcggcatggggagggatttttcactttttacttatcattcctctgccattcaaactttttataataatctacacgttacttttatattttaaaaataatataagttcatagtggcctcatttcaaataatgatttaacacatttgaaaaatacattaaaaaaaatcacttgtcattaatgtaagtcattaaggtctgaacacgttaatgacttgaattaatttttctcattttcaaggaaaaatgtattttctacagtgtatagttaggaaagataattttctgcagcttataattaggaaagaaagactgtttatttgcccagatagtacctcatggagggatcaacaattattcttttcatttaccaacgaggcataaatgaaatgtctgagtatattagtgctaaaaaatatttaactactgactccagtgttttctacatgcccacagcttatatctgtcattgtatgttattcttttatagaacttatgagcttttcttgaatggtggtactccttatgaaaaaggtattgaagtggacccttcaatatccagaagaggtatggctctcatgtgttgtcttcctttccttaaagattaaacaaatagaagcatctgagaggtagctacattctaataagcatagcgttttttacttgaattcacacttttaaaaatatgtcatttgatataaaaattttaatcatttttaagtacttattttcttggtaacacatatgagactctaagacatcatgaagaatgaaatcatgaagaatgagaactaatgcattagttccttttcattgaccactgaactgatacttgtgactaatacagagactgcctattgctgggtcaaaggatgcagacatttgaaacagtaatatgcatgccaaattgccctctagaaatattgagcatcttttactatgttcattaaccaggcactgtgctagataatgggagaatgaagagcaagacagatatggtcattgcctcatggggctcagagcctgacagatttggaattccatttccactcctcagccacccctctatttgtttggtgattcaagacatgccacctctgctgaccccacaacgccagtcctgccttcttggaacagaaaggagtttggggtctgggatgcagttggttctacctggagtcagacatgctgttttcctttgtaatctggcagcaataatgctgtaactcatgtgatttagcaaacaatcctgtgcccttagggaggtctctcagctcatttagggtatatggatgactcttgcctttcattcaattcagcactactgggtggtatattttcatgaaatacttgttttattatactcactgtctcaagtacttaaagtttcgtgagttacttttgatttttcttaaaagcacacggcagtgttttctaccagattatgacaatgagaaggcagcctcaacttctagtgaaactgagatccttgaacagaagatcaagaaatgtactaaggtgggtacctgcttttacctgtccagtgaatttgggatcattcagcacttggagaccatctctgcttttggcttttcctcatatttagtcatcttttgttataatatttttgtcctctttaattcttcccccaaaggtcagtagggaaatgggtaacaaagctgaaattagcttactcttctatttactagttagctcttctaaccaaatctgttatttgagccatctagtaaatagaagacttgactaaatggggcttaccaatgcatgattctaccctcagggaacttttttaaatgtcaagtttattgagatataatttacatgcagtaaaatttactctttttagtttataattctttgtgttttgacaaatgtatactgtcatgtaattaccactacaatcaagatagagaactttccctcactctaaaaagttatctcatgcccctttgtagtcagctctgtatccccagcctcaggcaggcacacctattttctttctcagcagttttgctttgtccaaaatgtcatacaaatggaatcataacactcaggagccttttgagtctggcttctttcacttagcctagtgcatttgagacttacccatgccattgcatgtgccagtaatttgttcctttttgttctaaatagtacagactgtccctgacttactcaagatttttcaactttaccatggtgcaaaagcaaaacctgttcagtagacactatacttcagtacagattcaatgaattacatgagatatttatactttattacaaaataggctttgtattagatgattttgcccaactgtaggttaatgtgttatgagcatgtttaaggtaggcctgtctaagctctgatgttcagtagactagttgtaggctgggcatggtggctcacacctataattgcagcactttgggaggtggaggtggtagaatcgcttgaggccaggagttcaagaccagcctgggcaacatggcaagaccccatctctaccaaaaaaaaaaaattagctgggtatggtgatgcacacctgtagtcccagctacttgggaggcttaggtgggaggattgcttgaggattgcttgagcccaagaggttgaggctgcagtgagctgtgatggtgccactgcaccccagcctgggcagcagagtgagaccctgattaaaaaaaaaaaaagtctaagtgtattaaatgcattttcaacttatgatattatcttcaacttatgatattttcaatttatgatgggtttctggggctataacccaccataagttgaggagcatctgaattccctttgatagatatactacaatgtgtttattcattcacaaattgaagggcatttgggttgtttctaggtttgggcaattataaataaagctgctttaaacatttgtgtacaaattttctgcatgtggatatatgtcttcatctctcatgggtataaatacctaggagtgagattactgggacatatggagtttaactttataagaaactgccaaactgttttcatttttctttttctttctttttttttttttttttgagacagagtctggctctgtcccccaggctggagtgcagtggcaccatctcggctcactgcaagctccgcctcccgggttcacgccattttcctgcctcagcctaccgagtagctgggactacaggcgcccgccaccacgccctgctaatttttttgtatttttagtagagacagggtttcaccatgttggccaggatggtctcgaactcctgacctcgtgatccgcccacctcggcctcccaaagtgctaggattacaggcttgagccaccgcatccggccctaccaaactgttttcaaaatgactgtagcactttgcactctcattagcaatgtatgagagttccagttactctatattcttgacagcacttgatatgatcagtttttctgttttggccattctaataaatgagaatagtggtttctcatggtgttttaaatatacattttcctcagggagtttgtaaactaataaaatctcagatctatcagtttctcactcagtaccctcctagactagtcatttaacatctctatcagggtcttaatgtctacatctttaaaatggacataataataataatatcaaccccataaaggtgtaatgaggtttaatggaaagaaaatacataaaacagccagtatttacagtgtgtggcacatggtaactaacacaatagtgttagctataattatttactactataattatcttatatatagataaatgtaaacataaagccaggtagatggtgctatatcataaaatttgttcaaatgaagatgtgtagctggtaaaatcagggggcatttgaaatcacctttgaaggattgggaagatgcagaggaaaggagctccacagaggaggcacaaggccaagagggggaaggaagagcatggcatgggacagagactgttgcagctgaactgtcccaccatgacctgctcattgctcacagattattaagaagtagggaagtcagtgaagacttggcatgctcctgtgaatggtttttctcattccagatcatagtcttagcttaaatatcccttgttcttaccactactactgaaatttattttataattatagtgttaacagttcaatctttcaatagccattaataatgtgttcatgggtattatttactctcttagcttttttcccccttggatgttcatagagcctgtaaatcctcttttttggccagcctttccttggaaaattgttatttttcaagattagaaagaaagcagcacagtagtagtctttgtgaaagaaaacccaaatcttgtttggcctcattcttcctacatctttggcctccccactcctcatcttgttgataagcttccaagagtccggaagcactcccatgtgtatatttcaagtacagctcttaatagtgtttctttggcccccaaatactggttttcagacactttgtatgacctcaagatcaaattggactgtgtggtgcagaagttagcaaggcagccccttcttcttaagcagtgaatgctctactgtatgctgggttcttaaaggtcctgtgtccttgtgctccatacctcaggactgcgtcatttgtttcattacagtacagaataggcacccgaaaaatgtttgtgaaataatttcaaagcagagctctccctgctagtgtgaaaatatactcctcaggacttccgctcagcttccacctgtccctggcctccctctgccttgtcttggtgtgtgctcttccacagagagacttgagtgctggcttgaaattgcctctccactttgcatgaccccaaaatatacattcctgggaatttcaaacgtgagttgggacacactgctggtgcaactccaggctggctcgcacagaaaccagcttatgggcagtgaaacctgggccttgcagcagggctgggggctgtagtcagggggcggggtggggctgtgctgtgggttcaaggtaagagactaggcaccagcctgggcccttttggacatcactgagcctgtgcatcctggaggtggagactgaagcaggactgatccatttcaacatcctctctcctcccctgacccgaaaccttcggtaggtgggagaacaagacgggtaatgacaccaatagtccttctcctcctctccttcaaaggcacgccccgcctctatcctcaccctcccttctttacaaacttcacctttgtttatgcaaacttctctgctcaaaggagaaaggacaggggctctttccattatgccaaaggacatgagacagtggagacaaggccaagggcagaaagcctagttagagtttgcattagtgcccatttttacccagtgcccttgctgtttggctttacactgccctctctgactcagccagcagtcctacacatgtatatcttttggatatcaggaatcctgtgaaaatgtgaattattcggtgtagaccactggcaccagagtcctgctcacggggcttggcagtcttcttttgtggagtaggttgtgatcatggcgaccttgtcaacataagaaaaagagagcaaatagatgcttcagtttcaccaagatttgtcttttggagctatttttcaaaagggtttaacttgatgtgatttgaccaaaagcatgtgtataaacccctgaggagggaaagccctgaatttgacttcagattttcagtgcatgagttctaaatatcaagaaaccctgatctggagaagtaggttgcgtgtgtgtgtgtgtgtgtgtgtgtgtgtaaatttgctataaattcattatccttttttttgatgcattccatcttttttctcctttactttcattatatcgttgctaaaaataaataaggtaataatgttagttgcttgaatgcttgagacccattcattgtgttcattgccagagtttgctggtctacatgtgaattcaggaggaagtatatttttacttacttaattcagctaacctttagcagcccagaactttctattcgtcttaagtttgggaaaatcagatgctttctctaaagaatatctaataaagggcaagcagcattgcttcatgttgtgagaaagtgccagaaggaaaggagtgcccacactgggtggaccaatgcctgccaggcaaagcaggcaggtctacgagaaaaggagagggccaagcagaaggaaggaagttcccacccctttccctggcaaaaccttggctgttcttcatcatgagccctgagtttgggcatgcagctgaaacactgtgcaatgggaccgtggaccaaagggcagaacatgagcatgttgttcatgctcaggtcgttctgccccttgctcatgaacatgtccatggtcccagaacaacccagaatcagagcctgatccctgagaaagcatgtggtgacactgaggcagctgaaatggtcccctgcatcccgtctttaaaatgtaggtcaaatgtatacaagatcagaatttagccaggttgaaaaaagacagtttaaaaaagacagtttctgaccttatgtatcacatgctgtatatcaagataactgtgctaagagaacctgtattatatttttagatgtttctagaaattcaggatttaaagagtggtcaaggatacttctttaattccatgaaacttttttttttattataagttttagggtacatgtgcagaacgtgcaggttagttacatatgtatacatgtgccatgttggtgtgctgcacccattaactcatcatttaacattaggtatatctcctaatgctatccctcccccaccccaccccacaacaggccccggtgtatgatgttccccttcctgtgtccgtgtgttctcattgttcaattcccacctataagtgagaacatgcggtgtttggttttttgtcttgcgatagtttgctgagaatgatggtttccagcttcatccatgtccctacaaaggacatgaactcatcattttttatggctgcatagtattccatggtgtatatgtgccacattttcttaatccagtctatcattgttggacatttgggttggttccaagtctttgctattgtgaatagtgccgcaataaacatacgtgtgcatgtgtctttatagcagcatgatttataatcctttgggtatatacccagtaatgggatggctgggtcaaatggtatttctagttctagatccctgaggaatcaccacactgacttccacaatggttgaactagtttacagtcccaccaacagtgtaaaagtgttcctatttctccacatcctctccagcacctgttgtttcctgactttttaatgatgactgttctacctggtgtgagatggtatctcattgtggttttgatttgcatttctctgatggccagtgatcatgagcattttttcatgtgttttttggctgcataaatgtcttcttttgagaagtgtctgttcatatccttcgcccactttttgatggggttgtttgtttttttcttgtaaatttgtctgagttcactgtagattctgtatattagccctttgtcagatgagtagattgcaacaattttctcccattctgtaggttgcctgttcactctgatggtagtttcttttgctgtgcaggagctctttagtttaattagatcccatttgttaattttggctttggttgccattgcttttggtgttttagacatgaagtccttgcccatgcctatgtcctgaatgagattgcctaggttttcttctagggtttttatggttttaggtctaacatttaagtctttaatccatcttgaattaatttttgtataaggtgtaaggaagggatccagtttcagctttctacatatggctagccagttttcccagcaccatttattaaatagggaatcctttccccattgcttgtttttgtcaggtttgtcaaagatcagatggttgtagatatgcggcattatttctgagggctctgttctgttccataggtctatatctctgttttggtaccagtactgtgctgttttggttactgtagccttgtagtatagtttgaagtcaggtagcgtgatgcctccagctttgttcttttggcttaggattgacttggcaatgcgggctcttttttggttccatgtgaactttaaagtagttttttctaattctgtgaagaaagtcattggtagcttgatggggatggcattgaatctataaattaccttgggcggtatagccattttcacaatattgattcttcctgtccatgagcatggaatgttcttccatttgtttgtatcctcttttatttcattgagcagtggtttgtatttctccttgaagaggtccttcacatcccttgtaagttggattcctaggtattttattctctttgtagcaattgtgaatgggagttcactcatgatttggctctctgtttgtctgttattggtgtataagaatgcttgtgatttttgcacgtggattttgtaccctaagactttgctgaagttgcctatcagcttaaggagattttgggctgagacaatggggttttctagatatacaatcatgtcatctgcaaacagggacaatttgacttcctcttttcctaattgaataccctttatttccttctcctgcctgattgccctggtcggaacttccaacactatgttgaataggagtggtgagagaggacatccctgtcttgtgccagttttcaaagggaatgcttccagtttttgtccattcattatgatattggctgtgcgtttgtcatagatagctcttattattttgagatacgtcccatcaatacctaatttattgagagtttttagcatgaagggatgttgaattttgtcaaaggccttttctgcatctattgagataatcatgtggtttttgtcattggttctgtttatatgctggattacatttattgatttgcatatgttgaaccagtcttgcatcccagggatgaagcccacttgatcatggtggataagctttttgatgcattccatgaagcttaattactcgtggaatccattgctgtcacctcatcacagtggtcacattcatcctgttctcttccaacaggctggaagcctgaatattacctctgtgataattttcccttctaaaaatctaatcttaggaattaagataaaggattaatttacaaaaagtaagatctctttttaaatctttggtgatttttctcagcccaaagacatcttccttttgatagaagacaacatatcatttgtaaggtttttgagattttctatatggtccttcctcatgcttaatgacagagtttatatatttctaaaaatagtattagaaatatatattagaatgatctaagatattttcttgagtactttcaaaggttaaatcttgtgcatgatacattcccagtatttactatacatcatgtgtgagggtcttaaagaactcacttttttttttttttttttttttttttttgagacggggtctcgctgtgtctcccaggttggagtgcggtggcgcaatctcggctcactgcaagctccgcctcccgggttcacgccattctcctgcctcagcctcccaagtagctgggactacaggcgcctgccaacacgcccagctaattttttgtatttttagtagaaacggggtttcaccgtgttagccaagatggaagaactcacttttcatgtttccagattattattttgaaatctaaatattgaaattttttatatttttaaatttctgactattttttgatgctattgtaaattgttttgttggtttccttctcaaattgtgcattgttagtgtataaagtacgatttttacgtgttgattttgtattctgcaactttgctagtcatttattctgaaggtatttttcatggagtatttagggttttctacatatattctacatatttctacatcattttgtctgcaaacaaagacacttttctttttttagaaaaatatttccattattgtgttgagtaaaagtggcaggagcaggatccttgtcttgttccttatcttagaggaaaagctttcagtgtttcaccactgagtatgatgttagctgtgggcttttcatatatggcctttattatgttgcagtagtttctttctattcctagtttgttgagtgtttttatcatgaaagggtgtcaaattttaggctttctcagcatcaattgagaaaataatgtgggtttttccccttaattctgttaatgtagcacattatgttgattgatttttggatgttgagccatccttgaatttcattaataaatttgacttggtcatggtgtacaagctttttaatgtgctgttgaattcactttgctagtattttgttgaggattttgcatcaatattcaggaatattggcctgtagtttttttttttttttcttgtagtattgttggcttttttactagggtaattctgacctcataatgagtttgatagtgttttttcctcttcattttttggaaaagtttgaggaaaattggtgttaattcttctttaaaggtttggtagaattctccagtgaagccatctgatgctgggcttttctttatcaggagattttttaaattactgattcaatctccttacttgttattgagattttctatttctttgtgattcagccttagtaggttgtgtatttctagaaatgtgcctgtttcatttaggtcatccaacttgttggcatacaactatttatagtactctcttacacattttttatttctgtaaaatcaatagtaatatcccctctttcatttctgattttagttgagtgttccttagtcattctcactaaaggtttgtcaattttgttcatcttttcaaagaacagagtcttgctttcattgattttctctattgtttttctattctttattttgtctatatctgacctaatctttattatttcttccttctgctagttttgttcttctagttccttagggcataaagttaggttgttgacttgagctcttccttcttttttaatgttaagtatttatagctataaatttccctcttaggactgttttcactgtatcttgtaaattttggtatgttgtgttttcatttcatttctcaagatattttctagtttctcttgagatttcttctttgagccattgttgtttaagtatgttgtttaatttccacatatttatgtgttttccagttttccttctgcttttgatttctagtttcatttcattatgattgaaaaaagatattttgtatgatttcaatatttttaaatttattaagacttactttgtgactcaacatatggtctttcctggagaatatgtcatgtgcacttgagaaaaatgtgtattctgctgttgccgggtagagtgttttgtaaatgtcagctagatccaattagtctacagtgttattgatcttctgtttcattgttctataccttatcgaaagtaggatattgaaatcttctctattattatagatctatgtattgctcccttcaattctgtcagtgtttgcttcatatatttaggagcactgatgtttggtgcatatatgtttataattgttatatattctgaattgactgttttatgattgtacaatatcctttgtctcttgtaacttttggggggcttgaagtctattttgtctgatattaatatggctaaacatgttctcttttagttgctatttgcatgaaattttttttctgttctttcactttctacccatgagtgtcctaagtctaccgtgagtctcttatagataacatataattaaatcgtgtttttttagtgcatcctgccaatctgtatcttttgattgaggagtctaatttatttacatttaaagtgattactaatagagaaggacttacttttgccattttattactcatttgctgcttatcttatagctttttttgttcttaatttcctccctcactgattttctttgtgtttgatttttcatagtgacaaattttgattcccttttactttccatttgaaaatattctatagttattttctttgtggttaccatggtattacatataacatcctaaagttataacaatctattttaaactaataccaacttaacttggtattgcatacaacatccttaggttatagcagtctatcttaaactgataccaatttaacttcgatgttgaattattttctattttttagcccttactgtataccagacactacattaagcactccatacttatttcatttgttgttgttgttttgttttgagacagagtcttgctgtgtcacccaggttggagtgcagtggcacaatcttggctcatggcaacatccaccgcccaggctcaagggattcttctgccttggcctctgagtagctgggattacaggtgcccgccaccaaacctggctaatttttgtattttcagcagagatatggtttcaccatgttggccaggctggtctcaaactcctgacctcaagtgattcacctgtctcggcctcccaaagtgttaggattacaggtgtgagccaccatgcccagcccacacttacttcattttaatccttttagtaaccttctgaaatgcaagtattactattggtatccaataaatgaggaaaccaaagcacaaggagatgaattaattaatttaaagtcacatagctaagaagtgacaaagtcaggacttattccaggtctgtcacaccctcccatgttccacccagtactgtgaacagcctgaattatttcttctgcattcaccaaatcaggcatggcagccacatgcctttgttaaagcttgtagctgactagtccccttctttccaaaacataattagtggcttcccgtttttatttgacatttaacataggtatatatgctaacatggaagcacaaaaatggcaacacagggttgagactcgaaagtgtaaacaaatataaaaagttatctgaaatttaatgtggcctacttgtagtagaaatttttctttaaatagttaaaaatgtgttccagtaatgaagcaaaatttgggactgtttattaaagtaatatacatcaaaacattataagttggattgtaggggattgtctaatgaatacatttttttcttctttaatagtctactgccagaaacattaattggaaatatgtgttctattcacttgttgatattttatcgacaaattcttggagatgtgctcctgaaagacaggatgagcttgcaaagtactggtaagtgggctttgccacttccttatgtgcagtaatgcttcatactctgagtaaaggtaacctataccatcttgtatcttctgtttctggttgtgacttttggaataaaatatttagaacagcattgatgttaatacattacttatgggacatcttcagatccaaagcattgagctttgtgaactcgacacatattcagttctttcaaacatatgtattttcacatttcaaattctagagttttgagatcccaagagtcagatatagtcatattttcccttaatgtctctgagtaatctgttttttcccatgtgtttggtatgcacataatcattttgaagagaaaccaaaatcaaccaaaatagctggttcttagtgcatgaagtataagtatcaaatggattagtttaaattggtgaatccagatatggagtatttgggtgtcctatgtactgtctttattcttgcaacttttttgtacgtttgaaatttttaccaagtaaaatgttaaaaaataagtttaaaaatcaatgagtcaccatacatgattgaacctgcaaagataaatgcatgtgttatagtaattgccttcaaaaagaaaagcagtttaattgtattggctcttctttcagttcaataaatcagtaaccagatatgtactgagtacctggtatgtgccagatattatgctaggcccagtgatgaatgagacaggcataggcgtcccaggcctcaaacacataatttcatgaataatcctctccacccttttgaaataagtgctgtgaaggaaaatacacaacgagaacatgcactgggaagacttgattaatgtgtagggtaaggaaaggcttctttgagtgagtaatatttaacaaaagatgtgagagaggaattagacctatgagggaagtgtgtggggaaggattctttctgggtagaggggccagcatgtctgaagacccaaggaaagaagacatgcatgtgttggagggcttgaaattgaggcaggccagtatggatggagcagagtgagtgagaggcttagcacttgtggacaaataacattcataggcaggagtcctctcccagggacttatcacctggatagataggtagaagtggaactcaaaggcagagaagcgcagaaagttctcaaggaatcattataactctaagggggaggacgggtaagccttttaatcaccattgcctttgaattcattttcatgactcttgagaaacttcatgaatgatgtgacctcttaaagaggataaggcttgttagttttcccaataggtaagaagtttactcagaattgttgacttcatttgaatttaatcattagaataaaatatcctaataatatctaaagaatgaatttttctctactgaggacaccagattatagaataccttgcccttgccatttcaaaagtgtctgctatggtttcagtgtgtcccatctaaaattcatgttaccaatgtaatggtattgaaaagtggggcctttgagtggcgattaggccatgagggctgttgccttatgaatgggattagagacccttacagaagggcttgacaagggaattcgtctcacccttttgccttcagccacgtgatggcacagtgttcctcccctctggaggatgttgtaagaaggcccttaccagacaccaaatgccattaccttgatcttggatttcccagcctccagaacttggagaaataattttattttgtttatgttacccagtctcaggtattccactacagcagcgcaaacagactaagacatgtctttcctgatgtgcttctttgcacagatttttcatgtgctgttatctattgtgaaatgtcaatattctccctcactgtgtttggtcatatggccagaatcctcaattcctaattcttccagtttcacctaccactgtctgctggctccagacacaagtttgggtccttccctgagcgctggtggcctggaatcagacctgagcagcaggtcctctgtctcctttccccccaatgcttcctagtttctgctcagtctcccaagagcagggctacctctaaggggaagattccttttaccatgccacagccataaggaagaaagagaagttgaagaaaaacacagaacaaaattttctagtcttattctgttcagagcctccttgcccttactctaaaagctccattaatttggtacaggaactcaccaggatatgggtataggggcaaatgaaggttgaagggacagctttgagctctcctagaagtcaaagtgtgtagaatgtgttatcaacaaatcatttggcacaataattttcatctgaatatttttgtgtctattgcaataaaatccattgagtgaagtttgcataaaattctttctgttgttttgcatttcagatttaattagccatcccatgctggccaccttccccatgctcttggagcagcctgatgtgatggatgctctcagggtgggtagcatgcattgcaatggaaacctgctggcttatggaagcagttatacactctgtgttaatgagttctgtctaggcctttttttttgttactaggatgatgtctcccaatccctatccattgtctaggtaactcagtcctcatctttcccatcttagcataaattcccaagggctgccttccctgacccagggagcaggtggagtgcctgctatgtacactattgcaatctttgcccattttttccttgacttaggatggccactgattgtgtcctaagagcaaaaatccaaaatggtctgtaagataaatcaattgaatttgcaggggagaatcagggcatgcacatcatctttaattccatgtgtgctgtttgctgtctgaaataactgttgagtgttatgttaaatcgtatgaaatctccaattttcagccatttttggcctaagtggcagtttcatatggtttagcctaatacatcagggtcaataagtagaagagctgcatgcatgcaaggcagatacacaggtaacatcacaagtgccatgggggaggtataacccaggaccttgaagatttaaagaaggcagcaaagaaggatccaaattctgtttcactagagaggtcctgcatgagagagcctaataaaggccagggccaagaggattttgacctgctgagatgggggtgaagacgttgcaggtagaaggcttagcatgagcagacgtttgaggcaggaaggaatagagctgacagtccagcttggcatgtcagatgcaagtaagggagtggttggtagatgggcaaggtaagcctgagtctcggtgtggggctgagggcggtggtaggtggtgggtaacccaggaaggtttcttctttaggcaaactctgccaagtgcaaagaggcagaacatgtgcaggagggaggtgagcatattagggggtgactcctgctgataaaaactaggccatatgcacctgacagcagaaacagaaggaggactcagtcatctacaaagattcttattagactttgaaaccaattcatatgctagcttggctgggttggggggtgtcaatagtaataatgacattttcaacagagatgtttaagaaaatgttcatggtacatatgatctcctgtaattttagataagttcgtctggcactatagctagataatgcagaatttctctttcttctcctataaagtcactagtatcataataattattcattacacagaacatatatacactgattcttcaacaaagatttcacaagagcctactatgtattaatataaggcactgtgctggccacaggaatatttccctaggtgtgtaacaggaatctgcaccttgttcttaggaggaaacttaggatccctaatctagtctaaaatctgcatttccctgatgagcagacagcttggagatgtgcagtgacttggccggccatggagctcagccatgacccagccggggctgtccctgcgggtcagctctgggtgcacccagaatgtgccacgggctgcttgaaagcatgagggtaaagttgtgcacatatgttatttagcaaaaagaccccatttgagccataataagtataaatatatatacatttatatacctgcctgtgaaaagatctggaagaatatattccagagaggtattggtgaatatctctggatcttggattattttatctacattttcttaattttttcacattgaattatttgtgttatgataattttaaaaaagaaagtggtggttgtttctacacccatgagccttcttctctccgtggcatagtgtattacttaggagaagcttggctgtgctgtggtggttagcacaggtttatttcttacccatggtatgtatccagcatggatcagtggaagatgctgctccacagtcacccaagggtacaggctggtggagcctctactgtctcacagcaccatctggaacaagtagctgcctctgttgccagtttccctgcagaagagggagaatggagaattgttcttgggctttcactgcctttgcttcaaaggggcctgggccacttctgctcacattgcattggccaaaaccagtcacacggtccatttaacttcaaaggaggtatagtcttctttttgttccagaagaaaggaagtggatcttggtgaggtaatagtgacctttaacacgtttgctattcccaaatgagttactctaagtgaaacatcctactatttgctggtggctgaatgaaaaataaggtgggacattgacatgtaactaacaaaaatagacaaattttaccagacactaagtctacatttgctaagtgatactcacgttaaaccatattattaggttggtgcaagagaactgtggtttttgccataaaagtagtagcaaaaaccacaattacttttgcaccaactgaataaaatttaaaatgtacagcatgtgagcctcctagagtttacttacctagcacagttcagtttgtggatgacattttaataataagaagaatggcacttggcctgtttagtaaaacactctggttctgtaagggtcctcttcaaactcctaaggacccatagcacagcagttaatagggtggaggaccatagtcccctcacgtggtaataggtatgaacattccaaaatgttctcatgagtggcatagtctgttatctcctgctgagaaacgctctatcaatgcatcatttattttatggagaatctctttattggtgccatatgttatgttcatcccagggcctccctgctgagaaaggtctgatgctttcaggttactcatgatatcaggtgccaacaggaggatatctactgacatgcacagaacccagaccctggaacaggcagccgtgagactggtcatattccacccacgcattcagtttgccaggaaatggcacagtgaaagtcttaaattcatacttctgtgggactaattgaactctggggtttttatttatttgaggaaatttctgtgaagccctgtggacagattagaaatatttactcacaaaattgtacttcagtctgtctcattctgaccattgtcatcatcatgacagagagaattgtagaaaagtttggtatttggcagtgttttctattttcattactgtcttacttggaaagcttaatactattttattattcaggtgctgtggttgtatagttttcatggatgtgttagtgtttcgctgattctattcttaagttagttttgatttataattatcatgggcttctacggcatttttcacagatacatctgcctggtcattctggtgctgggtcatttgcaatagattcctaattacagattcacttcttgcttgtatagaatctgtacagcatttttaaccctgtccataagtttatttacagagtaaatttgcataagtgttgcaaggacttgttactacttggactaacataatatttctgtttgctctttagagttcgtgggctggaaaagaaagcacattaaaaagatcagagaaggtaaaatatgagtctccacactgaactccatatttgcagtacctggtgtttgcttgcctattctaatcatgtctcttttttagcaaaagtagccatagtcataatccctcttaaccagggaaactgtttcattatggctgcaaaaacacattccaagagggttacgcatgatcgttagctaatgtgagaaggaatacttgttcaagacagccatttcagattactgagttttatttaaataaaggggaagtttctaagccaaagtctctcagttgtgtatcaaatttcttttatttttaaaaaacttctctagctctcaaagcctgtatcaccaagagaagggaaaaaaaaatggcctgagctgtaccatatattgaaaacaatgcattgctcctgcttaccttgctataaaatcatggtaattaccaatccgaacttgctttaatcggtgagtcgtggtttgactgctctcatccaggatttggcaaatgggaagggctatagatggaaaatcttcttggcttttcaggtcttgtggtctctgtcacactactcagctctggtgttgtaacacaaaagcagccacagacaatatgtaaatgaccaaatgtgactgttttcctataaaactttatttatgaaaagaggtgagagtccacatttggcccacagtccatactttaccagtcctgatctaaagtattcattatctacaaggaaaatgaagtaacaaatgagctgaaaaccctaaaaattaggaaacaatttatacattgtatccttatttcagcctccatttgatcagtaccatctacatacatgtgactttgccaaaactgccaggcttagtgctattctagtacagcagccttgggcctgtagacattgcccttatgtggacatgtgtggtgggatgggtgatatctctgtgtagactctgctgcctgtggacagctctgccctcaacttgctgtgctctctgagattcccaccatggcctgtgggcatcggggcttgacatgggtacagctgatgctgcaccattcttatctgtgaagggtctgacatcctcatcaccaaaggacccctcgacctccatcccaggcattgctggaaataagccaacaactctggatcctatgcagaacacctgctacaattatcttagataacatgacagttacctctgatatgctgtcagtaagtaggttcagctgacttggcattgttttagttatatttacccctaaccacactggtgtcaccaaaattagactgcaataccttgacagaatgtgtgagacaccctccatggagcttaggagacaccctggtctcatggagccacgtagaggctctcagggagaactgctccactgtactctgtgtaactctgctcacttccacttctgaagtgccatgtcctgcctgagcagctggctcagagccgatacctgccaggcactaatggcaccctccatcctacctcttaggtggcttttagttaatagagttcacagaatttaacactttaaaaataacaatgttatttgtgggggtggtgttttcccagagagacaaagagttcctgaagtccacgtttctcctggtttaccatgactgcgtgctcccacttctccactccacacgcctacccccattcaggtgggcagaagaagagactgagactgcacggtggaaagttatcactgacttccttaagcaaaaccaagaaaaccagggcgccctccaagctctgctgtcaccagacggagttcatgaaccttttgacctttcagagcagacctatgacttcttgggtgaaatgagaaagaatgcagtgtgacagtggcagcctctagccctcagcttcccacggaatcagatggatcctccacgattacgtgaataaaatgatggaaccaaaaatcactgtcactttacaacttaggttttactcttttctttctacagaccatatttttaaagaaatgtttatacaataatttaaatattttttaaaaccataaaataaatttttataaggaatactgttatatctaaatttaaacagtatttattttttcaaaaacagctacttaagttaatggtatagatttctataaaagcaagattttgtcaaaaactaaatttatgattattcaagaaagtgaaaaaaacaacctacagaatgggaaaacatatttgcaaatcatctaactgataaaggtctagtatccaaaatatttaaatttatgagtgttaataaaatttatcttgttcaatgaagaggaagttaaa

SEQ ID NO: 15700 - DNA, 81288 bp, Homo sapiens
agcaatcagagcaccgcagccagggagatgctggcgagacgacagcgagatcctctccaggccctgcggcgccgcaatcaggagctgaagcaacaggtatggtcaggctgtgcagagggccctggggcgggcgacaggcggacgcagctgcgcgcactgcgccttcccaccgtgaccccacctaatcctgggagcttgcccccaacctacttaccttcccaggttgtaacgcccccttaccccataacattccagcacccaaccccgattcaaacccctcctgatcccaactcaacccccagccaaaggcgaaacctcccaaaattcgtgaccatcaactaagcgccccctcctccgaccctcactcccacctaacgtctcaacctcctaccctaacaactcactaacccaccttatctcccaatctaaacttagtggtgtaaccatttccaacccaactctgagcctagctcctctcctccactttccaagcccatttcctttcagccttcctcaagtggagattattattgcctccgtgaactcaagcgaaataggtgtcaagaaatagtcttaatatgcaagaacattaagatctgataaatgagcaaaggaggtgaacgagagaggaaatacaagtaactcataaacatacgaggaatgttaacttcaaagatactcaagtaattgcaaagcacataaggtatcacaaaaatgttaaaaatcacaacactctgtcttgaggaaggtgtgatgaagcaggcacattcactgctcccgtgtataaggtgcttgtacagcatttcaggaaagcagcttgacaaggtgtaacatatgtgtatgcacctaggctcaaaaattacatttccagggatctgctatgtgtaataattagaaagtaggacagagattgatgtataaaagtattcatcacattgttacttatataatatacacagaacagcatagaagggaacaggctaatatggtatttctgtgtgacaggatgctgatgattattatgattttctttattctttttcatatttataaaaatttttaggccaggtgtggtggctcatgctagtagtaccagctacttgggaggctgagacaggaggatcacctgagcccaggagttcgagactagcctgggcaacataacaagacttggtctcaaaaaaaaaaaaactttttaaaaatacactgagttcttattaaaaataagaaaaaagtaaatagcaaccagtgggtttattttctgacattttaatttcactttaatttttttcatgtgatctattaccaagtatttttccactgagtaaaattattttataatctgaggccggtaagagattcactgatgctcatattttatccatttttgttctcttgtttaaagtaaaaaggatttggaaggtaaatatttaggtgactgtgtattggaatcacagtggtgcaacaaaagctaaatactcttctggtagaaataaaaaataaaacttgatggggcattgacttatgctgaacttcggtggatcttaatatggttctgtgtcttattttaaaatttcaacttttattttagattcagggggtacatgtgcaggtctgtcacatgggaacactgtgttatgctgaggtttggggtacagatgagcctatcacacaagcagtgagcacagtacccaataggcagtctttcagtcttcattcctcttccctcccccaccccactccagcagtcaccagtgtccattgctcccatctttatgtccatgtgtactcaacgagtgagaacatatggtatttggttttctgttcctatgctaattcacttaggacaatggcctccagctccatccatgttgctgcaaaggacatgatttcattcttttttatggttgcatattttttcatggtgtatatgtaccacattttctttatccagtccaccattggtgggcatctatgttgattccatgtctttgctattgtgaatagtgctgtagggaacatacacatgcatgtgacattttggtagaatcatttcttttttgggggtatatacacggaaatgggatttctgggtcaaatgatagttctgttttacgttgtttgggaaatctccaaactgctttccacagtggctgaactaattttcatgcccaccaacagtgtatatgtgtactcttttcttgtcagcctcaccagaatctgtcatttcttgattttttaataatagccattttgaccagtgtgagatggtacctcattgtagttttaatttgcatttctctgatgattagtcatgatgagttaattttaaatttagtgggacattaggagaaccaggaaaagttttagaaggaaactataaaaatgattattaaaacaaactattagaaagattattctccctggagaaatattggctctggagccttttgataccttgactatctggaaagtttgttttgatagtattagctaattcttccctgtcttcacagaggacacctgaagctgaatatggaacagattttctattcggtgtctgtaggacaagtaatcaacagcccctctgagtcaggcctgtgatgactggctctatcactaggtgtgtgaattttgtaaataacactcagatggatgccaaattgcaagagtagagaagaaactaatggaattttctcttttttcatccactttatcttctctacgtaatctatagaaaacagaccaaagaagtatgtgcctttttggagagtatattgacaaagttacatatagtgttagtaaacaaactactaagtcaagagaaacaaagtcatgatacattcaatacaatggataccactcagtaatgagaaggaatgaactaatggtacacacaacaatatggaagtatctcaaaaacatgctttgtggaaaggttacacaagagtgcttactgtatgagtccatttatataaaatttcaagaacaggcaaaactaatttatgttggaaaaatatcaaaacaggtttgtctgtggaggaataaggaggggatttactggcaagggcatgagggaacttactagggtgatggtagttttctacatcttgataagaattttggttacacagatgtatgcatttgtcgaaactcagcaaatgtatgcctcgtatttgtgcatttcactatatacatattttacatcaactattgaactttagttagtgacatccatagtccattatttagggagaaatgtattgataactgcaacttactttgaaaggcataaggtgggttgacggatagatcaaataagtatagtataatgttaatgttttttctaggtagcgggtatatgggttttcactgtaaaatttttaaaactttgttgtatgtttaaaagtgttcattataaaatattggataaaaaaagaagttttctttcctaaggcgatatggtatttaataatgtgatattttaaatggtctccataggttgatagtttgctttctgagagccaactgaaagaagctctagaacccaataaaagacaacatatttatcaaaggtaaagtatgctaaattatataagctttacaggaaccgcacttacatttcaatgcatagtatttaaggcatagagattggtcctttggaatcaaatggaagaatcacatagtgttgtaagttgaatgtagaagaaaccaacctaaacctgatggttgcggacttgctgttgtgacagcaactataaaaactgcttaatgtaaacataggtgacatgggcaggattaccctaaatccttagcctatgtagcccagatcctgtgacctggtcagaaacctctgtctataagcaattagtacttcattgggatgtcaactttaactcccatgagaagacaacactgttttctaggtgggtgttttttgttttgtatttgtttttacttaaaaaaaaatccttgggagagtttaaatagacgtgatgaactacatcaaatttagactattaattcataacatttgtattaagtttaggacatcattaagataatctttgtttttgagatatttaaggattttattacattccaaagaacatgagattcattctattaatttaagtgaattgtaattgtttggagaagttttacttaagtcaggcattcagagtgcttaaaggcaaaacaaatgaattttgaaatgtcaaatgaatttaatttataatagtaggattgattaagggatttagttcaagctgaattaacagtaatgaaagaaaagcaaaggttattgttcttgctttactagatttaaaaacagagtaagatttatagactgaatttgaaggccaagggaaaactacgtttttaaattttatgttagtaaactaaaaatcataattattattattttattttttgagactaaatctcactctgtcacccaggctggagtgcagtggcgcaatctcggctcattgcaacctgcacctcccaggttcaagcgattcttctgcctcaggctcttgagtagttgggattacagtcgtgccccaccacacctggctggattttgtattttgagtagagatgggtttcatcacgttggccaggctggtttcgaactcctgacctcaagggatcccccagccttggcctcccaaagtgctgggattataggtgtgagccactgtgcccagcctaataattgttatgttttattttttttgagatagagtctctctctgtcgcccaggctggagtgcagtggcatgatctcggctcactgcaagctccacctcccaggttcaagcgattctcctgcctcagcctcccgagtagctgggattacaggtgcccgccaccatgcctggctaattttttgtatttttagtagagatggggtttcaccgtgctagccaggatggtctcaatctcctgacctcatgccccctgctttggcctcccaaagtgctgggattataggcgtgagccaccgcgcccggcccctaataattatttttaagcccaagtaaccatagtcttctctgtgcatgaaaagaagattgttactgtcatttaaaaactcactttgacatttgcatatctgaaaatgtcatttaggtatcatttttatctgctcagtgctctgagtcttttcagtttgaaaactcatgtctcatgagctctgggagattttattttacaaaaagattatttcgttaattccatttgtctgtttcttcctgaaacacctttgagtcaggtattggatatcctggactgatcctctatatcccataacttcctgttaatagtttctgtttctttgtttgtatgggagatgtttttttggggggatgtggggggtctcactctgtcgttcaggctgtaatgaagtggcacaatcatggctcactgcaccttctgcctcccaggctcaagggatgcccccctcccccgccacgagctaccatgctagcaattctcttgactttaacacttttctttattacctatttcaacagccatattgttttatttcagcagtcatattggtttttttttttttaagatggagtctcactctgtcatgatcttggctcactgcaacctctgcctcctgggttcaagcgattctcctgccttagccttctgagtagctgggattacaggctcacgccatcacactcggctaattttttgtatttttagtagagacggagtttcaccatgttggccaggctgctctcaaactcccgacttcaggtgatccacccatcatggcctcccaaagtgctgggattacgtgagccaccgtgcctggccatcatcagtcatgttgttaatttacaagtgttttctcttgttctcgaattgttcttttttcatagcatcatgttcctgttttcatattgattgccttcttactacttccatgactaggaggctttttttttctccttaagttctcttctgttctctgaattgtctttgctttctctgggctcagattccttttaattagttaattaattaatttatatttggttattcttaaattttatcttcacgttgccggttttctttattaggtctggcttatctatttttattgaacaatgagggactaggttgattattccagagagctctcatgggcttttctactgttagatagagaggggtccttcctgctagtaccatcccctgaataagaatgaaattttgtatgttgatagggcttatcagaggctcggaagtagcttttagtctgaggatcccccagtgccagaatagggccggctctaaccctggtgtatgggaaacttctttagcagtcatgattctcttcaggtcgtttgttaattgtttttgtttgtttttttgtttttagggaagaatcccctggtaaggagggagagcagagaggggaaaagggagctaactggctcaggttttctgtaaatagacttttaaaagaaagaaccccaactaaatctaaacgtaatcagtatcattaatcttcccttgactaatataaagaccttagattgctttaacattgatttccctcctcaaagcttagatgtatgcatatgatttaatttacacaatataacacaataatattagataatttataaagtaaaccccagccactgtgcatgtcttttcatcagcagaatttcataatgtgtccctctatgatttagtttagttaacctttggtcctttatgtctgctgactcaagtcctagagttttcggcctggcagattatctccctcttatgcttgtgttgcgtcttccaccctttataggagaacatgcttccagcctttttccatggagcagaaatttgttgaaatctcttgctggctagttgtccttctttccttctttgcagtgttcagagtttgttaccttttcaaacgttttaatcattttttgtggggtttcaggagccagtgaagatgaatgtgtgcttagtttttatcctgaaccaggagtcttaaaatatcaactgtttgaggattttaataattacatagttataaaggaggtaattgtaataagtaatttattttcttggtacattatattaaaatagttttccactctgggctttaagcgaaatttctgagtctaagtttcagtagagatttttttggtcaagtaacatgacacctgccaaaataagcggctttactgtcagtctcatttgacaaaagcctgcagctaggttctctcagggtggattcatggcttgtgatatcctcaaagaccagcctttgatgtcattccactctgccatcctttgcttgttggtgatgtctctcctcatggttacaaagtccataccctcagtatctaagagcagatgtaggagagattcttttcatgcctggtaagggaggataaaatgggaggcaatcccaatatacgtgttttatgttacactggcagccgtgggccccctgctcaccctgcctgcagtggaggctgagaacataggtgccagtgggaagctgactgccagcaaagaggaagggtgggaaaggggcttttggggaggttgctagtagggtcagccccagtttgatgtttccccttctcttttgctacccttttgacaaaggacttttgttccctttaaaacgttttttatttattactgttttttatttttttctttaagttcagggatacatgtatggcattgtgcaggtttgttacataggtaaacgtgtgccatactggtttactggacagatcatcccatcacctaggtattaagccctgcatccattaattattcttcctgatgctctccctcctctaatacctccttcctacaggccccagtgtatgttgttaccctccttgtgtccatgtgttctcatcattcagctcccacttataagtgagaacatgcggagtttggttttctgttcctgcattagtttgctgaggataatgacttccaactgtaaccatgtccctccaaaggacatgattttgttcctttttatggctgcacagtattctatgagaacatgcagtgtttggttttctgtccttgtgataatttgctcagtatgatggtttccagcttcatccatgtcccttcaaaggacatgaactcatcattttttatggctgcatagtattccatggtgtatatgtgccacattttcttaatccagtctatcattgttggacatttgggttggttccaagtctttgctattgtgaatagtgccacaataaacatatgtgtgcatgggtctttatagcagcatgatttataatcctttgggtatatacccagtaatgggacagttgggtcaaatggtatttctagttctagattcctgaggaatcgccacactgacttccacaatggttgaactagtttacagtcccaccaacagtgtaaaagtttcctatttctccacatcctctccagcacttgttgtttcctgactttttaatgatcgccattctaactggtgtgagatggtatctcattgtggttttgatttgcatttccctgatggccagtgatgatgagcattttttcatgtgttttttggctgcataaatgtcttcttttgagaagtgtctgttcatatcctttgcccactttttgatggcgtcgtttgtttttttcttgtaaatttgtttgagttcattgtagattctgtatattagccctttgtcagatgagtagattgcaacaattttctcccattctgtaggttgcctgttcactctgatggtagtttcttttgctgtgcagaagctctttagtttaattagatcccatttgtcaattttggcttttgttgccattgcttttggtgttttagacatgacgtccttgcccatgcctatgtcctgaatggtaatgcctaggttttcttctagggtttttatggttttaggtccaacatttaagtctttaatccatcttgaattaatttttgtataaggtgtaaggaaggcatccagtttcaactttctacatatggctagccggttttcccagcaccatttattaaatagggaatcatttccccatttcttgtttttgtcaggtttgtcaaagatcagatagttgcagatatatggcattatttctgagggctctgttctattccataggtctatatctctgttttggtaccagtaccatgctgttttggttactgtagccttgtagtacagtttgaagttaggtagcgtgatgcctccagctttgttcttttggcttaggattgacttggtaatgtgggctcttttttggttccatatgaacttaaagtagttttttccaattctgtaaagaaagtcattggtagcttgatggggatggcattgaatctataaattaccttgggcagtatggtcattttcacgatattgatacttcctacccatgagcatggaatgttcttccatttgtttgtatcctcttttatttcattgagcagtggtttgtagttctccttgaagaggaccttcacatcccttgtaagttggatttctaggtattttattctctttgtagcaattgtgaatgggagttcagtcatgatttggctctctgtctgttattggtatataagaatgcttgtgatttttgcacattgactttgtatcctgagactttgctgaagttgcctatcagcttaaggagattataggctgagacgatggggttttctagatatacaatcatgtcatctgcaaacagggacaatttgacttcctcttttcctaattgaataccctttatttccttctcctgcctgattgccctggccagaacttccaacactatgttgaataggagtggtgagagagggcatccctgtcttgtgccagttttcaaagggaatgcttccagtttttgcccattcagtatgatattggctgtgggtttgtcttagatagctgttattattttgagatacgtcccatcaatacctaatttcttgagagtttttagcataaagggttgttaaattttgtcaaaggccttttctgcatctattgagataatcatgtggtttttgtcgttggttctgtttatatgctggattacgtttattgacttgcgtatgttgaaccagccttgcatcccagggatgaagcccacttgatcatggtggataggctttttgatgtgctgctggatttggtttgccagtattttattgaggatttttgcatcgaggttcatcagggatactggtctaaaattctctttttttgttgtgtctctgccaggctttggtatcaggatgatgctggcatcataaaatgagttagggaggattccctctttttctattgattggaatagtttcagaaggaatggtaccagctcctccttgtacctctggtagaatttggctgtgaatccatctggtcctggactttttttggttggtaagctattaattattgcctcaatttcagagcctgttattggtctattcagagattcagcttcttcctggtttagtcttgggagggtgtatttgtcgaggaatttatccatttcttctagattttctagtttatttgcatagaggtgtttatagtattctctgatggtagttggtatttctgtgggatcggtggtgatatcccctttatcattttttattgcatctatttgattcttctctcttttcttctttattagtcttgctagcggtttatcaattttgttgatcttttcaaaaaaccagctcctggattcattaattttttgaagggtttttttgtctctatctccttcagttctgctctgatcttagttatttcttgccttctgctagcttttgaatgtgtttgctcttggttctccagttcttttaattgtgatattagggtgtcaattttatttctttcctgctttctcttgtgggcatttagtgctataaatttccctctacacacagctttaaatgtgtcccagagattctggtatgttgtggctttgttctcgttggtttcaaagaacatctttatttctgccttcatttcgttatgtatccagtagtcattccggagcaggttgttcagtttccatgtggtttagtggttttgagtgagtttcttaatcctcagttctagtttgattgcactttggtctgagagacagtttgttataatttctgttcttttacatttgctgaggagtgctttacttccaactatgtggtcaattttggaataggtgtggtgtggtgctgagaataatgtatattctgttgatttgggttggagagttctgtagatgtctattaggtccacttggtgcagagctgagttcaattcctggatatcctcattaactttctgtcccgttgatctgtctaatgttgacagtggggtgttaaagtctcccattattattatgtgggagtctaagtctctttctaggtctctaaggacttgctttatgaatctgggtgctcctgtattgggtgcatatatatttaggatagttacctcttcttgttgaattgatccctttaccattatgtaatggccttctttgtctcttttgatctttgttggtttaaagtctgttttatcagagactaggattgcaacccctgcctttttttgttttccatttgcttggtagatcttcctccatccctttattttgagcctatgtgtgtctctgtacatgagatgggtttcctgaatacaacacactgatgggccttgactctttatccaattttccaatctgtgtcttttaattggagcatttagcccatttacatttaaggttaatattgtcatgtgtgaatttgatcctgtcattatgatgttagctggttattttgctcattagttgatgcagtttcttcctagcctcgatggtcttcacaatctggcatgtttttgcagtggctggtaccagttgttcctttccatgtttagtgcttccttcaggagctcttttagggcaggcctggtggtgacaaaatctctcagcatctgcttgtctgtaaaggattttatttctccttcacttatgaagcttagtttggctggatatgaaattcggggttgaaaattcttttctttaagaagttgaatattggccgccattctcttctggcttgtagagtttctgctgagaggtcagctgttagtctgatgggcttccctttgtgggtaacccgagctttctctctggctgcccttaacattttttccttcatttcaactttcgtgaatctgacaattatgtgtcttggagttgctcttctcgaggagtatctttgtggcgttttctgtatttcctgaatttgaatgttggcctgccttgctagattggggaagttctcctggataatatcttgcagagtgttttccaacttggttcaattctccccatcactttcaggtacaccaatcagatgtagatttgatcttttcacatagtcccatatttcttggaggctttgtttgtttctttttattcttttttctctaaacttctctgtttgctttatttcattcatttgatcttccatcactgataccctttcttccagttgatcgaatcagctactgaagcttgtgcattcgtcacgtagttcttgtgccatggttttcagctccatcaggtcctttaaggacttctctgcattggttattctagttagccattcgtctaatcttttttcaaggtttttaacttgttttccacgggttcgaacttcctcctttagctcggagaagtttgatcatctgaagccttcttctctcaactcatgaaagtcattctccgtccagctttgttctgttgctggtgaggagctgcaatcctttgaaggaggagaggcgctctgatttttagaattttcagtttttctgctctgttttttccccatctctgtggttttatctacctttggtctttgatgatggtgatgtacagatggggttttggtgtggatgtcctttctgtttgttagttttccttctaacagtcaggaccctcagctgcaggtctgttggagtttgccggaggtccactccagacgctgtttgcctgggtatcagcagcagaggctgcagaacagcgaatattggtgaacagcaaatgttgctgcctgatcattcctctggaagttttgtctcagaggagtacccggctgtatgaggtgtcagtctgcccctactggggggtgcctcccagttaggctacttgggggtcagggacccacttgaggaggcagtctgtccgttctcagatgtcaagctgcatgctgggagaaccactactgtcttccaagctgtcagacagggacatttaagtctgcagaggtttctgctgccttttgtttggctatgccctgtccccagaggtggactctaaagaggcaggcaggcctccttgagctgcggtgggctccacccagtttgagcttccaggctgctttgtttacctactcaagcctcggcaatggctaacaaacagcctcgctgctgccttgcagtttgatctcagactgctgtgctagcaattagcgaggctctctgggcgtaggaccctctgagccatgtgcgcgatgtaatctcctggtgtgccgtttgctaagactgtgggaaaagcgcagtattagggtgggggtgacccgattttccaggtgctgtctgtcatccctttccttggctaggaaagggaattcccttgtcccttgtgcttcccgggtgaggcaatgcctcgccctgcttcagctcatgctcggtgtgctgcacccactttcctgcacccactgtctgatagtccctagtgagatgaacccagtacctcagttggaaatgcagaaatcattcatcttctgcgtcactcactctgggagctgtagactggagttgttcgtatttggccatcttggaaccgccccaagtgttcctttttctctgcaattttgccaacatctgtttttttgactttttaataatcaccgttctgactggcatgagatggtacttcactgtgctgaatgtgtgtcttttgagaagtgtcacttcatgtccttttgctcactttttaatggggtttttttttcttataaatttgcttatttttagactctggatattagacattcatcagatggatagattgtaaacattttcccccattctgtaggttgtctgttcattctgatgatagtgagaggtgacagcatgctggcagtcctcacagccctcgctcactcttggcgcctcctctgcctgggctcccactttggcggcacttgaggagcccttcagcctgccgctgccctgtgggagcccctttctgggctggccaaggccggagccagctccctcagcttgcgaggaggtgtggagggagaggcgcgggtgggaaccgggcctgcacacggtgcttgtgggccagcgtgagttccgggtgggcgtgggctccgtggactctgcacttggagcggccagccagccagccccaccggccctgggcagtgaggggcttagcacctgggccagcagctgctgtgctcaatttctcacccggccttagctgccttcccgcggggcagggctcgggaccttcagcccgccatgcctgagcctccccgccctctgtgggctcctgtgcggcccgagcctccctgacaagtgccaccccctgctccacagtgcccagtcccatcgaccacccaagggctgaggagtgcgggcgcacggtgtgggactggcaggcagctccacctgcagccctggtgcgggatctgctgggtgaagccagctgggctcctgagtctggtggggatgtggagaacctttatgtctagctaagggattgtaaatacaccaatcagcactctgtatctagctcaaggtttgtaaacacaccaatcagccccctgtgtctagctcagtgtttgtgaatgcaccaattgacactctgtatctagctactctggtggagccttggagaacctttatgtctagctcagggattgtaaacacaccaatcggcactctgtatctagctcaaggtttgtaaacacaccaatcagcaccctgtgtctaactcagggtttgtgaatgcacccatcgacactctatatctaactactctggtggggacttggagaacctttgtgtggacactctttatctagctaatctagtggggacctggagaacctttgtgtctagctcagggattgtaaacgcaccagtcagcaacctgtcagaacagactactcggctctctgtaaaatggaccaatcagcaggatgtaggtggggccagataaaagaataaaagcaggctgccggagccagcaatggcaacccgcttgggtccccttccacactgtggaagctttgttctttcgctgtttgcaataaatcttgctactgctcactctttgggtccacactgcctttatgagctgtaacactcaccgcgaaggtctgcagcttcactcctgaagtcagcgagaccatgagcccactgggaggaatgaacaactccagacgtgccgccttaagagctgtaacactcaccgtgaaggtctgcagcttcactcctgagccagcgagaccacgaacccaccagaaggaagaaactccaaacacatccgaacgtcagaaggaacaaactctggacacgccgcctttaagaactataacactcactgcgagggtccacggcttcattcttgaagtcagtgagaccaagaacccaccaattctggacacaatagtttcttttgctgtgcaaaagttctttagtttgatgagatcctatttgtcaagttttgcttttgttgcaattgcttttggctttttgttgtcatgaaatatttgcctgtgcctatgtcctgaatgctattgcttggattttcttctagagtttttatagttttgggttttacatttaagtctttaatctatcttgaattaatttttgtatatggtgtatggaaggggttctagtttcaattttctgcgtatagctagccagctcttccagcatcatttattaaatagggggccctttccgcattgcttgtttttgtcaggtttgtcaaagatcagatggttgtaggtgtgcaagtcttatttctgagttctctattctgttccattggcctatgtgtctgttcttttaccagtaccatgctgttttagttactgtagccttgtaatatagtttgaagttaggtggtgtgatgcctccagctttgttctttttgcttatttgggctcttcttttgttccatataaattttaaaatagctttttctaattctgtgaagaatgtcaatggaagtttgatgggaatagcattgaatctatacattatttggggcagtatgtccattttcacgatatgattcttcctatccacaagcatggaatgtttctccatttttttgtgtcacctctgatttctggagcagtgtttgtagttatccttgagaaggtccctctcactttctttgttagctgtattcctaggtattttattctttttgtagcagttgtgaatgtgagttcaggatttagctctctgcctgcctgttgttggtatataggaatgctagcaatttttgcacattgattttgtatcctgagactttgctgaggttgcttatcagcttaagaagtttctgggccaagacaatgggttttctagatataggatcatgtcatctgcaaacagggataatttgagttcctctcttcctatttgaatactccttatttctttctcttgcctgacttcccaggccagaacttccaacactgcattgaataggagcaatgagggagggcatccttgtcttgtgcctgttttcaaagggaatgcttcaagcatttgcccattcagtatgatattggctgtcggtttgtcatatatggctctgattattttgaggtatattccttcaatatctagtttattgaaatttcttaacatgaaaagatgttgaattttattgaaagccttttctgcatttattgagatagtcatttttttttgtcttaagttctgtttatgtgatgaatcacatttattaatttgtatatgttgaaccaaactttcatcctggggatgaagccaacttgatcatggtagataagctttttgatgtgctgctggattcggtttgccagtattttgttgcggatttttgtatcgatgttcatgaaggatattggctttaagttttctgtttttgctgtatctctcccaggttttggtatcgggaggatgctggatacaatcagttagggaggagtccctccttttcagttgtttggaataatttcagtagaaatggttcccactcttctttttacctttggtagaattcagctgtgaattcatctggtcctgggagtgttttggttggtaagctatttggtaaagctgcctcaattttagaactcattattgatctgttcagggattcaatttcttcctggttcagtcttgggagggtgtatgtgtccaagaactcatccatttcttctagattttctagttcatgtgcatagaggtgtttatagtattctctgctgattgtttgtatttctgtggggtcagtggtgatatcccccttataatttctgattgtgtttatttgattcttctctcttttctttattagtctagctagtggtgtatctattttattaatttttttcaaaaaaccagctcctgaatttgttctttgtagggtttttcatgtctctatctccttcagttcagctctgatcttggttatttcttgtcttctgctagctttagggtttgtttgctcttggttctctagttcttttagttgagatgttaggttgttaacttgagatctttctagctttttgatgtgggcatttagtgatataaattttcctctgaacactgctttagctgcatttcagagattctgatacgttgtctctttgttctcattagtttcaaagaacttcttgatttctgctttaatttcattatttacctgagtcattcagggacaggtggttattttccttgtagttgtgtgattttgactggatttctttctttctttctttcttttttttaaatgtgtctatcagaatgactttatttcagtacactgagccccatcaggcagtgtggtttgtgcaaggctgtgcgagggacaggcttgggctaagagaagggaggtgagttgttaagtgcactgcagtctgtggggtgctacatcgctttcacacacacctgctcctttggcccatacctggcaggggcctttggtcataggacagcatgggggagactactgcatggagtctgggattggggtgggtcatggtgtcacaggtgagggtgccggtgaagacaggctggccccagctttgcaccacctgggctaaaggcctttggactactcctaggagtcaggcctggctccattagctcctggcactctggtctggccctctccctccttaaccaagcaggtccaaggtcaagagtggcccaagatcagccaagagggggccatcccacctctacagcttagttgcctggtcagctatagtggcaaaaggcaacatggttaattgcagctttctccagtcctaaggacactggctctccaacaccccttccttgtttaggggcctctgccaaagaaaaattctacctcctgtttcagaaaatctaaccagcaaccagcctgttgattctatggcagtgagcaagagaaagagggagaaagaggctggtgggagtgtctttgagtatagctaccaatttcaaatggtcctgcaacctgtggacactgtccgcttaccatcagcagggagaggcggggccctggaggctaggctaagcttaggtgctataaacattagtgtggcagggcaggaggcagtgagctccctctctccatccccttactgaacaaacacttcaataaataaaactgtttgaagatggcattgcaacaagaacggatggaaagcaaggacctggaatcagcaggcaccttaaactctcccaaggcccctggaaggggaatgggctgggaacattatctctgcagccattcagggggagtactactcctgccctcctccagtggctggtgtggtcctgttccctggtgaacatgagggcttcctgctccctcctgactttccagtctctgtattagctcttgggatgcttttctagcctcccaaaccaaaatggcaacaaaaccagacagaggtcaaccccagccccagtcctcagtgcccagtcagggggcattgatagcggagtgaccagcaaggggaggcagcagctgcctgggtcctcagggcaccctggtgggtgggagtgagggtggggccagtccagcctaggatgggcagcagcaaggtctcccagggggtggtttatctccctctgtctccccgtggtagtaaacggagttccctgcagccagtcagaggcccacctgaggagggagtgcagcctctgccagtgttcttccctgtcaggagccagttaatggtcacccccaggcctcaggccatcaccatcgtgggtagttcctcatcctttctggacctggggtccctgggccacatggcacttgcatgtgctcacacacttgtatacacacatgcactcacacacacaggcaattcctcacaaacactctgactcaacaaagcgagttttaaagtggagttaacttcagagagaggtgaagatgatatcccaacattagaaggttttcctgtggatagatcaggcaccgtcttcctcatattccttcttggagacccacatcttcttaaaggtgtcatggaggcaaggatagagccctcaatccacgtggaatacagtctctcctgaggtgcaaatatcctgatcttcacttcactcagtagcctgtcaccaaaacctttgaacaaggtagagcctcccaagaggacgatgttggagaaaagtgtgaactgcaggtccatgtctgacttctggatggcgaacaccaggaccttgtggatgccttcactctcctccctgatcaagtctggcctgaagagcagctcaggggcccggaattgggaaggaccaatctcaatggtgctgccatcaggcaggtagtactgagccttctctgtctctagtgtctcttccttctgggggtttatggataggtaggagggtctttcttttatggccttgacaatctcaaactcaaaggatgagtggaaatctcaaacgatgagtggaaatcatagccctccttatgcaggtagaggtgcaggaagcgagagatgttccagcttgcgatgtcaattcgcatgatggagtggggcatggcaaagccctgatagatgggcacagcatgggtgatgccatccccagaatccagcaccacccccgtggtcctgcctgtggcataaaggctgagcacagcttacatggagatgaaaatagcaggcacattgaagctcttgaagaaaacgttggcagctcattcctggtgtctttgtgggtttaaaggtgcctcagtgaggagcacgagatgctcctctgagaaagtctgcagctggtccttagaatagacatattgccagatgtgttccatgtcgttccagtccttgacaatgccatgctccgtgagatagcagattgagagcagcccttggtgctccttggctttgaagccaatgaagatgtcaccttcaagggctcctgccatgatacgaatatgcatgggtaggcccacatactttggaaagcagtatttgtggatctgatcaccagcaaaaccagctttaatcacaccagattcattgtcgatcatgacaggctggttggtgattgtatcgtaagactccacggcagaggaatctctcctggggaaggaactaccagttgggtctgccgctagtgccattcatgaatttcttaatcttgagttctaatttgattgcattttggtctgtttgttataatttcagttctttttcatttgctgaggaatattttatttccgattacttgatcaattttagagtaagtgccttgtggtgatgagtagaatgcatattttgttgtttttgggtggagagttctgtagatatctattaggttcacttgatccagagctgagttcaggtcctgaatatctttatcaattttctgtgtggatgacctgcctaatattgtcagtggggtattaaagtctcccactattattgtatgggagtccaagtcactttgaaaatcataagaacttgctgtatgaatctgggttgccgagaccagctcggtcatggagaccctaacccagcggcgctagaggaattaaagacacacacacagaaatatagtgtgtggagtgggaaatcaggggtctcacagctttcagagctgagagcattgaacagagatttacccacatatttattgacagcaagccagtgataagtattgtttctatagattatagatttactaaaagtattccttacgggaaataaagggatgggccgaaataaaggggaggttctggctagttatctgcaacaggaacatgtccttaaggcacagatcgctcatgctattgtttgtggttcaggaatgcctttaagcagttttccgccctgggtgggccaggtgttcctttccctcattctggtaaacccacaaccttcaccatgggcatcatggccatcatgaacatgtcacagtgctgcagagattttgtttatggccagttttggggccagtttatggccagatttcggggtctcttcccaacatgggtgctctttttttgggtgcatatgtatttaggatagctcttcttgttgaattgaaccttttaccattgtgtaatgcccttctttgtcttttttttatctttattggcttaaagtctgttttgtcagaagctagaattgcaacccctgcttttttctgttttccatttgcttggtaaattttcctccatccctttattttgaacctatgtgtgtctttgcaaatgacgtggatctcttgaagacagcataccgatggatcttgactctttatccagcttgccattctgtgtctttttaattggggcatttaacccacttacatttaaggttagtattgttttgtgtgagtttgatcctatcatcattattctagctggttattttgcagatttgtttatgtggttgcttcatagtgtcactggtctgtgtacttcagtgtgtttttatagtgggtggtatcaatttctcctttccgtatttagtccttccttcaggagctcttgcagggcaggcctggtggtgacaaattccctaagcatttgcttggtctgaaaaggatcttatttctccttcatgtatgaagcttagtttggccggatttgaaattctgggttggaaatttcttttctttaagaatgatgaatattggtccccagtctctgctggcttatagggtttgggtttccactgagaggtatgctgttagtctgatgagcttccttttgtaggtgagctggcctttctctctggctgcctttaacttttttttttttcattttgaccttgaagaatcatgattatgtgtgttggggttgatcttctcatggagtaccttactggggttctctggatttcctgaatttgaatgttggcttgtcttgctaggttgggggaattcttctgtatgatattctaaagtatgtttttcaacgtggttccatttttcctgtcttttttaggtaccccaataagtcacgggtttggtctgtatacataatcccatatttctctaaggttttgttcattcattttcattcttttttccctattcttgtccgcctgtcttaattcagaaacataatcttcaagctctgagattctttcctctgccttgtctattctgctattgatacttgtgattgcattataaagttcttgtgtttttcacctctatcaggtcagttatgttcctctcttaattggctgttctggctatcagctcctgtattggtttatcatgattcttagcttctttgcagtgggtttcaacatactcctttaactcaacaaagttttttattacccactttctgaagcctccttctgtaagttcagccatctcagcatcatcccacttctgtgcccttgctggagtggtgttgtggtcatttggagcagaagaggcactctggctttttgagttttcagcattttgtgtcaattatttctcatctttgtgggcttatttgcctttgatctttgaggttgctgacctttaaataggatttttgttgagtttttattgttgatgttgttgttgttgttttctgtttgtttttcttttaacagtcaggacactctactgtagtgttgctgtggtttgctgtaccccagaccctaattgcctcagtttttcccatacctggaagtatcaccagtgaaggctgcaaaacagcaaatatggcagccagctccttcctctggaagctctgtcccaggagagtactgatttgttgccagcccaaacgcactttgtaggaggtggctggaaaccccttttgggaggtctcacccagtcaggtggaatgggattacagacccacttaaagaagcagtctggctgctttttggtagagcacatatgatacattaggaggggactctttcttctggaccatttgtattctccaaagccagcaggctagaatggctaagtctactgaaccccagagatagcagccacccctgccccggtaacttggaactgcctcagaaagattccagactgctttggttggctggctggaattccaagccagtgggtcttaacttgtgagttgccatggaagtgggggccatggaagtggggcccacggaacaatgctgcttggctccctggattcagctccctttctagggatatatacagatggatatccccccttgctggggatcttggggccagagtatataaaattcctgggtcactgtatgtgcctgagcagctgctctgctgagacaccacacagttctgtgtattggacccaaggccctggtggcatgaactcaggagatctcctgatctgtgggttgcagagatccgtgggagaaacatggttttctgggcagggttgcatggtcactcaccacttctcttggttggggatgggggttcctttggctgcatgccactcccaggttggctcttgttccccttgttccctggcttttctacattctcatgggtcaaggtgtttgccttgtcagtctcaatgtgagaacctggatatttcagtttaaagtgctgaattcacttgcccttcttcattcctctcagtgagtgccatagaccacagctgcttctaattggccatcttggatcaacgttgttattccctttttcactgcttatttcatttcactcacatctataagcaaaaaaaaaaaaaaaaaaaaaaagactcaaacggcataaaaaagtgacttttgtaggttattgtttagtaaagcatttgaattaaaaaaatctcatcatgagctatagctcatatttggtcattttttgtacttctcatttgggtatctaagacttaatgctgaattgaggcatctgtggaataaataaaactctggacctgtctggacaagcaagctcaaagcaggagtgtgctgtggtgggaataggccaactgtggaatcctaaactgccttcatattgttgctgtaccattgagcagctatgtggacttggtacacatagcttgagaagctatgtagaacttctctttctttaagtggagtgagggttgttatgaggcttaaatgaggtaatgtttgtaaactgcttaacatggttggcacacagtaaactttaggtactattatcagttttgtctctgaggctagttcctaggtttatggagttgtagagctggagaagcattttaaagtccagcgttcttccttattttagagagaggaaactgatgcccagagacactgaaggtttctgaggcttggttatcatgtctatgtgttttacagcttggctatgaggatcatctgagctaataggtggaaaagcatttatatgtcagttttttagtattgttcatacagtggctaattgccttgcctgctcaacgactgaatgattttataaaatagctttctggttctgataatagaaaaatcaatatattttcttttttttcttaatttagatgtatccagttaaagcaggcaatagatgaaaataaaaatgctcttcaaaaattaagcaaagtaagtattgaggttaatcacattattaaaacatctcttcctatacaagtatttttattaagtggaagttaattcaagttggtaagttcctgggtttacgttagtgatatagtctaactgcagccagtgctggcttgccgaacaggcttgctaagtctgtgcttgggagcaaagcaaaatccagggctccaactaccgaaaaatgttcagctttgatgaactcacctgctattaaggattcagacaatcctggaaggagctatttttatttttgcattttgtgagttgttttacagtttagaattatttttattttaatttctttgtggggaaataatgcataatctggccctgagggtaagtggtaaagaagcttcttgtatcaaatggcagctctgatatcaatgtctctgcagaaacaagaggaacaggaatttaaccttgacaatcccttcaggatttttttttttttttcacatgagccttggctacagctagatgtccaggtccagagactcatggagtctttaaagtggaaggcacctgaaagtcagctctccagctgtatattactcccctttactgcatctgagatatgtggtcactgaagagctcctccaaatttctccagtgacacaaaacttttcaacttagactgtttgaaaacctaattatttctgtttcacaggtgaggaaattgaagctctcagtggtgaagcatccatgcctcttctgtcaataagtggcagaacttgggattggtgcctgtctcattgactttaaagccgatcttctgtcagaacatatctcttactgactatggaaggtctataatacttagcaagaaaataaaagagaaacctaaaacaagtggtataattttattttttcatttggtttgcattccaacacaattgcctgtttcttttaaatctaatttatttccctaagataggtgtaatgtcacactgatatttactttgttatatagcacttattggaattttttgttgttcttttgaaattaggaaactgaaattaattttttagtgaaatagacctatattctctcataggctgatgaatctgcacctgttgcaaactataatcagagaaaagaagaggagcatactcttttggacaagcttacccaacaactgcagggccttgctgtgacaataagcagagaaaatataactgagtatgcttcctttctacctttcttttttcttttttaaagatatatcaccaatagctttaatgtttaactcaaagacatatagcagtatagatataaacaaatgacactaacaatagaatcagtcaacatttatttattgtgtataatagaaggtgttagatcccatgagagatggaaagaagtgtaagtcatagtctctgccctcaggcaatttataatttagttgaaacaaaacagagatctgaaaagctaaatgaacaaatgttagaaaataaagatgatatatttaatgtcaatgttgatgtgtaaaagggaaatgatttggaatgtctacttgcattgttctccctttcataaacattctttaaaaatttgaagcaaagactgagtgtggtgactcatacctgtaatcccagcattttggaaggctgaggcaggaggatcacttgaggccaggagttcaagaccagcctgggcaatacagtggaccccatctctacaaaaaaacccaaactagtcaggcttggtggcacgtacctgtagtcccagctacttgggaggctgaggcaaggaggattgcttgagcccagaagttccaggctgcagtgagctataatcacctcagtgcacagcctgggcaacggagtgagacactgtctctattaaaaaaaaaaaaaattgaagtagggacatgcattgtttgtctgccagagtgtatgttaataatagcttctgaaagttgtaaagaagacttacatatacaagttgagtattccttatctgaaatgcttgggatcagaagtatcttcagttttggattgttttggattttggaatatttgcattgtacttacttgttgagcatccctaatctggaaatctacattttgaaagactccaatgagcatttccttggagtgttattttgatgctccaaaagtttcagatttaggagtatttcggattttggattttctgattagggatacccaacctgtacgaacaaacccaatttgtgggaagcaaaagaaaaaaatcagttattcagactatttcagtgttgttctccaacctttatactgtatcctgggaaaaaatgctgaaggtggtagatgcaaggatctagaatttccaccgattcttagtactgagaatggcagagtagttggtattggactaaccttcccaccataaatgactataaagtctggacaaaatatacaaagcatctgtttgaagccactgagcatctaccaagcagggttgatattcttgatatagggagacacatgaagcaaatcctacattcacctagaccttttccctgggaataatttatgagctgtggtggaggaaggtagattccaagcagggaatagtagtcttactcgactgaggagacagagatcacactttggagctgctcagttcactgagagttgtggagcaaggtgccatagagagaagggagctgcacagaaacaactccagcaatctgaaaggtctcctgggctgtatagggcatgatgcctgcaaggcctggcagaaagtacctgctgggagactaagagcttaatggattctggtaatcatatagtcctggaaaaacactggagtttgtacctagttctagtaaagagacttgggaaatgtttcaggcatttagtagaggacacagaaggcccaggccctaggagtaaagaaaacaccctgagagtaacaaccatgatctaggaataaagacaaagctgaggtaggtcttctctaaaagagcctaaaagcagaccttatcaggaacaagataatttaactgtgtaacattaaaataatttaaaatttcttagaggaatataacataatccaaagtctgtaagtgagtcatgtaatgtgtccatcacagcaaccagtataaaaaaaatcagaaatgcaaaaaagcaggggaaaatacatgatcaataagtgacaagatggtcactaaaaacagacccagatatgatccagatatagagttagctgacaaggacttctaaataaaatgattaatacagtaaagaaaatagaagaaaagatgaatgaaatgggaaatgggtgtatttaattcaaatatagaaaaatcaaatgaacattctataactaaaaaatacaatatttgataaagtaatgactgagaacttccaaaatctgattcaacatatagactcaaaaatctgggaaatatattaaaatcaagagaataaataatcagtagctcggagatgtgagaattagcaaataaccataaaacaacaatttttaatatgttaaataatttataggaaaagattgataagatgaatagagcgaaatcttaagcagagaaatgggaactaataaagaccaaaatgaaaattctggaactaaaaaaatacaatatgtgaaataaaattgctgagtggtttaatagaagattggatacaacagaagaagggatcagtgaacccaaagacagcttaaaagtttttcaaattgatacacaaaaataaaaaaatgcaaagaacaaaacagaatgtaagagagaggtgggacactgttaaaagttgtaacagatttgtaattgaagtctcagaataagagagagaatgaagcacaagaaatatttaaagagatagtgactgaaaatatttaaaaattatgatctaagagagatatcaatccactgatccaagaatctcagggaaccccaaacagaatcaatataaagaaacccacacacaggtacctcaaactaccgaaaaccaaagataaataggagatcttaaaagctgccaagggaaaaaaggaaacatgtagagacaaatgacagaattacagttgacatcttatgagaaaaaatacaggtcagaagacaatgcagtaacagtaacatcttgaaaacgttgaaagaagaaaccatcaactcagaattctgtatccagcaaaagtataaaaaattaaagtgaaataaagacattttcaggcaaacaaaagctgagaaaatttgtcaactgatctgcagtataagaaatgttaaaggaagttcttcaggctagcagacaatgatcccacattgaaatttggaccttcaaaaaggattgaagaagatgggtacgtgggtacatataaaagcctattttttcttttctatatgcctttgaaagacactcaattatgtaaagcaaaatatatatttggggatttataatatccagttgattctcattatttacagtagttatgttctataaagttgccaggaatactcgattagtaaatgctaaaccattgctcctggggaaatgcagacttaagactcctgtgagcctctggtcacaatgtttttgtcaactgagtaacatacaaccttgtgttactgtttaaagacactttatttcatatattttattgattcattaacattgaattcacactaacagcactatcactcatgcatgaacaagtcttatctaacacacttattttctccagaggtacattatagccttcttgtgcttaggaataccacatggctcttcagcgctatgtttgggagccattttaaacaacaaaatcaccaaaaaaaaaaaaaagcacaaaaatgcaaaaactgtggcactaaatagactgcaaaaaagggacactttcctgtatgagagctgaaaaaaaaaggcaggtgtcaccatgttcagcttcagttgggaatgtgtacgccagacaactcaaattttttgctgctttgtgtatgtccacaaatgaccacaaaagcactgtgagtattaattaggaggttacaaataaagtttagtgagccaatgaattcataaatacagaatctgcatgttacaaggactgactatatgtagaaggaaaatgtgacaatagcacagcatagcacaaaggctggcaggtaaatggaattatttatcttaaagttattttatctttggtgaaatgtgatatttaaattagactatgataagttagggatgcatattgtaatacctaaaacaatcactaacaaaataatacaaagaagtgtagcttgtgaaacaacacaataaaatggaatactaaacgtgatttgattaacccaaaaaaggcaagaaaggagaaataaacagatgagacaaatagaaaccaaatagtaatatggtttcaatgcagccatttggatagttacattaaatgtaaatggagtaacactccaattacaacaaagattgtcagattgaatttttttaacccaaatatatactatttagaagagatagactttagtatgcagttatagagagagtgaaagtaaagaactggaaaaaggtattccatgttctacaacaaagatattatttgttttataaccaaaacaaaggtgatacggttacaataatatcagatatttaaggctaaaagtaatttactatttaagaaaggacatttcataatgataaaagaaagggtcgattcagtaggaaaaaaaatcttcctaaatgagtatacatttaataatatgggttcaaatgtataaagcaaaagttgccagaactaaaacagagctagataattcacaatccttaaccaccgtgatctaattacatgtatagtcaagcctttcttagtgatagggatatgttctgagaaatgagtcattaagtgatttcatcattgtacaaacatcatagaatgtacttgcacaaacctagaaggtgtaggttaccatacacttgggttatatagttatagtatagcatgttgctcctaggctacaaacctgtacagcatgttactgtgctgaatactgtacacaattgtaacacaatggtgtatttgtgtatctaaacatatccaaaaataggaaatgtacagtaaaaatatggtattatatgtatggggccatcattgtatatgtggcccattgttgactgaaacattgttgtgcagcacatgactatatatgtgtagaacacagcacctaagtatgtattatgtaaatacatattcttttcagtgcatctgtaacattaaccaaaatgaaccatattggaccataaagtaattgtcaccaaatttcaagagtttgaaattatgtagaatatatatatattttctttgatgacttggaatgacattaaaacccaatgacagaaaaataattagaaatcactgcatgtggccaggtgcggtggctcacgcctgtgctgaggcgggcgaatcacgaggtcaagagatagagaccatctggccaacatggtgaaaccccatctctactaaaaatacaaaaatgagctgggcatggtggtgcatgcctgtagtcccagctactcgggagtcggaggcaggagaatcgcttgaacccgggaggtggagattgcagtgagccaagatcataccactgcactccagcctggtgacagaatgagacaccgtctcaaaaaaaaaaaaaaagaaaaagaaaaagaaaagaaattactacatgtttgcaaattgtcacacacttctatataaactgtgagtcaaagaaaatataacagtggcaattagaaaatatttggaatgataataaaatgactgggttgcaaccagcatagtgcttaaagggaaaatttctatcttttgtttgtttgttttggagacagggtctccgttacccagactgggtatagtggtgcaatcttggctcactgcaacgtccacctcccaggctctagtgatcctctccacctccgcctccctgagtagctgagactacaggcgtgtgccactacgcttggcaaattttttaaattttttgtagaggcagggtctcactatattgctcaggctggtcttgaactcatgggcttatgcaatcctcccacctcagcctcccaaagttctgggattacaggtgtgagccgccacacctggccagaaatttatatctttaaatgtatagtttgaaaaaaaagttgaaaatcaattactaaaacatccaactttaggggccagaaaaaggacaacaaacccaaggagagcaggaaagaaataataaaaataaaagcagaaaacagtgaacaataaacagacatacagtaggcaatatcaacaaagccaaactggtttttggaaaattaattaaatggataagctgctagcattactgatcaagaaaagagagagagaaaaaaaatcaatacagattccacaagcattaaaaagatactatgaaaagactatgaacaacttgtgtgaataagtttgaaatttagataaaattagtttctttaaaaagaaaatgtactaaaattgacacaagatgaacagaaaatcttaaaagttctactaaaatatttactaaagaagttgaatctgtaattaaaagcctttccacagattaaactctcaggtggctttactggtgaatttattgtaaacatttaagaaagaaatagtgccaatattaaaaaatcattccagagaacaaagaagaaacactttcaaatcattttataagctttcaataacactgatatcaaaacatgacaagaacactagaagaaaattgcaaggccctcatgaacacatgcacaaactcagtataaaatattagcaagtaaaatctagaggcatttcaaaagggtaatacatcatgaccaagtggaatttgttccagagtgtgaggttggcttaacattaaaaaatcaatcattgaaattcactacattaatgaaggggaaaaaccgttatcaagttcacattattttcggcaacattttagaataattgacccatataaaatatgtgcaaaatatctcctaaagaaggaaagagacgcgttgaaaatcaatatgacattttatggattttttagtcttgtggtataaaaatggttgttacatccctgtttatgttttagatcattgtggtataagagtgtcctaccattattttaaacaaagttcagctaatattcctttttattccagagaaaatcttgtagttgactagttttatagttaatgatgttcatttgcattagtctaagtattgttttcccattttaaagataagcttctctcatgtaagctttaggagggcaaagatcttggttttgttcattgttatagcccaagcacatagtgtctgtcacacagtaggtgctccccaaaatttaaactttgctgaatgttgaatgagtaaataaaattcagaaagatttagtgacgtgcccaagctaacattattttggcatttctctcttcctcaccctcagattcacctcctttctcttcatccctatgctgttttcttagttcatagtgttgtcacttctcactttcaacagccaccctcacctttagcctttcttctaatctgttccccacattatacctttgtctcctttctaaagtgggaatcatatcatgtccttcccctactcatttttaggggcgactttaaaggtaaagctcacctgggctacattccgcgtacctcttttcagcctcaactctcactcattttccttaagccttgccctaccattcatgagctacttgatgtttcctaatcttaaatctcctttctcctctccctgcccttcctttctactcccattttacctgattaattccatatcatctctcaagacctaattatagccttttatgattcccattcgtgcaacctgggttaggtgtccctcttgtgtgattgatttcttagtatcctgtgtatacctctactctagtacctattgcactattttataattctccattttctagattgtctcactgcaagctccttgaggatggggaatcatgtctggtttacctttgtgtccactgtgtatctctctgacacggaacttgacctacagcatcagtgtcatcatcataactgacttttatggaaagcttgctatgggcaagcactgttctaaacactttgcaagtagtaactcatcttaatcctcatgacaatcttagaaggcaggttctattattatctccactttaccaatgagaaatggagagcttaaaagaagcctactcaaggtcacccagcaaagagggaatagagccagaatttaaatttagcagagcctatgctctaagtacttcataataatgcttcaacagcattttctgaatggatgaatccaagacttgaattcggagtctcctggcctcaagtccagtgatgctctgccatctcacatacatgactcagctccctctccgcctcagtctctccaggcacacggtcttagctagatggtagaaactgttctttgtattttcccttatttcttttatttgccagctccaaatatgggatattcatgtatatgtagaagttacactcatagctggtctgttcttgtatattatttcaagtagtcctactcagaaacactttttgtagagttggggcacctactgaagaagaggaagaaagtgaaagtgaagatagtgaagacagtggtggggaggaagaagatgcagaggaggaagaggaagagaaagaggaaaatgaatctcacaaatggtcaaccggtgaagaatacatcgctgttggagattttactgctcagcaagttggagatcttacatttaaggtaggtagaataagactgaaacctaacctaagggtcgatgtccatacctaacagaataagaaaactctgcctgtacacctgtattacagattcttaaaatgcagttttataacaatctatttaaataagtaataattacaatttacaagcagtagtaatatgagattgtgttactaaagttacctcttctaaagatttttgaaagtagctttaatgttgagaattcctaatttaggggtaaaattttataatttgttattgaatgtcatgtataaattcattcaagtgagttaggcaatgtccataggtggaggtagaagggagcacttcctgccattttgtagcagtctttcctgttagcttagatatgagaggggcttacatccatgcttggttggcctgggcataaataagtggcaggtgggacagaacaataaagttgtgatttttaaagttgtgattttgagcctgtgttttctgctagagaaatgagccaaagaaatttaagtgaatatatgaattttagttcttatattaaacttcaaagtttagtaactgattaataataaaatacataagaatattatgcaaataattatatggtttgatttatagatttttttttcaaattctcctggaaaatggtatcaatattagacaataatgtatattttaattaagtgtttgcttttgtagtgtccttagtggtggaaatgcttttgtcttcaaagatgaattttatttttataaatgagtgagtgttattcaaaacatatctggtgaattaagtgggtaattatattcagtaaatactatttttgctcaaaaatagggtttaactttaatggaattgatattctttgggaatttatatgctgcttctgaaagacacttttccagagatattaaaacattcaaaaatattttacgcagtaattgaatttttggaataagtatggggccttaaaaatgattgtgaaaaatggttcccatttgcataaatggctcaagtgtatgttaggtaaccaaaaggaatgattcattaaactatgtcacatttatggttttaggtgagttaggcagaatacataggggtcgggtgatagggaagcttttgataaaccttaggataaatattggattaaaaaaagattttgcctttttttcagcacatattttgaatcattggtattgacatatactcatgattattgaattttatttaaaatggtttactttgttttgctttaagaaaggggaaattctccttgtaattgaaaaaaaacctgatggttggtggatagctaaggatgccaaaggaaatgaaggtcttgttcccagaacctacctagaggttagtcttggtttatgccttccttttctaagacttttttttttttcgcttttaataaaacatttagctgtgttcttttgtcagttgactagtgaatgacttgagatatagaatttgctttaattttggagggacaggacctgggaaaaacattgtgtattaatggtcctggggacctgtgaagtgctcttacgcatgtgagccctggaacgtgatctcacaatgaggggatgctttgtggattaatgctgatcataacaaataataggtgtctattgtttattgtaaaacataactgcagttaactttgtgttaacttccacaaatatgtgatccccttactaaaatgtgaacatactatacatgtgtgtttgtagcttgtattttcttatttcataaaataacatggtcattttctgtgccaagatatatagatttctgtctggatcagcactgtccagtagaactatgatgcaaaccacacatgtaatttaaatttttcagtagccacactgagatatctttttgctgatgccacttctgacaccaagtatgtggtttttctctgacaccaaatatgtgttattacatcagttcttctacaccaaccggtgtcagcaattcaattcgattctgatgctaatgcctggagctagcacagacccccacaggttaaaggctcagtcccacaagattgctgctcacttccgttgccagtcacaagtcccaagagccacccatacttctgactgactggctatacattcacgagttcccataccatcacctcaggggttcagtaatttactagaatgattcacagaactcaggaaaacactttccttgcatttaccagtttattataaaggatgcaactcaggaacagccatagagtgaggtattggttgggggtggctggcatgcactctctgggccttccaccttcccagcacttcgctgtgttcaccatcctggaagttcctggaaccccatcatttaggggtttttctgaaggtttcattagccatgtttaactaaatcattagcaattggtgattaactcagtctccagctcctctcccctctttgaaggttggagggtggggctgaaagttctaacctctaatacctgggttggtttttctggtaacctgtccccttcctgaagctgtttaggtgcccacctagaattacctcattaacataaactcaggagtgactgaaggggactcttgatgagtaagaaaacatactcctatcattcaggaaattccaagggtttcaggagctctgtgccaggaatcagtgacaaagaacaaatacatgtttttcattacacacatttttaaaaagtaaaaagaaacaggtagaattatttttaataatatattttatattatccagtatatcaaaaatactattttgacatatcaatatttaaaaatattgagttgttttgcttttttaacattaagttcaaaatccaatgtgtgttttacatttacagcacttctcagtttggattaatttcaagagctcactagctacatgtggccaaagggctattgtattacatagggcaggtctagatcatctttttcaatggcagcaagtcttctaatctcatttagatggtcattgaagttgtttccaacctataatcactatcgattatgttgcaaagaacatgggattagcatccactgtcagttgcaaaaagatccccccaaaaagtagcttaaataaggtagaagcctatttctctcaagcataaaagtgtggagaaaagcaatcaataattggttaagatcctatccagtattttatcctgtttctgatgtgaggctgctctgcctagagttatctctttagttttaagtcagctgctggatcttttaaggattccaaggagcaaaaggggaaagaattcaaaaggcataagctgctgcctttttaagaaggtttcttggaagttacacaaaaaaactttcaactgttgctcattgaccagcatttagttctctggcaacagttagctgcaaggaagtcttgggaaatgtagtcttttaactggatcattgttaaatcagggattttgtttgaaaaaggaggtggggaataggtggtagccagccagcaacttgtgttgtcatcaagcctgcgtgcatctttgcacacttgcccgattatccccttagataaattcctagatgttcatcactggttcaaagggtttatagctttatattttgatttatttttccaatttgccttttagaaaagttatgccaatttgtactcccacctctaacaatcagtgagtgctgtttcctcacacaattgccagtgatggctgttagcaatctttaaaatttttgccaatatgaccagcaaaaaaagtgtcattagtggtttaatgtgcatttactgtactcctaatgaggttaagcatcatctcatatgctttatgaccatttgtatatcttctttgcgaatggcactttcggttttctttattgatacataatattttatgtatttgtgtgagtgctttttacttgtatggattgtgtaataatcaagtcagggtatttgagatttccatcaccttgagtgcttatcatttttatgtgttggtaccttttcagttcttttggatatttttttctaagggatttaaaaaactctttcattgatttctaagagcttttataatattttaataatcaggatattaatccttagatatttgtgtgagctattttctttttttcccctcaggatatgcttaagttatgtgttagatattttctttgttgactttaggtcatgtttatttattatgtagctaaatctgtcagtgtttccacttatgatttttgattttgtatcatgattggaaagggcttccccatctctagattattttcttctaatgcttttatgtttcttttatttttatctttacgtcttttcttttttatttaagtaaattccatctggaatttattttgattaaacttgctgtctatctcagttcttattttttcaaatagcaaagttattaaccatgtgttgaaaatttatttcccactgagttttatatgctcatcatatatactaaattcccatctatgctcaagattttctgaaagtactgatgcttttgtttttttgtttttaaacagaaaagcttgtttttgtttttactggagggttaggtggcagtactggtatttttattggttgttttttgcattagttaaaaagcacttcacatttcaatggttttttagccttatagtgaagaagaagaaggccaagagtcaagtgaagagggcagtgaagaagatgtagaggcggtggatgaaacagcagatggagcagaagttaagcaaaggtacaaaagtgggaaaggatatcaaagtaggtttaggaaacattttatttgtttatttttattattataactaattcaatactttcttgaaatggagacaacttgtacctggagagcttttcatactattgtctgcttaaagatcattactgttttagttttgtaattatttttaatacatttagctctacctcgttttcatctggaaactgttagattttcaaaacttactgatgattatcaactgtgattaaagaagttccctaattgagtgaataggcataacctgacctgactcactttgctattttgtctccccagaactgatccccactggagtgctgttcagaaagcgatttcagaggcgggcatcttctgtcttgttaatcatgtctcgttttgctacctaatagttctgatgcgaaataggatggagactgtggaagacaccaatggatctgaaacagggttcagggcatggaatgtacagagcagaggacgtatatttctggtttctaagcctgtgctccaagtaacatttctcattagtttttttttttttttgtacaaaaagaatagataattcatggtgtcacttgaggacttggaaacattctcattgatcctgctttcctatcatttgagtggaaacagatgttaaattttatttactattcgaaaaatcctgaaagcctttaataaaaagtaagaaattggccaggcatggtgattcacactggtaatcccaacattttgggaagctgaagcaggaggatcacttgaggccaggaattcaagaccagcttgagcaacatagtgagaccctatcctacaaaaaataagaaaaattagccaggtgtggtggctcatgcctgtagtcccagctactcgggaggctgaggtgggaggattgcatgagtttgggaagtcaaggctgtagtgagctgtgattgtgccactgcactccagagcatgagtgacagggcaagaccctgtcttaaaaaaaaaaaagtaattaattacatttttttaaaggagaaatgatccataattctgtcattaaaaaaaaattacaggccgggcacagtggctcatgggcacagtggctcacacctgtaatcccagcactttgggaggccaaggcgggtggatcacctggggtcaagagttcaagaccagcctagtcaacacagcgaaacctcacctcgactaaaaatagaaaaattagctgggcgtggtagcgcatgtctgtagtcccagctcctggggaggctgaggcaggagaattgcttgaacctgggaggcggaggttgcagtgagccgagaatactccactgtactccagcctgggcgacagagtgagactccgtctcaaaaaacaaaaaaataattacatagccaaatgaaaattctcttcctcaaactcataagtaatcaccattaacaatttagtacgtgtccttcctgacctttttcgttatttattacttataagtacatccttgtatgtgtgagggtgtgtgtctatgagtagtgtgtatgtgtatacaaaaaaaatccattaattcttcagtgcatgtgatttgccaatagacattaacttacctgtgaaatggaagcgcagggtggagcaggacaggagcagggacattttgataagggtatacttgaagcagctgctccggaacacacagctctgcacgctgggcactgtatggggcttaggtccttaggagaggccagggtgctgtgatggcatcctctcaggaatttggggccaaatcgtattattcttccactaaagtctgtatgtttatatttttcttttttgggttatagttactctagtgataaagtattatagagatgcagaaacatgactgaaaacaaatccattttgatgttactgtcttcagcagataaacactgttgatgtgttaactacgatgggagctattcctgcagggttcaggccttccacgctctcacagcttctggaggaaggtaatgcgtgcctatcagccactgcactctttcagcaaagcagtcaagatccacgtctaatttttctgtcacaggcaaaacacattgttgaagaagatgttgaatctcacatctctttggtgctcatcttttcctcatccttcctatgacagtgaggaaagatccctgatcctatcagaggccagcctgtttaccagtgctccgggttccagcccctttctttttttcaaaaatgtgactcctttaattttcagccctttcctgtgtctttagctggcccaccttccccacactggttcattccctcatctgtgctatcagcacacctaattctccccaccttaaaggatcagccccttgaatcctatcccattctagccaaaacctccttttctctgatcttcttccaagcaagacttttccaaagaattatctccatttggaattttcattttccttactcattcttggctttccctgtatttggcaacttttgtctataagctcattttaaagaggattcatgctgggggacaaggggtgtcctgtataccctgagttgttgagttgtcatggaagggctgctttgaggatgcctttgctgggaaggttcttcccagtactccctaaattcccatcttttcatccttcaggtctcgcggtaaattctgccttcccagagatgccttccttgagtaatgtgggtttcccttactcccattcatgtgaacaccctttatagctctatgtcccctaataattattttatttatttgcttgtctacttattttctaagaaaattttcctcccattcaactgtaaactatggagggcaggggacatatctctgatttatctttgtatttctagaacctggtgtagcatctggcaagagtagaagctcaaaaattatttctcgaatggataaatgatgttattaaaagtattattcatgactaaagcatggaggaagagcataaaatgcttttgtgttaagaagtaaaactaacgactttgttttttctgaagtctccaaaaagtgctcatagatttctgcattttacaaaaatatttgaatgaatccttgtcatcatggggcatattattggcctaaaagtctttcttaaaggtgctttaagatgatcttttatgtgtttgtatctgtaagttttgtactgctgtttttatccataaatctatattggcgcttctattttggaaagcaagttcttagtaagcagcgtggcattttggaagtgcctgtactctagttcatagcataacattatggatttttgatttggagtttctttctttgtaagaaaatgaagaaaaaatgattttttcagggaatcaatttcgagcaaattacttcttacaaccagagctcatgccttcacaactggccttcagagatctgatgtgggatgctacagaaggcactgtaagtatagttactatcagtaaaagtgtaactcttccagattttgtcatagttgcaattagacaaacaacatgttaattgactaatgaattataaaaaacaaaaaaattgtttatgataattttgaaaatagcgatatttttataactaaggcagaatttggacttgctaccttgactttatcttgtttctcttctccattgcactcttctctcattgttagaaaggaaataatactaggtttctatcttaatcattctttgcctcaatttcttcatctgtaaagatggagtaatagtaatgcttccaacataaagttattttgataattatgtgtgtgaagggttttgaataatgcctggcatatgaaaagaactcaatagatgttagccattattatcatttatagtagtagtagcagtagtagtagtatttttgagacagggtctccctctgtcacccaggctagagggcagtggtgtgatcatggctcactgtaacctcaaattcctgggctcaagcgaccctcccacttcagcttcctgagtagctggggccacaggcctacaccaccatgcccaggtaatttttgtattttttgtaaagatggggttttgccacgttgccaggctggtctcaaactcctgagctcaagcaatctgccctcctatccctcccaaagtgctaggattacaagtgtgagccaccagtcccagtctaatataagttatttaaatgaaaaggcttatgaccgtaaagcagaatgtaaagtttaatgaattgaagctgttcttaaaaaataaaaaatcagaatgccaatttatttactcacaatctgaattatacctatgaagcagatctgaataaatatatcagatagtgcattctctctgttaaaacacctattaagaaactaaggaactatgcagataattgcttggaataaaaaatagtggggataatcttaatgccaggtggcattggttttatgctgcgttagccttctgcacttacccacattctgtaggagtgaaccgggactggaatacagtgattctatagtcatagatcatatacattttgcctgccaatatttattgttcctttcatcacagcttttaagtatttaagaaaaatgcaatatttcaaatgtaactctatgaaaaatttacctaaaatgactgatttaattttcaatgaacagagtattgaaacttttattgtatatgtgtaaattttttcttttttaaaaattctgtatacattttcataagccgaattcacaaaagacagatttgtgttagaaatcataaaaataaacttttttataactaatttttctttcagattaggtcgagaccaagtcgtatttcattgattctgacattatggagctgtaaaatgattcctcttccaggaatgagcatacaggttctcagcagacatgtacgcctctgtctatttgatggtaataaggtaaggttactgagaagtaaatcaattcatactaggattatggagaaacattcccttagattcttttccattcaactcctccccaattcccaagagagtattttttacctagtaccaaagaaaaatttgaatgactctttgaaaaattcattttttaaatgagatacaggttaaacagtacttagatggaaatttatagttttaattgtgtatattaaaaaaaagataaaagatttaaagtcagtgatctaagctagcaaatcaagaggctagaaaaagaagagtgagttaaacctgaagaaagtagaaagtgggaaataatacagataagagtagaaattaatgaaatagaaaacagatggaccaaagagaaaattttaaaaaagacaaaagttgattctttgaaaacattaataaaactgaaagatgcatagtgagactattaagacttttttaaaaagtaaaagaaaacaaactattaacatctgacatggaaatagagacattatcacagatccttcagacattaagaggccaataaggagatattataaacagctttataccagtaaatttgacaacattgatgaaatagataaattcctggagaaccataatttactgaaactggcataagaagaaatagaaaatgtgaataacctctggtaaagatattaaacctataattaaaaaaaaatcttgccacaaagaaaacttcaggcctaggtggcttcacctgtgaatttcttcaaacatttaaagaagaaataataccaatcttatacaaattcttccaaggaacagatgaaggagaaatgtttcccaacttatttcataaggccagaaaaaacatgaccccagaatatgacaagacattacaagaaaggaaaattaccagacagtatccttcatagatatagaaagtaaaattctaaacaaaatattattaaattgaatctagcaatatataaaaaggacattatgtcataaccaattggggtttatttcaggaattcaaatgtacattcctgggtaatcacatttaacatttgaaaatcaatcattataatttgccataagaaaaatcatatgatcatcttaagaggtaaggaaaaaacatttgacaaatttcaacacccatttatgatttttaaaaaattatctacaaactaggaatagaagggagagtcctcaaattgcaaaatgcaacaagaaaaaacctaaaactagcattatcttacttaacagtgaaatactgaacacttttttcctaagaccaggaacaagtcaaagatatccaagaaataaaaagataactcagttttctaaagggacaaaagacttgaatagcctcttcaaaaaagaagtatcaaaaaccactagaagtataaaaagatagtcaacatgtaagaagtcatcagggaaatgcaaatgaaaaccacagtgagagagactgacctatatgttatatataagaagcccaccttaaatattatgctataggtagcttaagagaaaaaaaggatgagaaaagatataccattcaaagtagacttcaggcactacatagtgataaaagagatcgttcaccaagaagacatagtaatcctaagtgggtacatacctaacatctgaaatttaacacacaagaaataaaaatggttagaactgaaaagagaaaccgacaaagtcacaattatagttggggcctctattatagttggggagtttaacacttctctctcagtaatataggacaagcagacagaaaattagtaaggatgtaagagaactgtataacatatcaacaaactggattagattgatattcacataacacttcacctcaaaatagtaaaatacactttctcttaagtacatatggaatagtcaccaatatagacggtcctgggtcagaaaacaaacctagacaaattgaaaagaattggaatcatataatatatggtccttgattacatggaattaaatttgaaatcagtaacaggaagataaatggaaaaatacttaaatacttgtaaatttaaaaactacttctaaataatcaaagggttaaaaggaaatttcatgggaaattagaaaatattttgaactgaacaaaaaatgaaaatgcaacatatcataatttgtggaatgttagctaaagcattgcttagagggacatttatagcactagatgcttatgttagaaaagaattctcaaatctacagtcaaagctccttcctgagaagacagtgctgcttgagctgataacggtcaatgtgaaattaaatgagttaatgtaagggaagttatcagagtgatgttatacatggaaagaacatagttctttcaaagagtgtctggatgagaggtggtgatgataacttagagaggtggaggtggagatgagagatgtggatagagatatctgggagtaaaaatcaacgaagcttggtgatggactggatatggaggagagaggaggagtggggtataggcatgacacctagtctctgacttccgcatctggatggatggtggcaacattcaatgagatggggaacactggaagaggaccacgtttggaggagttgacatgggcttggttttgcacatgctgagtatactgctaacccccagcatgaagaaaatgcctttatttcatctgaacttggggtaaagaaatgaacttatgttatgacggtaatcctccctcacttccataatacattctgcacaaaatcactgccacaaatgagccagtaggtgtcctcagtgaccaagagctgaattggtttctgtttcatacatctggtttgatactttttcctgtacctctctgtgttctcatatataagaacataaaaaggaatggaattttattttcaataatatatcaaaataatgaaatttactttatgaaagaaatttatgtgagatttccaaattgagagttatggaacatatttaatagctgcacagatactcgtgctgtttatgtaagagtgcttctttaataaatctaagcctagttatgaataaaaagcattgggctgggcgcagtggctcacgcctgtaatccccgcactttgggaggccgaggcgggcagagcacatggtcaagagatctagaccatcctggccaacatgatgaaaccgcgtctctactaaaaatacaaaaattagctggacgtggtggcgtgtgcctgtagtcccagctacttgggaggctgaggcaggagaatcacttgaacccaggaggcagaggttgcagtgagccaagattgcgccactgcactccagcctggtgacagagagaaactctgtctcaaaaaaaaaaaaaaacagaaaccaaaacacatacacacacacaaaaccaaaggcattgttgccaaaactaactaatgagacacaacttccagtaatgtttgagtcagctcctcttggaccaccccacccagagagggtaattgtaaactctgggcaaagtaaaaagcaactacctgaaggcactgcagagcattcagaagcaggcagacactggagaggagcctcaagcctttagtccactgatttattttttttctctttgttttctctcttttttgtttgtctcttttctttttcctatcttcctgtattagtttgttctcacgctgctgataaagacatacccaagaaagggcaaattacaaaagaaaggtttattggacttacagttccgcatggctgaggaggcctcacaatcatggcagaaggtgaaaggcacatctcacatggtggcagacaagagaacagagattgtgcagggaaaactcccatttttaaaaccatcagatctcatgagaatcattcaccatcatgagaacagtgcaagaaagacctgcccccatggtggcatgtgcctgtaatcccagctactcaggaggctgaggcaggagaattgcttgaaccgggacctgggaggtggaggttgcagtgagccgagatcatgtcactacactccagcctggactacagactgagactcttgtctcaaaaaaaaaaaaaaagaaagacctgcctccataattcaatcacttcctactggtttcctcccacgacatgtgagaattgagggagttacaagtcaagatgagatctgggtgaggacacagccaaaccatatcattcctcccctagtcccttccaaatctcatgtcctcacatttccaaacctatcatgccttctcaacagtcccccaaagtcttaactcatttcagcattaactcaaagttcacagtcccaacatctcatctaagataaggcaagtctcttctgcctatgagcctgtaaaatcaaaagcaagctagttattttccagatacaatggaggtacaggcattgggtaaatgcagccattccaaatgggataaactggccaaaacaaagaggctacaggccccatgcaagtccaaaatccagctggacagtcaaattttaaagctccaaaatgatctcctttgactccatgtctcacatccaggtcacgctgatgtaagaggtgggttcacatggtcttgggcagctcagcccctgttgttttgcagggtataaccccactcctggctgctttcatgggctggcactgagtgtctgcagcttttccagcagcacggtgcaagctgttggtggagctactgttctggggtctggaagatggtggccctcttctcacagctccactaggtggtgccccaggagggactctgtgtgagggggctccaaccccacatttccctttcgcacttccctagcagagattctccatgagagccccgcccctgcagcaaacttatgactggacattcagacatatcatacatcctcttgaaatctaggcagaggttcccaaacctcaattcttgacttctgggcacctgcaggctcaataccacatggaagctgccaagagtttgggcttgcaccctctgaagccacagcctgagcttatcttggccccttttagtcacagctggagtggctgggacacagggcaccaagtccctagactacacacagcatggggaccctcggcctggcccatgaaaccattttttcctcctaggcctcctggcctgtgatgggaggggctgctgtgaagacctctgacatcctctggagacatttttcacattgtcttggggagtaacatttggctccttgttacctatgcgaatttctgcagccggcttgaatttctcctcagaaaatgtgattttcttttctatcgcattgtcaggttgcaaactttccaaacctttatgctccacttcccttatgaaacaatgcctttaacagcacccaagtcatgtcttgagtgctttgctacttagaaatttcttccaacagataccctaaatcatctctctgaagttcagagttccacaaatctctagggcaggggcaaaatgccaccagtctcttcactaaaacataacaagagtcaccttttctccagtgcccaacaagttcctcatctccatcagagactacctcagcctggaccttattgttcatatcactatcagcatttttgtcaaaaagccattcagcaagtttctaggagattccaaactttcccacattttcctatcttcttctgagccctccaaactgttccaacctctgcctgttacccagttccaaagttgcttccatatttttggatatcttttcagcaacaccctactcctggtcccaatttactgtattagttcattctcatgctgctgataaagacatacctgagactgggcaatttacaaaagaaagaggtttactggacttacagttccacgtgtctgaggaggcctcacaatcatggcagaaggtgaatggcacctctcaaatggtggcagacaagagaagagcgcttgtgcagggaaaactcccatttttaaaatcatcagatctcatgagactcattcactatcacaagaacagcgcaggaaagacccatccccataattcaatcaccacccactggattctcccatgacatgtgagaattgtgggagttacaattcaagatgagatttgggtggggatacagtgaaacctatcacttcctgtgtgtcacttgagcatttttttttttttgagatggagttttgcttttgtcacccaggctggagtgcaatggcgcaatctcagttcactgcaacctctgcctcctgtgtttaagcacttctcctgcctcaccctctctagtagctgagattacaggtgctcactaccacacccagctaattttttgtatttttagtagagatggggtttcaccatgttggccaggctagtcttgaactactgacctcaggtgatccacctgccttggcctcccaaagtgctgagattacagttgtgagctaccgcacccgccccacttgaacattttttagaactccattctgagttatctgtagtgttgatgagtgtatctttttggctagtttccttagtggttgcttctaggtattaagtttatacatgcatagcttaccacagtctactagtgttaacattccagttggagtgatgtataaaaccttaccttcctttagttctttactttccctagcttgtaatatagttgtcttaaatatttcctctacatacattaagaatcttatcacacagcaccaaacataatttggaaaacctgaaagaagatccatagtatttacctatatttttactatttccattgtttattctttcttcctgatgctctaagagtcttctttttatcatgtcctatttagagaatctcctttaaccattcttttagggtaggtctgctggtgacagatttttagactttatctgagattgtccctgtttcctcttcattccaaaaggatattttaattagatagagaattctgagttgacagttatttttgtttgacacttgaaaactattgtgtcatttccttctgttctccgtggcttctaatgagaaattcatcatcattcaaattgtttttttcctgttggctaacctaaatgctgtttcttactgttttcaaggtattttcgttgtgtttcagttttcagaagtttacggtgtatctggcatgaatttctttggtttaccctgcttggggtttgctcagcttcttcaatctataggtttatgtcttttgtcaaatttggggatttttttcagccattattttctcaaatacctttgcaactccaattatttcttccagtgccgtttccctctatctagtagtgttgtggtttttattaacagtacatcaccctcctctcccaaccccagttcagaaccagatcttgacgtagagtttagagttcttgatctaagatgatgtcagatatgtcactgatccattaaaaggcccacttgttgacatggttctgcttctggtgtcatggctatgtctttgtcctcctacttgcttaggctcactactttttatgagaagcaggggcaaccttttttttttttttttttaaccctactggcttccagcaacaataaagcaatatctatttctctatcatggggtgatatatagcatacaaatccagccccttgctaccccatgctccttctggactcagagcccaggaaacctctagtttttgtctcactttactcttctatcttctatttgtggtccattgacatatttatcttacttttgggtattactctgtctttttaactatcactgcttcattgcttcatatgtggagcagaatggttgtgttgaagcataaactggttgagaagttcttgtacattcttagaaaaaaaaaaatagagccaaggtttcactatgctgcccaagctggtcccgaactcctgagctcaagcaatctccctgccgtagcctcccaagtagttagactacaggcacgagccactgcacccagcccctcttgcgtttttaatgcagtttgctgaacgaaatctctgtaaattattttgactcttcagttcttcattctttgggtctggttttgcacagaaagcagtgtgattctaagccagtcattcaccctctgtggctgcagttttctgaaatgcatagtgagatggttggactaagtcctttttagttcttagagtcaatatgtcaagaaagatataaaattatcaaacagaagaagttactcttgattccaaacttcaaaattaggattctccaaattgaaaagataaaagcagaggtagtataggatttcaattttgattatagcaaaggacttcttggccattagaagtagaaaacatttcttgaaaaacgaagaagaaccttagaataacatgcagtcttacagtaatcacaaggtagtaattataaggagtttgtattccaagagtccaggtggtaaatatacataatttcaggaaaagtttaaacatatatatattagcaatcgaaggaagtgggattttgttaatgtggaaaacaatccagctgcccataaaatactcctatattcctactactagggatgtggaatacagtgagtggaatttgacctaatataacacatttgggattattttaaattatcattttaaagctttgttttggaagtgttataataaaatattttcatctaaaataaaaattaactattatccattcctttggaagatgtcaattttggccataacattttagaatttgaattcttcattccataaatccctttgtgtttcattgttttatgtaagttttatgatgaacttcttgcatagagcattttataagagattgaatttcaataaaaatataatttatgggcctagagatcttgaggaaaaatataactgtatctgaactattaggactgtctgtcttagtgacagagtaatgaactgcatgtgaaatgcttgtatgggtcacatcttttttttttttttttttttcttgagactgaatcttgctccatcgctcaggctggagtgcagtggtgtggtatcagctcactgcaacctctgtctcccaggttccagcgattctcctgcctcagcctcctgagtagctggaattacaggcacacaccaccacacccagctgatttttgtgtttttagtagagacagggtttcatcatgttggccaggctggtctcaaactcccaaattcatgtaatccacctgcctcaacctcccaaagtgctgggattacagtcgtgagccactgtgctcaactgggtcacatcttttcttttaaaagaccatttttttgctgggtgcaatggctcacacctgtaatcccagcactttgggaggccgaggcaggcagatcacctcaggtcaggagttcgagaccagcctggccaacatggtgaaaccccgtctctactaaaaatacaaaaattagctgggcgtggtgacagggacctgtaatctcagctacttgggaggctgaggcaggagaatcacttgtacctgggaggcggaggttgcagtgagcctagatcatgccactgcattccagcctgggcgacagagcgagactccttctctaaacaaataaataaataaaaggccatttttacctaaaatttcaattacttttctggcaaacctatctcagatattaaggaattcacttaatataatttattactagcataggagtccaactctgaattcatttatgtcatacctgatataaaaagaaaaacattacagaattacatgaagtaaaaagtgaaagttctccccttgccatcttcctcacttagtgtagccactgttaactctttgggacatggaaatggtgacatttcaaagagctttttacatgatttcaaaagggaaaatctcatttcaggttctgagcaacattcatacagtcagagccacatggcaacctaaaaagcccaaaacatggaccttttctccccaggtaagtaatctgctgaatgagtggagtgagtgaatttcaaagtagaacatattcatatttctataaatagcacagagtatgtgggaacagatataaatctttagattctttggtgttctttgaggacattgataaaaattactcatgtttctgactcaccaatgttagtaattcctatgaatcatcccattcaatcagtttcagggttcatttttagaaaattctcatttgatgaaaaatgaaaacataaagataacatttaggaagtggggtgtttttcaaagatgaaatcttccaactgtgctaataaaagctgtgctttcttcagataaagtcagggatgacgcctgagggactgctacattacacccacacactgtcaagactggaatggcattaggtgggtttaaaccactgagtcagcattgcatagacgtagggaggacaaagatgtcttcgtgttgtttttatagtatcaattgtccatattttattttacattactttcgtctacctccaaggtctcattaatttagtatttacttccttcccacagctaactcccttgtataactgcatcctgaaaacccttagttacctttcctcttattgcatcaaaagatcttaaggcaagatggaggttcagtgagagggctcagggtgtggatgaggccagccacctcaactgtgtgctgtgcctgtccagacttgtcgagagcacacctcctaaaagtccatcttgatcttcttagcacccttcctctggtgagaagcatggcctctcttttggcacagtacttcacaattctgttattgcgtctctgtgtatgtgaagagtttagggtagaattttttaatgtttttcctggggtagaaggaagaactgttgggagtatgtgttattctgttgaatgaaattaaacatcagttatgtgcaagcattttttcctaggcacgtggaaactttttcatgccagtgaagttcctattccagcaaaattagtaggggaaaatacatacatgaagaataacaatatcatctacttatggaaccctaactgtgtgctaggccctgtgccaggctcttacgtacattaccttatttaatcagagtagccatgtggggcaagtactgttggtaactaccactcaggcagattgtaatggctttggagctccaagtgctttggaagcacacaggagggtaaagttaattctagtcctttggctcagggaaagttttctagaagagaaactagatcttgaaggttggatagattttacagtcaagaagggagggatacagttgtcgagggagagtgaattgaatgagcaaaagagaaaataaatgaaaattcacaaggcacacattaggaaagttgagcaaatatgtgtattcagtctttaatttttgttctgtttatgaagaacagtggttaatataaatatcttataatgtctataaactattatttgtaacacctctggagacctaggcacagtactattagcctctactctaagcaaaaaataagcaaaggtaaaggtattttccctttaaaagtgaagttaaatttttaaaatttgtaatcattggcattgatgaattcagtccatctgctttttgtttttcttaaaaggcttttattataatgcaaaggcataaactatttactaacaaatagggctgaaaccctgtgtgaggccgttcttgcattgctataaagaaatgcatgaggctggttaatttataaagaaaagaggtttaattggcccctggttctgcagactgtacaggaagcatggcacaggcatctgctcagcttctagggaggcctcaggaagcttccagtcatggcagaaggtgaagggagagcaggcatctcacgtgacagtgcaggagcaagaaggaggaaggaggtgccacacacttttaaaaaaactgatctcctgagaacgaactctctgtggtgaggacagtaccaaaccatgagggatctgccctcatgacccaaacacctcccaccaggcctcaccttcaacattgggattacaattcaacatgaaatttggtggggacatttattcaaaccacatcaaacccccttcccattttttatttttatcaataactttaatttctttatcatttcaggttactcgcatcttaccatgtttgcttgatggtgattgctttatcaggtctaattctgcatctccagatcttggaatattatttgaacttggaatttcttatattcgcaatgtatgtccgttgaaagataaggctttctaatgtatcagttaaaagggaaggttaaaaaatgtgtctattgacaaggaaatccttgaagtctttatgtgtaattgaattttaatcccttgaggaatgagaatgccagtgattctaattttatgtgtgctgatttgttttcgtagcatttaaaataatagtacttattcacatttatagcttgagtgaactccagtgcttttaaagaataaaaattcaaaaaggatgggactttgcagaaagtgagaaaagatgctcactggcatcccagcgccatggttcacctctgtcttccaggggcagagtatacttagccttgtaactgaggtttctaattaagggacttagcagagtagtgacttttataaagtgagtttaacttatgtcatataaactactgaaccagtgggtggggctctgtgctagtaattaaatgtttccacatactaataatagcttgataggtatagtatatatagttgacctcatggtaacccagagagcgttacagagatgttacattaatggtattacactgtccattcatttgtttaaggcaaattcatccatatgtattgtggagggggtaggactggggaaaggagcaggccccccaaaggaagccttaggggcctctagcaactgacagtgggggtaaaattccaagcagaaaagcccttgaatgattaatatctgcattctatctgtcagtgaaacaaaggttcatcatcccatgtagtactgatatgatttgagatcactccacagaatgcttatatcagtcaagagacaatggcagcagttgccacatcattggtttaagggattttcgagagcaattttgacaaaatatgattatcacttgatatactacctttaatatctgacccgcaggcaaaatgagattctactgtgtttcattttattttcttgtgaagaactttttagttctaaaggtgaatactaattttgttcctttaaaaggacttggtatgtgcttataaatttgactagttcagaccttaagtttcatatacttgtcttatttcctagtcaactggtgaaagaggagagttaagctgtggctgggtgtttcttaaactttttgatgccagtggagttcctattccagcaaagtaagttggctatatattcctaacgaatgaatacttctgtaaaaattcattttttagactcttgatacctcaggtttgttctatgagcatgccaataacttttggggagaggactttttatgttgactttagtgttgtttaggcagtgtatgaaaacagcatgcacagtctcatcctaaggaggaagaaatgactcctagagaagaggtattttaaaagatgtttgcactagccatctgctgagaatattctttcagtaatttcctatggtattaacacatttcaccatgctgaaaacagagcctagttgtcttcaaagagtgggaaagttaagtccagagtccagaggtcctctgtgagtctctacccttcctctgtaggtgggacattgaaatcacagtggcaaccacggtaaatgatttaaactttaagatcaaaaggcagactggaagcaaatactgcaatatgtacagaagagttagaagatcattatccctaatataaaaggaactctcaaaaattaataagaaaaagatcatctaaattttaaaatggaggaaaagaaagatctaaatctaggatataaacaagaaattcaagaagggacacaaatgggcaggcagtaggatggtgattaagatcccaaatttggattataaaattttgggctccagtcccagctctacccatgtaactgtaggtggatttcttaacatctccaagtctgaatttcacctatctttaatctggaagattgtaataattcctactccaaaggcttgttgtgaggattaatttagataatgcgccttatgtggcctcctgccacattggcagaggtagaagtcctgactgtacaagtcctttgacatcatcctagagggtgcattacctggggtgccaggtttcttgtgattgttatttgcttttttgtttttgtcttttaatatgctcagggtttttagttgtgcttagtggaagaaataaggaattgtatatctattccatctttctgaaagtgaagtcacagctatttttttaaatgaggtagagctctgtgtattaatatagacacattttcagtgtattagtatatggaaaaagttgcagaatattttgaatactgtgactccacttttgttcattaaaaactatttgtgggccaggtgaggtggctcacaatgcctgtaatctcagcactttgggaggccttggcgggaggatcacctgagcctgggagttatagaccagcctgggcaacatggtgagaccctgtctctacaaaaataaaaaaattagccaagcatggtggcacacgcctgtaatcccagctactcaggaggctgagctgggaggattgcttgaggctgagaggtcgagactgcagtgagcagttttcatgccactgcgctctagcctgggtgacagagcgagattctgcctccaaaaagcaaaaacaaaacaaagcaaaactgttcccagaagttgcctctgaggagcagaattgaggaggtggtgcattacaattaaagggctcttttaccttcttctttctacacttagtatgtgacttcaaaagaaaagcatgtagagtgttagttttgaagcatgtgttagttttgaaattcaccgtgtttatacatttgtttgcatttgcatagaaaagatagggcaggagattaaccacactagagaaggcggcatggggagggatttttcactttttacttatcattcctctgccattcaaactttttataataatctacacgttacttttatattttaaaaataatataagttcatagtggcctcatttcaaataatgatttaacacatttgaaaaatacattaaaaaaaatcacttgtcattaatgtaagtcattaaggtctgaacacgttaatgacttgaattaatttttctcattttcaaggaaaaatgtattttctacagtgtatagttaggaaagataattttctgcagcttataattaggaaagaaagactgtttatttgcccagatagtacctcatggagggatcaacaattattcttttcatttaccaacgaggcataaatgaaatgtctgagtatattagtgctaaaaaatatttaactactgactccagtgttttctacatgcccacagcttatatctgtcattgtatgttattcttttatagaacttatgagcttttcttgaatggtggtactccttatgaaaaaggtattgaagtggacccttcaatatccagaagaggtatggctctcatgtgttgtcttcctttccttaaagattaaacaaatagaagcatctgagaggtagctacattctaataagcatagcgttttttacttgaattcacacttttaaaaatatgtcatttgatataaaaattttaatcatttttaagtacttattttcttggtaacacatatgagactctaagacatcatgaagaatgaaatcatgaagaatgagaactaatgcattagttccttttcattgaccactgaactgatacttgtgactaatacagagactgcctattgctgggtcaaaggatgcagacatttgaaacagtaatatgcatgccaaattgccctctagaaatattgagcatcttttactatgttcattaaccaggcactgtgctagataatgggagaatgaagagcaagacagatatggtcattgcctcatggggctcagagcctgacagatttggaattccatttccactcctcagccacccctctatttgtttggtgattcaagacatgccacctctgctgaccccacaacgccagtcctgccttcttggaacagaaaggagtttggggtctgggatgcagttggttctacctggagtcagacatgctgttttcctttgtaatctggcagcaataatgctgtaactcatgtgatttagcaaacaatcctgtgcccttagggaggtctctcagctcatttagggtatatggatgactcttgcctttcattcaattcagcactactgggtggtatattttcatgaaatacttgttttattatactcactgtctcaagtacttaaagtttcgtgagttacttttgatttttcttaaaagcacacggcagtgttttctaccagattatgacaatgagaaggcagcctcaacttctagtgaaactgagatccttgaacagaagatcaagaaatgtactaaggtgggtacctgcttttacctgtccagtgaatttgggatcattcagcacttggagaccatctctgcttttggcttttcctcatatttagtcatcttttgttataatatttttgtcctctttaattcttcccccaaaggtcagtagggaaatgggtaacaaagctgaaattagcttactcttctatttactagttagctcttctaaccaaatctgttatttgagccatctagtaaatagaagacttgactaaatggggcttaccaatgcatgattctaccctcagggaacttttttaaatgtcaagtttattgagatataatttacatgcagtaaaatttactctttttagtttataattctttgtgttttgacaaatgtatactgtcatgtaattaccactacaatcaagatagagaactttccctcactctaaaaagttatctcatgcccctttgtagtcagctctgtatccccagcctcaggcaggcacacctattttctttctcagcagttttgctttgtccaaaatgtcatacaaatggaatcataacactcaggagccttttgagtctggcttctttcacttagcctagtgcatttgagacttacccatgccattgcatgtgccagtaatttgttcctttttgttctaaatagtacagactgtccctgacttactcaagatttttcaactttaccatggtgcaaaagcaaaacctgttcagtagacactatacttcagtacagattcaatgaattacatgagatatttatactttattacaaaataggctttgtattagatgattttgcccaactgtaggttaatgtgttatgagcatgtttaaggtaggcctgtctaagctctgatgttcagtagactagttgtaggctgggcatggtggctcacacctataattgcagcactttgggaggtggaggtggtagaatcgcttgaggccaggagttcaagaccagcctgggcaacatggcaagaccccatctctaccaaaaaaaaaaaattagctgggtatggtgatgcacacctgtagtcccagctacttgggaggcttaggtgggaggattgcttgaggattgcttgagcccaagaggttgaggctgcagtgagctgtgatggtgccactgcaccccagcctgggcagcagagtgagaccctgattaaaaaaaaaaaaagtctaagtgtattaaatgcattttcaacttatgatattatcttcaacttatgatattttcaatttatgatgggtttctggggctataacccaccataagttgaggagcatctgaattccctttgatagatatactacaatgtgtttattcattcacaaattgaagggcatttgggttgtttctaggtttgggcaattataaataaagctgctttaaacatttgtgtacaaattttctgcatgtggatatatgtcttcatctctcatgggtataaatacctaggagtgagattactgggacatatggagtttaactttataagaaactgccaaactgttttcatttttctttttctttctttttttttttttttttgagacagagtctggctctgtcccccaggctggagtgcagtggcaccatctcggctcactgcaagctccgcctcccgggttcacgccattttcctgcctcagcctaccgagtagctgggactacaggcgcccgccaccacgccctgctaatttttttgtatttttagtagagacagggtttcaccatgttggccaggatggtctcgaactcctgacctcgtgatccgcccacctcggcctcccaaagtgctaggattacaggcttgagccaccgcatccggccctaccaaactgttttcaaaatgactgtagcactttgcactctcattagcaatgtatgagagttccagttactctatattcttgacagcacttgatatgatcagtttttctgttttggccattctaataaatgagaatagtggtttctcatggtgttttaaatatacattttcctcagggagtttgtaaactaataaaatctcagatctatcagtttctcactcagtaccctcctagactagtcatttaacatctctatcagggtcttaatgtctacatctttaaaatggacataataataataatatcaaccccataaaggtgtaatgaggtttaatggaaagaaaatacataaaacagccagtatttacagtgtgtggcacatggtaactaacacaatagtgttagctataattatttactactataattatcttatatatagataaatgtaaacataaagccaggtagatggtgctatatcataaaatttgttcaaatgaagatgtgtagctggtaaaatcagggggcatttgaaatcacctttgaaggattgggaagatgcagaggaaaggagctccacagaggaggcacaaggccaagagggggaaggaagagcatggcatgggacagagactgttgcagctgaactgtcccaccatgacctgctcattgctcacagattattaagaagtagggaagtcagtgaagacttggcatgctcctgtgaatggtttttctcattccagatcatagtcttagcttaaatatcccttgttcttaccactactactgaaatttattttataattatagtgttaacagttcaatctttcaatagccattaataatgtgttcatgggtattatttactctcttagcttttttcccccttggatgttcatagagcctgtaaatcctcttttttggccagcctttccttggaaaattgttatttttcaagattagaaagaaagcagcacagtagtagtctttgtgaaagaaaacccaaatcttgtttggcctcattcttcctacatctttggcctccccactcctcatcttgttgataagcttccaagagtccggaagcactcccatgtgtatatttcaagtacagctcttaatagtgtttctttggcccccaaatactggttttcagacactttgtatgacctcaagatcaaattggactgtgtggtgcagaagttagcaaggcagccccttcttcttaagcagtgaatgctctactgtatgctgggttcttaaaggtcctgtgtccttgtgctccatacctcaggactgcgtcatttgtttcattacagtacagaataggcacccgaaaaatgtttgtgaaataatttcaaagcagagctctccctgctagtgtgaaaatatactcctcaggacttccgctcagcttccacctgtccctggcctccctctgccttgtcttggtgtgtgctcttccacagagagacttgagtgctggcttgaaattgcctctccactttgcatgaccccaaaatatacattcctgggaatttcaaacgtgagttgggacacactgctggtgcaactccaggctggctcgcacagaaaccagcttatgggcagtgaaacctgggccttgcagcagggctgggggctgtagtcagggggcggggtggggctgtgctgtgggttcaaggtaagagactaggcaccagcctgggcccttttggacatcactgagcctgtgcatcctggaggtggagactgaagcaggactgatccatttcaacatcctctctcctcccctgacccgaaaccttcggtaggtgggagaacaagacgggtaatgacaccaatagtccttctcctcctctccttcaaaggcacgccccgcctctatcctcaccctcccttctttacaaacttcacctttgtttatgcaaacttctctgctcaaaggagaaaggacaggggctctttccattatgccaaaggacatgagacagtggagacaaggccaagggcagaaagcctagttagagtttgcattagtgcccatttttacccagtgcccttgctgtttggctttacactgccctctctgactcagccagcagtcctacacatgtatatcttttggatatcaggaatcctgtgaaaatgtgaattattcggtgtagaccactggcaccagagtcctgctcacggggcttggcagtcttcttttgtggagtaggttgtgatcatggcgaccttgtcaacataagaaaaagagagcaaatagatgcttcagtttcaccaagatttgtcttttggagctatttttcaaaagggtttaacttgatgtgatttgaccaaaagcatgtgtataaacccctgaggagggaaagccctgaatttgacttcagattttcagtgcatgagttctaaatatcaagaaaccctgatctggagaagtaggttgcgtgtgtgtgtgtgtgtgtgtgtgtgtgtaaatttgctataaattcattatccttttttttgatgcattccatcttttttctcctttactttcattatatcgttgctaaaaataaataaggtaataatgttagttgcttgaatgcttgagacccattcattgtgttcattgccagagtttgctggtctacatgtgaattcaggaggaagtatatttttacttacttaattcagctaacctttagcagcccagaactttctattcgtcttaagtttgggaaaatcagatgctttctctaaagaatatctaataaagggcaagcagcattgcttcatgttgtgagaaagtgccagaaggaaaggagtgcccacactgggtggaccaatgcctgccaggcaaagcaggcaggtctacgagaaaaggagagggccaagcagaaggaaggaagttcccacccctttccctggcaaaaccttggctgttcttcatcatgagccctgagtttgggcatgcagctgaaacactgtgcaatgggaccgtggaccaaagggcagaacatgagcatgttgttcatgctcaggtcgttctgccccttgctcatgaacatgtccatggtcccagaacaacccagaatcagagcctgatccctgagaaagcatgtggtgacactgaggcagctgaaatggtcccctgcatcccgtctttaaaatgtaggtcaaatgtatacaagatcagaatttagccaggttgaaaaaagacagtttaaaaaagacagtttctgaccttatgtatcacatgctgtatatcaagataactgtgctaagagaacctgtattatatttttagatgtttctagaaattcaggatttaaagagtggtcaaggatacttctttaattccatgaaacttttttttttattataagttttagggtacatgtgcagaacgtgcaggttagttacatatgtatacatgtgccatgttggtgtgctgcacccattaactcatcatttaacattaggtatatctcctaatgctatccctcccccaccccaccccacaacaggccccggtgtatgatgttccccttcctgtgtccgtgtgttctcattgttcaattcccacctataagtgagaacatgcggtgtttggttttttgtcttgcgatagtttgctgagaatgatggtttccagcttcatccatgtccctacaaaggacatgaactcatcattttttatggctgcatagtattccatggtgtatatgtgccacattttcttaatccagtctatcattgttggacatttgggttggttccaagtctttgctattgtgaatagtgccgcaataaacatacgtgtgcatgtgtctttatagcagcatgatttataatcctttgggtatatacccagtaatgggatggctgggtcaaatggtatttctagttctagatccctgaggaatcaccacactgacttccacaatggttgaactagtttacagtcccaccaacagtgtaaaagtgttcctatttctccacatcctctccagcacctgttgtttcctgactttttaatgatgactgttctacctggtgtgagatggtatctcattgtggttttgatttgcatttctctgatggccagtgatcatgagcattttttcatgtgttttttggctgcataaatgtcttcttttgagaagtgtctgttcatatccttcgcccactttttgatggggttgtttgtttttttcttgtaaatttgtctgagttcactgtagattctgtatattagccctttgtcagatgagtagattgcaacaattttctcccattctgtaggttgcctgttcactctgatggtagtttcttttgctgtgcaggagctctttagtttaattagatcccatttgttaattttggctttggttgccattgcttttggtgttttagacatgaagtccttgcccatgcctatgtcctgaatgagattgcctaggttttcttctagggtttttatggttttaggtctaacatttaagtctttaatccatcttgaattaatttttgtataaggtgtaaggaagggatccagtttcagctttctacatatggctagccagttttcccagcaccatttattaaatagggaatcctttccccattgcttgtttttgtcaggtttgtcaaagatcagatggttgtagatatgcggcattatttctgagggctctgttctgttccataggtctatatctctgttttggtaccagtactgtgctgttttggttactgtagccttgtagtatagtttgaagtcaggtagcgtgatgcctccagctttgttcttttggcttaggattgacttggcaatgcgggctcttttttggttccatgtgaactttaaagtagttttttctaattctgtgaagaaagtcattggtagcttgatggggatggcattgaatctataaattaccttgggcggtatagccattttcacaatattgattcttcctgtccatgagcatggaatgttcttccatttgtttgtatcctcttttatttcattgagcagtggtttgtatttctccttgaagaggtccttcacatcccttgtaagttggattcctaggtattttattctctttgtagcaattgtgaatgggagttcactcatgatttggctctctgtttgtctgttattggtgtataagaatgcttgtgatttttgcacgtggattttgtaccctaagactttgctgaagttgcctatcagcttaaggagattttgggctgagacaatggggttttctagatatacaatcatgtcatctgcaaacagggacaatttgacttcctcttttcctaattgaataccctttatttccttctcctgcctgattgccctggtcggaacttccaacactatgttgaataggagtggtgagagaggacatccctgtcttgtgccagttttcaaagggaatgcttccagtttttgtccattcattatgatattggctgtgcgtttgtcatagatagctcttattattttgagatacgtcccatcaatacctaatttattgagagtttttagcatgaagggatgttgaattttgtcaaaggccttttctgcatctattgagataatcatgtggtttttgtcattggttctgtttatatgctggattacatttattgatttgcatatgttgaaccagtcttgcatcccagggatgaagcccacttgatcatggtggataagctttttgatgcattccatgaagcttaattactcgtggaatccattgctgtcacctcatcacagtggtcacattcatcctgttctcttccaacaggctggaagcctgaatattacctctgtgataattttcccttctaaaaatctaatcttaggaattaagataaaggattaatttacaaaaagtaagatctctttttaaatctttggtgatttttctcagcccaaagacatcttccttttgatagaagacaacatatcatttgtaaggtttttgagattttctatatggtccttcctcatgcttaatgacagagtttatatatttctaaaaatagtattagaaatatatattagaatgatctaagatattttcttgagtactttcaaaggttaaatcttgtgcatgatacattcccagtatttactatacatcatgtgtgagggtcttaaagaactcacttttttttttttttttttttttttttttgagacggggtctcgctgtgtctcccaggttggagtgcggtggcgcaatctcggctcactgcaagctccgcctcccgggttcacgccattctcctgcctcagcctcccaagtagctgggactacaggcgcctgccaacacgcccagctaattttttgtatttttagtagaaacggggtttcaccgtgttagccaagatggaagaactcacttttcatgtttccagattattattttgaaatctaaatattgaaattttttatatttttaaatttctgactattttttgatgctattgtaaattgttttgttggtttccttctcaaattgtgcattgttagtgtataaagtacgatttttacgtgttgattttgtattctgcaactttgctagtcatttattctgaaggtatttttcatggagtatttagggttttctacatatattctacatatttctacatcattttgtctgcaaacaaagacacttttctttttttagaaaaatatttccattattgtgttgagtaaaagtggcaggagcaggatccttgtcttgttccttatcttagaggaaaagctttcagtgtttcaccactgagtatgatgttagctgtgggcttttcatatatggcctttattatgttgcagtagtttctttctattcctagtttgttgagtgtttttatcatgaaagggtgtcaaattttaggctttctcagcatcaattgagaaaataatgtgggtttttccccttaattctgttaatgtagcacattatgttgattgatttttggatgttgagccatccttgaatttcattaataaatttgacttggtcatggtgtacaagctttttaatgtgctgttgaattcactttgctagtattttgttgaggattttgcatcaatattcaggaatattggcctgtagtttttttttttttttcttgtagtattgttggcttttttactagggtaattctgacctcataatgagtttgatagtgttttttcctcttcattttttggaaaagtttgaggaaaattggtgttaattcttctttaaaggtttggtagaattctccagtgaagccatctgatgctgggcttttctttatcaggagattttttaaattactgattcaatctccttacttgttattgagattttctatttctttgtgattcagccttagtaggttgtgtatttctagaaatgtgcctgtttcatttaggtcatccaacttgttggcatacaactatttatagtactctcttacacattttttatttctgtaaaatcaatagtaatatcccctctttcatttctgattttagttgagtgttccttagtcattctcactaaaggtttgtcaattttgttcatcttttcaaagaacagagtcttgctttcattgattttctctattgtttttctattctttattttgtctatatctgacctaatctttattatttcttccttctgctagttttgttcttctagttccttagggcataaagttaggttgttgacttgagctcttccttcttttttaatgttaagtatttatagctataaatttccctcttaggactgttttcactgtatcttgtaaattttggtatgttgtgttttcatttcatttctcaagatattttctagtttctcttgagatttcttctttgagccattgttgtttaagtatgttgtttaatttccacatatttatgtgttttccagttttccttctgcttttgatttctagtttcatttcattatgattgaaaaaagatattttgtatgatttcaatatttttaaatttattaagacttactttgtgactcaacatatggtctttcctggagaatatgtcatgtgcacttgagaaaaatgtgtattctgctgttgccgggtagagtgttttgtaaatgtcagctagatccaattagtctacagtgttattgatcttctgtttcattgttctataccttatcgaaagtaggatattgaaatcttctctattattatagatctatgtattgctcccttcaattctgtcagtgtttgcttcatatatttaggagcactgatgtttggtgcatatatgtttataattgttatatattctgaattgactgttttatgattgtacaatatcctttgtctcttgtaacttttggggggcttgaagtctattttgtctgatattaatatggctaaacatgttctcttttagttgctatttgcatgaaattttttttctgttctttcactttctacccatgagtgtcctaagtctaccgtgagtctcttatagataacatataattaaatcgtgtttttttagtgcatcctgccaatctgtatcttttgattgaggagtctaatttatttacatttaaagtgattactaatagagaaggacttacttttgccattttattactcatttgctgcttatcttatagctttttttgttcttaatttcctccctcactgattttctttgtgtttgatttttcatagtgacaaattttgattcccttttactttccatttgaaaatattctatagttattttctttgtggttaccatggtattacatataacatcctaaagttataacaatctattttaaactaataccaacttaacttggtattgcatacaacatccttaggttatagcagtctatcttaaactgataccaatttaacttcgatgttgaattattttctattttttagcccttactgtataccagacactacattaagcactccatacttatttcatttgttgttgttgttttgttttgagacagagtcttgctgtgtcacccaggttggagtgcagtggcacaatcttggctcatggcaacatccaccgcccaggctcaagggattcttctgccttggcctctgagtagctgggattacaggtgcccgccaccaaacctggctaatttttgtattttcagcagagatatggtttcaccatgttggccaggctggtctcaaactcctgacctcaagtgattcacctgtctcggcctcccaaagtgttaggattacaggtgtgagccaccatgcccagcccacacttacttcattttaatccttttagtaaccttctgaaatgcaagtattactattggtatccaataaatgaggaaaccaaagcacaaggagatgaattaattaatttaaagtcacatagctaagaagtgacaaagtcaggacttattccaggtctgtcacaccctcccatgttccacccagtactgtgaacagcctgaattatttcttctgcattcaccaaatcaggcatggcagccacatgcctttgttaaagcttgtagctgactagtccccttctttccaaaacataattagtggcttcccgtttttatttgacatttaacataggtatatatgctaacatggaagcacaaaaatggcaacacagggttgagactcgaaagtgtaaacaaatataaaaagttatctgaaatttaatgtggcctacttgtagtagaaatttttctttaaatagttaaaaatgtgttccagtaatgaagcaaaatttgggactgtttattaaagtaatatacatcaaaacattataagttggattgtaggggattgtctaatgaatacatttttttcttctttaatagtctactgccagaaacattaattggaaatatgtgttctattcacttgttgatattttatcgacaaattcttggagatgtgctcctgaaagacaggatgagcttgcaaagtactggtaagtgggctttgccacttccttatgtgcagtaatgcttcatactctgagtaaaggtaacctataccatcttgtatcttctgtttctggttgtgacttttggaataaaatatttagaacagcattgatgttaatacattacttatgggacatcttcagatccaaagcattgagctttgtgaactcgacacatattcagttctttcaaacatatgtattttcacatttcaaattctagagttttgagatcccaagagtcagatatagtcatattttcccttaatgtctctgagtaatctgttttttcccatgtgtttggtatgcacataatcattttgaagagaaaccaaaatcaaccaaaatagctggttcttagtgcatgaagtataagtatcaaatggattagtttaaattggtgaatccagatatggagtatttgggtgtcctatgtactgtctttattcttgcaacttttttgtacgtttgaaatttttaccaagtaaaatgttaaaaaataagtttaaaaatcaatgagtcaccatacatgattgaacctgcaaagataaatgcatgtgttatagtaattgccttcaaaaagaaaagcagtttaattgtattggctcttctttcagttcaataaatcagtaaccagatatgtactgagtacctggtatgtgccagatattatgctaggcccagtgatgaatgagacaggcataggcgtcccaggcctcaaacacataatttcatgaataatcctctccacccttttgaaataagtgctgtgaaggaaaatacacaacgagaacatgcactgggaagacttgattaatgtgtagggtaaggaaaggcttctttgagtgagtaatatttaacaaaagatgtgagagaggaattagacctatgagggaagtgtgtggggaaggattctttctgggtagaggggccagcatgtctgaagacccaaggaaagaagacatgcatgtgttggagggcttgaaattgaggcaggccagtatggatggagcagagtgagtgagaggcttagcacttgtggacaaataacattcataggcaggagtcctctcccagggacttatcacctggatagataggtagaagtggaactcaaaggcagagaagcgcagaaagttctcaaggaatcattataactctaagggggaggacgggtaagccttttaatcaccattgcctttgaattcattttcatgactcttgagaaacttcatgaatgatgtgacctcttaaagaggataaggcttgttagttttcccaataggtaagaagtttactcagaattgttgacttcatttgaatttaatcattagaataaaatatcctaataatatctaaagaatgaatttttctctactgaggacaccagattatagaataccttgcccttgccatttcaaaagtgtctgctatggtttcagtgtgtcccatctaaaattcatgttaccaatgtaatggtattgaaaagtggggcctttgagtggcgattaggccatgagggctgttgccttatgaatgggattagagacccttacagaagggcttgacaagggaattcgtctcacccttttgccttcagccacgtgatggcacagtgttcctcccctctggaggatgttgtaagaaggcccttaccagacaccaaatgccattaccttgatcttggatttcccagcctccagaacttggagaaataattttattttgtttatgttacccagtctcaggtattccactacagcagcgcaaacagactaagacatgtctttcctgatgtgcttctttgcacagatttttcatgtgctgttatctattgtgaaatgtcaatattctccctcactgtgtttggtcatatggccagaatcctcaattcctaattcttccagtttcacctaccactgtctgctggctccagacacaagtttgggtccttccctgagcgctggtggcctggaatcagacctgagcagcaggtcctctgtctcctttccccccaatgcttcctagtttctgctcagtctcccaagagcagggctacctctaaggggaagattccttttaccatgccacagccataaggaagaaagagaagttgaagaaaaacacagaacaaaattttctagtcttattctgttcagagcctccttgcccttactctaaaagctccattaatttggtacaggaactcaccaggatatgggtataggggcaaatgaaggttgaagggacagctttgagctctcctagaagtcaaagtgtgtagaatgtgttatcaacaaatcatttggcacaataattttcatctgaatatttttgtgtctattgcaataaaatccattgagtgaagtttgcataaaattctttctgttgttttgcatttcagatttaattagccatcccatgctggccaccttccccatgctcttggagcagcctgatgtgatggatgctctcagggtgggtagcatgcattgcaatggaaacctgctggcttatggaagcagttatacactctgtgttaatgagttctgtctaggcctttttttttgttactaggatgatgtctcccaatccctatccattgtctaggtaactcagtcctcatctttcccatcttagcataaattcccaagggctgccttccctgacccagggagcaggtggagtgcctgctatgtacactattgcaatctttgcccattttttccttgacttaggatggccactgattgtgtcctaagagcaaaaatccaaaatggtctgtaagataaatcaattgaatttgcaggggagaatcagggcatgcacatcatctttaattccatgtgtgctgtttgctgtctgaaataactgttgagtgttatgttaaatcgtatgaaatctccaattttcagccatttttggcctaagtggcagtttcatatggtttagcctaatacatcagggtcaataagtagaagagctgcatgcatgcaaggcagatacacaggtaacatcacaagtgccatgggggaggtataacccaggaccttgaagatttaaagaaggcagcaaagaaggatccaaattctgtttcactagagaggtcctgcatgagagagcctaataaaggccagggccaagaggattttgacctgctgagatgggggtgaagacgttgcaggtagaaggcttagcatgagcagacgtttgaggcaggaaggaatagagctgacagtccagcttggcatgtcagatgcaagtaagggagtggttggtagatgggcaaggtaagcctgagtctcggtgtggggctgagggcggtggtaggtggtgggtaacccaggaaggtttcttctttaggcaaactctgccaagtgcaaagaggcagaacatgtgcaggagggaggtgagcatattagggggtgactcctgctgataaaaactaggccatatgcacctgacagcagaaacagaaggaggactcagtcatctacaaagattcttattagactttgaaaccaattcatatgctagcttggctgggttggggggtgtcaatagtaataatgacattttcaacagagatgtttaagaaaatgttcatggtacatatgatctcctgtaattttagataagttcgtctggcactatagctagataatgcagaatttctctttcttctcctataaagtcactagtatcataataattattcattacacagaacatatatacactgattcttcaacaaagatttcacaagagcctactatgtattaatataaggcactgtgctggccacaggaatatttccctaggtgtgtaacaggaatctgcaccttgttcttaggaggaaacttaggatccctaatctagtctaaaatctgcatttccctgatgagcagacagcttggagatgtgcagtgacttggccggccatggagctcagccatgacccagccggggctgtccctgcgggtcagctctgggtgcacccagaatgtgccacgggctgcttgaaagcatgagggtaaagttgtgcacatatgttatttagcaaaaagaccccatttgagccataataagtataaatatatatacatttatatacctgcctgtgaaaagatctggaagaatatattccagagaggtattggtgaatatctctggatcttggattattttatctacattttcttaattttttcacattgaattatttgtgttatgataattttaaaaaagaaagtggtggttgtttctacacccatgagccttcttctctccgtggcatagtgtattacttaggagaagcttggctgtgctgtggtggttagcacaggtttatttcttacccatggtatgtatccagcatggatcagtggaagatgctgctccacagtcacccaagggtacaggctggtggagcctctactgtctcacagcaccatctggaacaagtagctgcctctgttgccagtttccctgcagaagagggagaatggagaattgttcttgggctttcactgcctttgcttcaaaggggcctgggccacttctgctcacattgcattggccaaaaccagtcacacggtccatttaacttcaaaggaggtatagtcttctttttgttccagaagaaaggaagtggatcttggtgaggtaatagtgacctttaacacgtttgctattcccaaatgagttactctaagtgaaacatcctactatttgctggtggctgaatgaaaaataaggtgggacattgacatgtaactaacaaaaatagacaaattttaccagacactaagtctacatttgctaagtgatactcacgttaaaccatattattaggttggtgcaagagaactgtggtttttgccataaaagtagtagcaaaaaccacaattacttttgcaccaactgaataaaatttaaaatgtacagcatgtgagcctcctagagtttacttacctagcacagttcagtttgtggatgacattttaataataagaagaatggcacttggcctgtttagtaaaacactctggttctgtaagggtcctcttcaaactcctaaggacccatagcacagcagttaatagggtggaggaccatagtcccctcacgtggtaataggtatgaacattccaaaatgttctcatgagtggcatagtctgttatctcctgctgagaaacgctctatcaatgcatcatttattttatggagaatctctttattggtgccatatgttatgttcatcccagggcctccctgctgagaaaggtctgatgctttcaggttactcatgatatcaggtgccaacaggaggatatctactgacatgcacagaacccagaccctggaacaggcagccgtgagactggtcatattccacccacgcattcagtttgccaggaaatggcacagtgaaagtcttaaattcatacttctgtgggactaattgaactctggggtttttatttatttgaggaaatttctgtgaagccctgtggacagattagaaatatttactcacaaaattgtacttcagtctgtctcattctgaccattgtcatcatcatgacagagagaattgtagaaaagtttggtatttggcagtgttttctattttcattactgtcttacttggaaagcttaatactattttattattcaggtgctgtggttgtatagttttcatggatgtgttagtgtttcgctgattctattcttaagttagttttgatttataattatcatgggcttctacggcatttttcacagatacatctgcctggtcattctggtgctgggtcatttgcaatagattcctaattacagattcacttcttgcttgtatagaatctgtacagcatttttaaccctgtccataagtttatttacagagtaaatttgcataagtgttgcaaggacttgttactacttggactaacataatatttctgtttgctctttagagttcgtgggctggaaaagaaagcacattaaaaagatcagagaaggtaaaatatgagtctccacactgaactccatatttgcagtacctggtgtttgcttgcctattctaatcatgtctcttttttagcaaaagtagccatagtcataatccctcttaaccagggaaactgtttcattatggctgcaaaaacacattccaagagggttacgcatgatcgttagctaatgtgagaaggaatacttgttcaagacagccatttcagattactgagttttatttaaataaaggggaagtttctaagccaaagtctctcagttgtgtatcaaatttcttttatttttaaaaaacttctctagctctcaaagcctgtatcaccaagagaagggaaaaaaaaatggcctgagctgtaccatatattgaaaacaatgcattgctcctgcttaccttgctataaaatcatggtaattaccaatccgaacttgctttaatcggtgagtcgtggtttgactgctctcatccaggatttggcaaatgggaagggctatagatggaaaatcttcttggcttttcaggtcttgtggtctctgtcacactactcagctctggtgttgtaacacaaaagcagccacagacaatatgtaaatgaccaaatgtgactgttttcctataaaactttatttatgaaaagaggtgagagtccacatttggcccacagtccatactttaccagtcctgatctaaagtattcattatctacaaggaaaatgaagtaacaaatgagctgaaaaccctaaaaattaggaaacaatttatacattgtatccttatttcagcctccatttgatcagtaccatctacatacatgtgactttgccaaaactgccaggcttagtgctattctagtacagcagccttgggcctgtagacattgcccttatgtggacatgtgtggtgggatgggtgatatctctgtgtagactctgctgcctgtggacagctctgccctcaacttgctgtgctctctgagattcccaccatggcctgtgggcatcggggcttgacatgggtacagctgatgctgcaccattcttatctgtgaagggtctgacatcctcatcaccaaaggacccctcgacctccatcccaggcattgctggaaataagccaacaactctggatcctatgcagaacacctgctacaattatcttagataacatgacagttacctctgatatgctgtcagtaagtaggttcagctgacttggcattgttttagttatatttacccctaaccacactggtgtcaccaaaattagactgcaataccttgacagaatgtgtgagacaccctccatggagcttaggagacaccctggtctcatggagccacgtagaggctctcagggagaactgctccactgtactctgtgtaactctgctcacttccacttctgaagtgccatgtcctgcctgagcagctggctcagagccgatacctgccaggcactaatggcaccctccatcctacctcttaggtggcttttagttaatagagttcacagaatttaacactttaaaaataacaatgttatttgtgggggtggtgttttcccagagagacaaagagttcctgaagtccacgtttctcctggtttaccatgactgcgtgctcccacttctccactccacacgcctacccccattcaggtgggcagaagaagagactgagactgcacggtggaaagttatcactgacttccttaagcaaaaccaagaaaaccagggcgccctccaagctctgctgtcaccagacggagttcatgaaccttttgacctttcagagcagacctatgacttcttgggtgaaatgagaaagaatgcagtgtgacagtggcagcctctagccctcagcttcccacggaatcagatggatcctccacgattacgtgaataaaatgatggaaccaaaaa

SEQ ID NO: 15701 - DNA, 81657 bp, Homo sapiens
aatcagagcaccgcagccagggagatgctggcgagacgacagcgagatcctctccaggccctgcggcgccgcaatcaggagctgaagcaacaggtatggtcaggctgtgcagagggccctggggcgggcgacaggcggacgcagctgcgcgcactgcgccttcccaccgtgaccccacctaatcctgggagcttgcccccaacctacttaccttcccaggttgtaacgcccccttaccccataacattccagcacccaaccccgattcaaacccctcctgatcccaactcaacccccagccaaaggcgaaacctcccaaaattcgtgaccatcaactaagcgccccctcctccgaccctcactcccacctaacgtctcaacctcctaccctaacaactcactaacccaccttatctcccaatctaaacttagtggtgtaaccatttccaacccaactctgagcctagctcctctcctccactttccaagcccatttcctttcagccttcctcaagtggagattattattgcctccgtgaactcaagcgaaataggtgtcaagaaatagtcttaatatgcaagaacattaagatctgataaatgagcaaaggaggtgaacgagagaggaaatacaagtaactcataaacatacgaggaatgttaacttcaaagatactcaagtaattgcaaagcacataaggtatcacaaaaatgttaaaaatcacaacactctgtcttgaggaaggtgtgatgaagcaggcacattcactgctcccgtgtataaggtgcttgtacagcatttcaggaaagcagcttgacaaggtgtaacatatgtgtatgcacctaggctcaaaaattacatttccagggatctgctatgtgtaataattagaaagtaggacagagattgatgtataaaagtattcatcacattgttacttatataatatacacagaacagcatagaagggaacaggctaatatggtatttctgtgtgacaggatgctgatgattattatgattttctttattctttttcatatttataaaaatttttaggccaggtgtggtggctcatgctagtagtaccagctacttgggaggctgagacaggaggatcacctgagcccaggagttcgagactagcctgggcaacataacaagacttggtctcaaaaaaaaaaaaactttttaaaaatacactgagttcttattaaaaataagaaaaaagtaaatagcaaccagtgggtttattttctgacattttaatttcactttaatttttttcatgtgatctattaccaagtatttttccactgagtaaaattattttataatctgaggccggtaagagattcactgatgctcatattttatccatttttgttctcttgtttaaagtaaaaaggatttggaaggtaaatatttaggtgactgtgtattggaatcacagtggtgcaacaaaagctaaatactcttctggtagaaataaaaaataaaacttgatggggcattgacttatgctgaacttcggtggatcttaatatggttctgtgtcttattttaaaatttcaacttttattttagattcagggggtacatgtgcaggtctgtcacatgggaacactgtgttatgctgaggtttggggtacagatgagcctatcacacaagcagtgagcacagtacccaataggcagtctttcagtcttcattcctcttccctcccccaccccactccagcagtcaccagtgtccattgctcccatctttatgtccatgtgtactcaacgagtgagaacatatggtatttggttttctgttcctatgctaattcacttaggacaatggcctccagctccatccatgttgctgcaaaggacatgatttcattcttttttatggttgcatattttttcatggtgtatatgtaccacattttctttatccagtccaccattggtgggcatctatgttgattccatgtctttgctattgtgaatagtgctgtagggaacatacacatgcatgtgacattttggtagaatcatttcttttttgggggtatatacacggaaatgggatttctgggtcaaatgatagttctgttttacgttgtttgggaaatctccaaactgctttccacagtggctgaactaattttcatgcccaccaacagtgtatatgtgtactcttttcttgtcagcctcaccagaatctgtcatttcttgattttttaataatagccattttgaccagtgtgagatggtacctcattgtagttttaatttgcatttctctgatgattagtcatgatgagttaattttaaatttagtgggacattaggagaaccaggaaaagttttagaaggaaactataaaaatgattattaaaacaaactattagaaagattattctccctggagaaatattggctctggagccttttgataccttgactatctggaaagtttgttttgatagtattagctaattcttccctgtcttcacagaggacacctgaagctgaatatggaacagattttctattcggtgtctgtaggacaagtaatcaacagcccctctgagtcaggcctgtgatgactggctctatcactaggtgtgtgaattttgtaaataacactcagatggatgccaaattgcaagagtagagaagaaactaatggaattttctcttttttcatccactttatcttctctacgtaatctatagaaaacagaccaaagaagtatgtgcctttttggagagtatattgacaaagttacatatagtgttagtaaacaaactactaagtcaagagaaacaaagtcatgatacattcaatacaatggataccactcagtaatgagaaggaatgaactaatggtacacacaacaatatggaagtatctcaaaaacatgctttgtggaaaggttacacaagagtgcttactgtatgagtccatttatataaaatttcaagaacaggcaaaactaatttatgttggaaaaatatcaaaacaggtttgtctgtggaggaataaggaggggatttactggcaagggcatgagggaacttactagggtgatggtagttttctacatcttgataagaattttggttacacagatgtatgcatttgtcgaaactcagcaaatgtatgcctcgtatttgtgcatttcactatatacatattttacatcaactattgaactttagttagtgacatccatagtccattatttagggagaaatgtattgataactgcaacttactttgaaaggcataaggtgggttgacggatagatcaaataagtatagtataatgttaatgttttttctaggtagcgggtatatgggttttcactgtaaaatttttaaaactttgttgtatgtttaaaagtgttcattataaaatattggataaaaaaagaagttttctttcctaaggcgatatggtatttaataatgtgatattttaaatggtctccataggttgatagtttgctttctgagagccaactgaaagaagctctagaacccaataaaagacaacatatttatcaaaggtaaagtatgctaaattatataagctttacaggaaccgcacttacatttcaatgcatagtatttaaggcatagagattggtcctttggaatcaaatggaagaatcacatagtgttgtaagttgaatgtagaagaaaccaacctaaacctgatggttgcggacttgctgttgtgacagcaactataaaaactgcttaatgtaaacataggtgacatgggcaggattaccctaaatccttagcctatgtagcccagatcctgtgacctggtcagaaacctctgtctataagcaattagtacttcattgggatgtcaactttaactcccatgagaagacaacactgttttctaggtgggtgttttttgttttgtatttgtttttacttaaaaaaaaatccttgggagagtttaaatagacgtgatgaactacatcaaatttagactattaattcataacatttgtattaagtttaggacatcattaagataatctttgtttttgagatatttaaggattttattacattccaaagaacatgagattcattctattaatttaagtgaattgtaattgtttggagaagttttacttaagtcaggcattcagagtgcttaaaggcaaaacaaatgaattttgaaatgtcaaatgaatttaatttataatagtaggattgattaagggatttagttcaagctgaattaacagtaatgaaagaaaagcaaaggttattgttcttgctttactagatttaaaaacagagtaagatttatagactgaatttgaaggccaagggaaaactacgtttttaaattttatgttagtaaactaaaaatcataattattattattttattttttgagactaaatctcactctgtcacccaggctggagtgcagtggcgcaatctcggctcattgcaacctgcacctcccaggttcaagcgattcttctgcctcaggctcttgagtagttgggattacagtcgtgccccaccacacctggctggattttgtattttgagtagagatgggtttcatcacgttggccaggctggtttcgaactcctgacctcaagggatcccccagccttggcctcccaaagtgctgggattataggtgtgagccactgtgcccagcctaataattgttatgttttattttttttgagatagagtctctctctgtcgcccaggctggagtgcagtggcatgatctcggctcactgcaagctccacctcccaggttcaagcgattctcctgcctcagcctcccgagtagctgggattacaggtgcccgccaccatgcctggctaattttttgtatttttagtagagatggggtttcaccgtgctagccaggatggtctcaatctcctgacctcatgccccctgctttggcctcccaaagtgctgggattataggcgtgagccaccgcgcccggcccctaataattatttttaagcccaagtaaccatagtcttctctgtgcatgaaaagaagattgttactgtcatttaaaaactcactttgacatttgcatatctgaaaatgtcatttaggtatcatttttatctgctcagtgctctgagtcttttcagtttgaaaactcatgtctcatgagctctgggagattttattttacaaaaagattatttcgttaattccatttgtctgtttcttcctgaaacacctttgagtcaggtattggatatcctggactgatcctctatatcccataacttcctgttaatagtttctgtttctttgtttgtatgggagatgtttttttggggggatgtggggggtctcactctgtcgttcaggctgtaatgaagtggcacaatcatggctcactgcaccttctgcctcccaggctcaagggatgcccccctcccccgccacgagctaccatgctagcaattctcttgactttaacacttttctttattacctatttcaacagccatattgttttatttcagcagtcatattggtttttttttttttaagatggagtctcactctgtcatgatcttggctcactgcaacctctgcctcctgggttcaagcgattctcctgccttagccttctgagtagctgggattacaggctcacgccatcacactcggctaattttttgtatttttagtagagacggagtttcaccatgttggccaggctgctctcaaactcccgacttcaggtgatccacccatcatggcctcccaaagtgctgggattacgtgagccaccgtgcctggccatcatcagtcatgttgttaatttacaagtgttttctcttgttctcgaattgttcttttttcatagcatcatgttcctgttttcatattgattgccttcttactacttccatgactaggaggctttttttttctccttaagttctcttctgttctctgaattgtctttgctttctctgggctcagattccttttaattagttaattaattaatttatatttggttattcttaaattttatcttcacgttgccggttttctttattaggtctggcttatctatttttattgaacaatgagggactaggttgattattccagagagctctcatgggcttttctactgttagatagagaggggtccttcctgctagtaccatcccctgaataagaatgaaattttgtatgttgatagggcttatcagaggctcggaagtagcttttagtctgaggatcccccagtgccagaatagggccggctctaaccctggtgtatgggaaacttctttagcagtcatgattctcttcaggtcgtttgttaattgtttttgtttgtttttttgtttttagggaagaatcccctggtaaggagggagagcagagaggggaaaagggagctaactggctcaggttttctgtaaatagacttttaaaagaaagaaccccaactaaatctaaacgtaatcagtatcattaatcttcccttgactaatataaagaccttagattgctttaacattgatttccctcctcaaagcttagatgtatgcatatgatttaatttacacaatataacacaataatattagataatttataaagtaaaccccagccactgtgcatgtcttttcatcagcagaatttcataatgtgtccctctatgatttagtttagttaacctttggtcctttatgtctgctgactcaagtcctagagttttcggcctggcagattatctccctcttatgcttgtgttgcgtcttccaccctttataggagaacatgcttccagcctttttccatggagcagaaatttgttgaaatctcttgctggctagttgtccttctttccttctttgcagtgttcagagtttgttaccttttcaaacgttttaatcattttttgtggggtttcaggagccagtgaagatgaatgtgtgcttagtttttatcctgaaccaggagtcttaaaatatcaactgtttgaggattttaataattacatagttataaaggaggtaattgtaataagtaatttattttcttggtacattatattaaaatagttttccactctgggctttaagcgaaatttctgagtctaagtttcagtagagatttttttggtcaagtaacatgacacctgccaaaataagcggctttactgtcagtctcatttgacaaaagcctgcagctaggttctctcagggtggattcatggcttgtgatatcctcaaagaccagcctttgatgtcattccactctgccatcctttgcttgttggtgatgtctctcctcatggttacaaagtccataccctcagtatctaagagcagatgtaggagagattcttttcatgcctggtaagggaggataaaatgggaggcaatcccaatatacgtgttttatgttacactggcagccgtgggccccctgctcaccctgcctgcagtggaggctgagaacataggtgccagtgggaagctgactgccagcaaagaggaagggtgggaaaggggcttttggggaggttgctagtagggtcagccccagtttgatgtttccccttctcttttgctacccttttgacaaaggacttttgttccctttaaaacgttttttatttattactgttttttatttttttctttaagttcagggatacatgtatggcattgtgcaggtttgttacataggtaaacgtgtgccatactggtttactggacagatcatcccatcacctaggtattaagccctgcatccattaattattcttcctgatgctctccctcctctaatacctccttcctacaggccccagtgtatgttgttaccctccttgtgtccatgtgttctcatcattcagctcccacttataagtgagaacatgcggagtttggttttctgttcctgcattagtttgctgaggataatgacttccaactgtaaccatgtccctccaaaggacatgattttgttcctttttatggctgcacagtattctatgagaacatgcagtgtttggttttctgtccttgtgataatttgctcagtatgatggtttccagcttcatccatgtcccttcaaaggacatgaactcatcattttttatggctgcatagtattccatggtgtatatgtgccacattttcttaatccagtctatcattgttggacatttgggttggttccaagtctttgctattgtgaatagtgccacaataaacatatgtgtgcatgggtctttatagcagcatgatttataatcctttgggtatatacccagtaatgggacagttgggtcaaatggtatttctagttctagattcctgaggaatcgccacactgacttccacaatggttgaactagtttacagtcccaccaacagtgtaaaagtttcctatttctccacatcctctccagcacttgttgtttcctgactttttaatgatcgccattctaactggtgtgagatggtatctcattgtggttttgatttgcatttccctgatggccagtgatgatgagcattttttcatgtgttttttggctgcataaatgtcttcttttgagaagtgtctgttcatatcctttgcccactttttgatggcgtcgtttgtttttttcttgtaaatttgtttgagttcattgtagattctgtatattagccctttgtcagatgagtagattgcaacaattttctcccattctgtaggttgcctgttcactctgatggtagtttcttttgctgtgcagaagctctttagtttaattagatcccatttgtcaattttggcttttgttgccattgcttttggtgttttagacatgacgtccttgcccatgcctatgtcctgaatggtaatgcctaggttttcttctagggtttttatggttttaggtccaacatttaagtctttaatccatcttgaattaatttttgtataaggtgtaaggaaggcatccagtttcaactttctacatatggctagccggttttcccagcaccatttattaaatagggaatcatttccccatttcttgtttttgtcaggtttgtcaaagatcagatagttgcagatatatggcattatttctgagggctctgttctattccataggtctatatctctgttttggtaccagtaccatgctgttttggttactgtagccttgtagtacagtttgaagttaggtagcgtgatgcctccagctttgttcttttggcttaggattgacttggtaatgtgggctcttttttggttccatatgaacttaaagtagttttttccaattctgtaaagaaagtcattggtagcttgatggggatggcattgaatctataaattaccttgggcagtatggtcattttcacgatattgatacttcctacccatgagcatggaatgttcttccatttgtttgtatcctcttttatttcattgagcagtggtttgtagttctccttgaagaggaccttcacatcccttgtaagttggatttctaggtattttattctctttgtagcaattgtgaatgggagttcagtcatgatttggctctctgtctgttattggtatataagaatgcttgtgatttttgcacattgactttgtatcctgagactttgctgaagttgcctatcagcttaaggagattataggctgagacgatggggttttctagatatacaatcatgtcatctgcaaacagggacaatttgacttcctcttttcctaattgaataccctttatttccttctcctgcctgattgccctggccagaacttccaacactatgttgaataggagtggtgagagagggcatccctgtcttgtgccagttttcaaagggaatgcttccagtttttgcccattcagtatgatattggctgtgggtttgtcttagatagctgttattattttgagatacgtcccatcaatacctaatttcttgagagtttttagcataaagggttgttaaattttgtcaaaggccttttctgcatctattgagataatcatgtggtttttgtcgttggttctgtttatatgctggattacgtttattgacttgcgtatgttgaaccagccttgcatcccagggatgaagcccacttgatcatggtggataggctttttgatgtgctgctggatttggtttgccagtattttattgaggatttttgcatcgaggttcatcagggatactggtctaaaattctctttttttgttgtgtctctgccaggctttggtatcaggatgatgctggcatcataaaatgagttagggaggattccctctttttctattgattggaatagtttcagaaggaatggtaccagctcctccttgtacctctggtagaatttggctgtgaatccatctggtcctggactttttttggttggtaagctattaattattgcctcaatttcagagcctgttattggtctattcagagattcagcttcttcctggtttagtcttgggagggtgtatttgtcgaggaatttatccatttcttctagattttctagtttatttgcatagaggtgtttatagtattctctgatggtagttggtatttctgtgggatcggtggtgatatcccctttatcattttttattgcatctatttgattcttctctcttttcttctttattagtcttgctagcggtttatcaattttgttgatcttttcaaaaaaccagctcctggattcattaattttttgaagggtttttttgtctctatctccttcagttctgctctgatcttagttatttcttgccttctgctagcttttgaatgtgtttgctcttggttctccagttcttttaattgtgatattagggtgtcaattttatttctttcctgctttctcttgtgggcatttagtgctataaatttccctctacacacagctttaaatgtgtcccagagattctggtatgttgtggctttgttctcgttggtttcaaagaacatctttatttctgccttcatttcgttatgtatccagtagtcattccggagcaggttgttcagtttccatgtggtttagtggttttgagtgagtttcttaatcctcagttctagtttgattgcactttggtctgagagacagtttgttataatttctgttcttttacatttgctgaggagtgctttacttccaactatgtggtcaattttggaataggtgtggtgtggtgctgagaataatgtatattctgttgatttgggttggagagttctgtagatgtctattaggtccacttggtgcagagctgagttcaattcctggatatcctcattaactttctgtcccgttgatctgtctaatgttgacagtggggtgttaaagtctcccattattattatgtgggagtctaagtctctttctaggtctctaaggacttgctttatgaatctgggtgctcctgtattgggtgcatatatatttaggatagttacctcttcttgttgaattgatccctttaccattatgtaatggccttctttgtctcttttgatctttgttggtttaaagtctgttttatcagagactaggattgcaacccctgcctttttttgttttccatttgcttggtagatcttcctccatccctttattttgagcctatgtgtgtctctgtacatgagatgggtttcctgaatacaacacactgatgggccttgactctttatccaattttccaatctgtgtcttttaattggagcatttagcccatttacatttaaggttaatattgtcatgtgtgaatttgatcctgtcattatgatgttagctggttattttgctcattagttgatgcagtttcttcctagcctcgatggtcttcacaatctggcatgtttttgcagtggctggtaccagttgttcctttccatgtttagtgcttccttcaggagctcttttagggcaggcctggtggtgacaaaatctctcagcatctgcttgtctgtaaaggattttatttctccttcacttatgaagcttagtttggctggatatgaaattcggggttgaaaattcttttctttaagaagttgaatattggccgccattctcttctggcttgtagagtttctgctgagaggtcagctgttagtctgatgggcttccctttgtgggtaacccgagctttctctctggctgcccttaacattttttccttcatttcaactttcgtgaatctgacaattatgtgtcttggagttgctcttctcgaggagtatctttgtggcgttttctgtatttcctgaatttgaatgttggcctgccttgctagattggggaagttctcctggataatatcttgcagagtgttttccaacttggttcaattctccccatcactttcaggtacaccaatcagatgtagatttgatcttttcacatagtcccatatttcttggaggctttgtttgtttctttttattcttttttctctaaacttctctgtttgctttatttcattcatttgatcttccatcactgataccctttcttccagttgatcgaatcagctactgaagcttgtgcattcgtcacgtagttcttgtgccatggttttcagctccatcaggtcctttaaggacttctctgcattggttattctagttagccattcgtctaatcttttttcaaggtttttaacttgttttccacgggttcgaacttcctcctttagctcggagaagtttgatcatctgaagccttcttctctcaactcatgaaagtcattctccgtccagctttgttctgttgctggtgaggagctgcaatcctttgaaggaggagaggcgctctgatttttagaattttcagtttttctgctctgttttttccccatctctgtggttttatctacctttggtctttgatgatggtgatgtacagatggggttttggtgtggatgtcctttctgtttgttagttttccttctaacagtcaggaccctcagctgcaggtctgttggagtttgccggaggtccactccagacgctgtttgcctgggtatcagcagcagaggctgcagaacagcgaatattggtgaacagcaaatgttgctgcctgatcattcctctggaagttttgtctcagaggagtacccggctgtatgaggtgtcagtctgcccctactggggggtgcctcccagttaggctacttgggggtcagggacccacttgaggaggcagtctgtccgttctcagatgtcaagctgcatgctgggagaaccactactgtcttccaagctgtcagacagggacatttaagtctgcagaggtttctgctgccttttgtttggctatgccctgtccccagaggtggactctaaagaggcaggcaggcctccttgagctgcggtgggctccacccagtttgagcttccaggctgctttgtttacctactcaagcctcggcaatggctaacaaacagcctcgctgctgccttgcagtttgatctcagactgctgtgctagcaattagcgaggctctctgggcgtaggaccctctgagccatgtgcgcgatgtaatctcctggtgtgccgtttgctaagactgtgggaaaagcgcagtattagggtgggggtgacccgattttccaggtgctgtctgtcatccctttccttggctaggaaagggaattcccttgtcccttgtgcttcccgggtgaggcaatgcctcgccctgcttcagctcatgctcggtgtgctgcacccactttcctgcacccactgtctgatagtccctagtgagatgaacccagtacctcagttggaaatgcagaaatcattcatcttctgcgtcactcactctgggagctgtagactggagttgttcgtatttggccatcttggaaccgccccaagtgttcctttttctctgcaattttgccaacatctgtttttttgactttttaataatcaccgttctgactggcatgagatggtacttcactgtgctgaatgtgtgtcttttgagaagtgtcacttcatgtccttttgctcactttttaatggggtttttttttcttataaatttgcttatttttagactctggatattagacattcatcagatggatagattgtaaacattttcccccattctgtaggttgtctgttcattctgatgatagtgagaggtgacagcatgctggcagtcctcacagccctcgctcactcttggcgcctcctctgcctgggctcccactttggcggcacttgaggagcccttcagcctgccgctgccctgtgggagcccctttctgggctggccaaggccggagccagctccctcagcttgcgaggaggtgtggagggagaggcgcgggtgggaaccgggcctgcacacggtgcttgtgggccagcgtgagttccgggtgggcgtgggctccgtggactctgcacttggagcggccagccagccagccccaccggccctgggcagtgaggggcttagcacctgggccagcagctgctgtgctcaatttctcacccggccttagctgccttcccgcggggcagggctcgggaccttcagcccgccatgcctgagcctccccgccctctgtgggctcctgtgcggcccgagcctccctgacaagtgccaccccctgctccacagtgcccagtcccatcgaccacccaagggctgaggagtgcgggcgcacggtgtgggactggcaggcagctccacctgcagccctggtgcgggatctgctgggtgaagccagctgggctcctgagtctggtggggatgtggagaacctttatgtctagctaagggattgtaaatacaccaatcagcactctgtatctagctcaaggtttgtaaacacaccaatcagccccctgtgtctagctcagtgtttgtgaatgcaccaattgacactctgtatctagctactctggtggagccttggagaacctttatgtctagctcagggattgtaaacacaccaatcggcactctgtatctagctcaaggtttgtaaacacaccaatcagcaccctgtgtctaactcagggtttgtgaatgcacccatcgacactctatatctaactactctggtggggacttggagaacctttgtgtggacactctttatctagctaatctagtggggacctggagaacctttgtgtctagctcagggattgtaaacgcaccagtcagcaacctgtcagaacagactactcggctctctgtaaaatggaccaatcagcaggatgtaggtggggccagataaaagaataaaagcaggctgccggagccagcaatggcaacccgcttgggtccccttccacactgtggaagctttgttctttcgctgtttgcaataaatcttgctactgctcactctttgggtccacactgcctttatgagctgtaacactcaccgcgaaggtctgcagcttcactcctgaagtcagcgagaccatgagcccactgggaggaatgaacaactccagacgtgccgccttaagagctgtaacactcaccgtgaaggtctgcagcttcactcctgagccagcgagaccacgaacccaccagaaggaagaaactccaaacacatccgaacgtcagaaggaacaaactctggacacgccgcctttaagaactataacactcactgcgagggtccacggcttcattcttgaagtcagtgagaccaagaacccaccaattctggacacaatagtttcttttgctgtgcaaaagttctttagtttgatgagatcctatttgtcaagttttgcttttgttgcaattgcttttggctttttgttgtcatgaaatatttgcctgtgcctatgtcctgaatgctattgcttggattttcttctagagtttttatagttttgggttttacatttaagtctttaatctatcttgaattaatttttgtatatggtgtatggaaggggttctagtttcaattttctgcgtatagctagccagctcttccagcatcatttattaaatagggggccctttccgcattgcttgtttttgtcaggtttgtcaaagatcagatggttgtaggtgtgcaagtcttatttctgagttctctattctgttccattggcctatgtgtctgttcttttaccagtaccatgctgttttagttactgtagccttgtaatatagtttgaagttaggtggtgtgatgcctccagctttgttctttttgcttatttgggctcttcttttgttccatataaattttaaaatagctttttctaattctgtgaagaatgtcaatggaagtttgatgggaatagcattgaatctatacattatttggggcagtatgtccattttcacgatatgattcttcctatccacaagcatggaatgtttctccatttttttgtgtcacctctgatttctggagcagtgtttgtagttatccttgagaaggtccctctcactttctttgttagctgtattcctaggtattttattctttttgtagcagttgtgaatgtgagttcaggatttagctctctgcctgcctgttgttggtatataggaatgctagcaatttttgcacattgattttgtatcctgagactttgctgaggttgcttatcagcttaagaagtttctgggccaagacaatgggttttctagatataggatcatgtcatctgcaaacagggataatttgagttcctctcttcctatttgaatactccttatttctttctcttgcctgacttcccaggccagaacttccaacactgcattgaataggagcaatgagggagggcatccttgtcttgtgcctgttttcaaagggaatgcttcaagcatttgcccattcagtatgatattggctgtcggtttgtcatatatggctctgattattttgaggtatattccttcaatatctagtttattgaaatttcttaacatgaaaagatgttgaattttattgaaagccttttctgcatttattgagatagtcatttttttttgtcttaagttctgtttatgtgatgaatcacatttattaatttgtatatgttgaaccaaactttcatcctggggatgaagccaacttgatcatggtagataagctttttgatgtgctgctggattcggtttgccagtattttgttgcggatttttgtatcgatgttcatgaaggatattggctttaagttttctgtttttgctgtatctctcccaggttttggtatcgggaggatgctggatacaatcagttagggaggagtccctccttttcagttgtttggaataatttcagtagaaatggttcccactcttctttttacctttggtagaattcagctgtgaattcatctggtcctgggagtgttttggttggtaagctatttggtaaagctgcctcaattttagaactcattattgatctgttcagggattcaatttcttcctggttcagtcttgggagggtgtatgtgtccaagaactcatccatttcttctagattttctagttcatgtgcatagaggtgtttatagtattctctgctgattgtttgtatttctgtggggtcagtggtgatatcccccttataatttctgattgtgtttatttgattcttctctcttttctttattagtctagctagtggtgtatctattttattaatttttttcaaaaaaccagctcctgaatttgttctttgtagggtttttcatgtctctatctccttcagttcagctctgatcttggttatttcttgtcttctgctagctttagggtttgtttgctcttggttctctagttcttttagttgagatgttaggttgttaacttgagatctttctagctttttgatgtgggcatttagtgatataaattttcctctgaacactgctttagctgcatttcagagattctgatacgttgtctctttgttctcattagtttcaaagaacttcttgatttctgctttaatttcattatttacctgagtcattcagggacaggtggttattttccttgtagttgtgtgattttgactggatttctttctttctttctttcttttttttaaatgtgtctatcagaatgactttatttcagtacactgagccccatcaggcagtgtggtttgtgcaaggctgtgcgagggacaggcttgggctaagagaagggaggtgagttgttaagtgcactgcagtctgtggggtgctacatcgctttcacacacacctgctcctttggcccatacctggcaggggcctttggtcataggacagcatgggggagactactgcatggagtctgggattggggtgggtcatggtgtcacaggtgagggtgccggtgaagacaggctggccccagctttgcaccacctgggctaaaggcctttggactactcctaggagtcaggcctggctccattagctcctggcactctggtctggccctctccctccttaaccaagcaggtccaaggtcaagagtggcccaagatcagccaagagggggccatcccacctctacagcttagttgcctggtcagctatagtggcaaaaggcaacatggttaattgcagctttctccagtcctaaggacactggctctccaacaccccttccttgtttaggggcctctgccaaagaaaaattctacctcctgtttcagaaaatctaaccagcaaccagcctgttgattctatggcagtgagcaagagaaagagggagaaagaggctggtgggagtgtctttgagtatagctaccaatttcaaatggtcctgcaacctgtggacactgtccgcttaccatcagcagggagaggcggggccctggaggctaggctaagcttaggtgctataaacattagtgtggcagggcaggaggcagtgagctccctctctccatccccttactgaacaaacacttcaataaataaaactgtttgaagatggcattgcaacaagaacggatggaaagcaaggacctggaatcagcaggcaccttaaactctcccaaggcccctggaaggggaatgggctgggaacattatctctgcagccattcagggggagtactactcctgccctcctccagtggctggtgtggtcctgttccctggtgaacatgagggcttcctgctccctcctgactttccagtctctgtattagctcttgggatgcttttctagcctcccaaaccaaaatggcaacaaaaccagacagaggtcaaccccagccccagtcctcagtgcccagtcagggggcattgatagcggagtgaccagcaaggggaggcagcagctgcctgggtcctcagggcaccctggtgggtgggagtgagggtggggccagtccagcctaggatgggcagcagcaaggtctcccagggggtggtttatctccctctgtctccccgtggtagtaaacggagttccctgcagccagtcagaggcccacctgaggagggagtgcagcctctgccagtgttcttccctgtcaggagccagttaatggtcacccccaggcctcaggccatcaccatcgtgggtagttcctcatcctttctggacctggggtccctgggccacatggcacttgcatgtgctcacacacttgtatacacacatgcactcacacacacaggcaattcctcacaaacactctgactcaacaaagcgagttttaaagtggagttaacttcagagagaggtgaagatgatatcccaacattagaaggttttcctgtggatagatcaggcaccgtcttcctcatattccttcttggagacccacatcttcttaaaggtgtcatggaggcaaggatagagccctcaatccacgtggaatacagtctctcctgaggtgcaaatatcctgatcttcacttcactcagtagcctgtcaccaaaacctttgaacaaggtagagcctcccaagaggacgatgttggagaaaagtgtgaactgcaggtccatgtctgacttctggatggcgaacaccaggaccttgtggatgccttcactctcctccctgatcaagtctggcctgaagagcagctcaggggcccggaattgggaaggaccaatctcaatggtgctgccatcaggcaggtagtactgagccttctctgtctctagtgtctcttccttctgggggtttatggataggtaggagggtctttcttttatggccttgacaatctcaaactcaaaggatgagtggaaatctcaaacgatgagtggaaatcatagccctccttatgcaggtagaggtgcaggaagcgagagatgttccagcttgcgatgtcaattcgcatgatggagtggggcatggcaaagccctgatagatgggcacagcatgggtgatgccatccccagaatccagcaccacccccgtggtcctgcctgtggcataaaggctgagcacagcttacatggagatgaaaatagcaggcacattgaagctcttgaagaaaacgttggcagctcattcctggtgtctttgtgggtttaaaggtgcctcagtgaggagcacgagatgctcctctgagaaagtctgcagctggtccttagaatagacatattgccagatgtgttccatgtcgttccagtccttgacaatgccatgctccgtgagatagcagattgagagcagcccttggtgctccttggctttgaagccaatgaagatgtcaccttcaagggctcctgccatgatacgaatatgcatgggtaggcccacatactttggaaagcagtatttgtggatctgatcaccagcaaaaccagctttaatcacaccagattcattgtcgatcatgacaggctggttggtgattgtatcgtaagactccacggcagaggaatctctcctggggaaggaactaccagttgggtctgccgctagtgccattcatgaatttcttaatcttgagttctaatttgattgcattttggtctgtttgttataatttcagttctttttcatttgctgaggaatattttatttccgattacttgatcaattttagagtaagtgccttgtggtgatgagtagaatgcatattttgttgtttttgggtggagagttctgtagatatctattaggttcacttgatccagagctgagttcaggtcctgaatatctttatcaattttctgtgtggatgacctgcctaatattgtcagtggggtattaaagtctcccactattattgtatgggagtccaagtcactttgaaaatcataagaacttgctgtatgaatctgggttgccgagaccagctcggtcatggagaccctaacccagcggcgctagaggaattaaagacacacacacagaaatatagtgtgtggagtgggaaatcaggggtctcacagctttcagagctgagagcattgaacagagatttacccacatatttattgacagcaagccagtgataagtattgtttctatagattatagatttactaaaagtattccttacgggaaataaagggatgggccgaaataaaggggaggttctggctagttatctgcaacaggaacatgtccttaaggcacagatcgctcatgctattgtttgtggttcaggaatgcctttaagcagttttccgccctgggtgggccaggtgttcctttccctcattctggtaaacccacaaccttcaccatgggcatcatggccatcatgaacatgtcacagtgctgcagagattttgtttatggccagttttggggccagtttatggccagatttcggggtctcttcccaacatgggtgctctttttttgggtgcatatgtatttaggatagctcttcttgttgaattgaaccttttaccattgtgtaatgcccttctttgtcttttttttatctttattggcttaaagtctgttttgtcagaagctagaattgcaacccctgcttttttctgttttccatttgcttggtaaattttcctccatccctttattttgaacctatgtgtgtctttgcaaatgacgtggatctcttgaagacagcataccgatggatcttgactctttatccagcttgccattctgtgtctttttaattggggcatttaacccacttacatttaaggttagtattgttttgtgtgagtttgatcctatcatcattattctagctggttattttgcagatttgtttatgtggttgcttcatagtgtcactggtctgtgtacttcagtgtgtttttatagtgggtggtatcaatttctcctttccgtatttagtccttccttcaggagctcttgcagggcaggcctggtggtgacaaattccctaagcatttgcttggtctgaaaaggatcttatttctccttcatgtatgaagcttagtttggccggatttgaaattctgggttggaaatttcttttctttaagaatgatgaatattggtccccagtctctgctggcttatagggtttgggtttccactgagaggtatgctgttagtctgatgagcttccttttgtaggtgagctggcctttctctctggctgcctttaacttttttttttttcattttgaccttgaagaatcatgattatgtgtgttggggttgatcttctcatggagtaccttactggggttctctggatttcctgaatttgaatgttggcttgtcttgctaggttgggggaattcttctgtatgatattctaaagtatgtttttcaacgtggttccatttttcctgtcttttttaggtaccccaataagtcacgggtttggtctgtatacataatcccatatttctctaaggttttgttcattcattttcattcttttttccctattcttgtccgcctgtcttaattcagaaacataatcttcaagctctgagattctttcctctgccttgtctattctgctattgatacttgtgattgcattataaagttcttgtgtttttcacctctatcaggtcagttatgttcctctcttaattggctgttctggctatcagctcctgtattggtttatcatgattcttagcttctttgcagtgggtttcaacatactcctttaactcaacaaagttttttattacccactttctgaagcctccttctgtaagttcagccatctcagcatcatcccacttctgtgcccttgctggagtggtgttgtggtcatttggagcagaagaggcactctggctttttgagttttcagcattttgtgtcaattatttctcatctttgtgggcttatttgcctttgatctttgaggttgctgacctttaaataggatttttgttgagtttttattgttgatgttgttgttgttgttttctgtttgtttttcttttaacagtcaggacactctactgtagtgttgctgtggtttgctgtaccccagaccctaattgcctcagtttttcccatacctggaagtatcaccagtgaaggctgcaaaacagcaaatatggcagccagctccttcctctggaagctctgtcccaggagagtactgatttgttgccagcccaaacgcactttgtaggaggtggctggaaaccccttttgggaggtctcacccagtcaggtggaatgggattacagacccacttaaagaagcagtctggctgctttttggtagagcacatatgatacattaggaggggactctttcttctggaccatttgtattctccaaagccagcaggctagaatggctaagtctactgaaccccagagatagcagccacccctgccccggtaacttggaactgcctcagaaagattccagactgctttggttggctggctggaattccaagccagtgggtcttaacttgtgagttgccatggaagtgggggccatggaagtggggcccacggaacaatgctgcttggctccctggattcagctccctttctagggatatatacagatggatatccccccttgctggggatcttggggccagagtatataaaattcctgggtcactgtatgtgcctgagcagctgctctgctgagacaccacacagttctgtgtattggacccaaggccctggtggcatgaactcaggagatctcctgatctgtgggttgcagagatccgtgggagaaacatggttttctgggcagggttgcatggtcactcaccacttctcttggttggggatgggggttcctttggctgcatgccactcccaggttggctcttgttccccttgttccctggcttttctacattctcatgggtcaaggtgtttgccttgtcagtctcaatgtgagaacctggatatttcagtttaaagtgctgaattcacttgcccttcttcattcctctcagtgagtgccatagaccacagctgcttctaattggccatcttggatcaacgttgttattccctttttcactgcttatttcatttcactcacatctataagcaaaaaaaaaaaaaaaaaaaaaaagactcaaacggcataaaaaagtgacttttgtaggttattgtttagtaaagcatttgaattaaaaaaatctcatcatgagctatagctcatatttggtcattttttgtacttctcatttgggtatctaagacttaatgctgaattgaggcatctgtggaataaataaaactctggacctgtctggacaagcaagctcaaagcaggagtgtgctgtggtgggaataggccaactgtggaatcctaaactgccttcatattgttgctgtaccattgagcagctatgtggacttggtacacatagcttgagaagctatgtagaacttctctttctttaagtggagtgagggttgttatgaggcttaaatgaggtaatgtttgtaaactgcttaacatggttggcacacagtaaactttaggtactattatcagttttgtctctgaggctagttcctaggtttatggagttgtagagctggagaagcattttaaagtccagcgttcttccttattttagagagaggaaactgatgcccagagacactgaaggtttctgaggcttggttatcatgtctatgtgttttacagcttggctatgaggatcatctgagctaataggtggaaaagcatttatatgtcagttttttagtattgttcatacagtggctaattgccttgcctgctcaacgactgaatgattttataaaatagctttctggttctgataatagaaaaatcaatatattttcttttttttcttaatttagatgtatccagttaaagcaggcaatagatgaaaataaaaatgctcttcaaaaattaagcaaagtaagtattgaggttaatcacattattaaaacatctcttcctatacaagtatttttattaagtggaagttaattcaagttggtaagttcctgggtttacgttagtgatatagtctaactgcagccagtgctggcttgccgaacaggcttgctaagtctgtgcttgggagcaaagcaaaatccagggctccaactaccgaaaaatgttcagctttgatgaactcacctgctattaaggattcagacaatcctggaaggagctatttttatttttgcattttgtgagttgttttacagtttagaattatttttattttaatttctttgtggggaaataatgcataatctggccctgagggtaagtggtaaagaagcttcttgtatcaaatggcagctctgatatcaatgtctctgcagaaacaagaggaacaggaatttaaccttgacaatcccttcaggatttttttttttttttcacatgagccttggctacagctagatgtccaggtccagagactcatggagtctttaaagtggaaggcacctgaaagtcagctctccagctgtatattactcccctttactgcatctgagatatgtggtcactgaagagctcctccaaatttctccagtgacacaaaacttttcaacttagactgtttgaaaacctaattatttctgtttcacaggtgaggaaattgaagctctcagtggtgaagcatccatgcctcttctgtcaataagtggcagaacttgggattggtgcctgtctcattgactttaaagccgatcttctgtcagaacatatctcttactgactatggaaggtctataatacttagcaagaaaataaaagagaaacctaaaacaagtggtataattttattttttcatttggtttgcattccaacacaattgcctgtttcttttaaatctaatttatttccctaagataggtgtaatgtcacactgatatttactttgttatatagcacttattggaattttttgttgttcttttgaaattaggaaactgaaattaattttttagtgaaatagacctatattctctcataggctgatgaatctgcacctgttgcaaactataatcagagaaaagaagaggagcatactcttttggacaagcttacccaacaactgcagggccttgctgtgacaataagcagagaaaatataactgagtatgcttcctttctacctttcttttttcttttttaaagatatatcaccaatagctttaatgtttaactcaaagacatatagcagtatagatataaacaaatgacactaacaatagaatcagtcaacatttatttattgtgtataatagaaggtgttagatcccatgagagatggaaagaagtgtaagtcatagtctctgccctcaggcaatttataatttagttgaaacaaaacagagatctgaaaagctaaatgaacaaatgttagaaaataaagatgatatatttaatgtcaatgttgatgtgtaaaagggaaatgatttggaatgtctacttgcattgttctccctttcataaacattctttaaaaatttgaagcaaagactgagtgtggtgactcatacctgtaatcccagcattttggaaggctgaggcaggaggatcacttgaggccaggagttcaagaccagcctgggcaatacagtggaccccatctctacaaaaaaacccaaactagtcaggcttggtggcacgtacctgtagtcccagctacttgggaggctgaggcaaggaggattgcttgagcccagaagttccaggctgcagtgagctataatcacctcagtgcacagcctgggcaacggagtgagacactgtctctattaaaaaaaaaaaaaattgaagtagggacatgcattgtttgtctgccagagtgtatgttaataatagcttctgaaagttgtaaagaagacttacatatacaagttgagtattccttatctgaaatgcttgggatcagaagtatcttcagttttggattgttttggattttggaatatttgcattgtacttacttgttgagcatccctaatctggaaatctacattttgaaagactccaatgagcatttccttggagtgttattttgatgctccaaaagtttcagatttaggagtatttcggattttggattttctgattagggatacccaacctgtacgaacaaacccaatttgtgggaagcaaaagaaaaaaatcagttattcagactatttcagtgttgttctccaacctttatactgtatcctgggaaaaaatgctgaaggtggtagatgcaaggatctagaatttccaccgattcttagtactgagaatggcagagtagttggtattggactaaccttcccaccataaatgactataaagtctggacaaaatatacaaagcatctgtttgaagccactgagcatctaccaagcagggttgatattcttgatatagggagacacatgaagcaaatcctacattcacctagaccttttccctgggaataatttatgagctgtggtggaggaaggtagattccaagcagggaatagtagtcttactcgactgaggagacagagatcacactttggagctgctcagttcactgagagttgtggagcaaggtgccatagagagaagggagctgcacagaaacaactccagcaatctgaaaggtctcctgggctgtatagggcatgatgcctgcaaggcctggcagaaagtacctgctgggagactaagagcttaatggattctggtaatcatatagtcctggaaaaacactggagtttgtacctagttctagtaaagagacttgggaaatgtttcaggcatttagtagaggacacagaaggcccaggccctaggagtaaagaaaacaccctgagagtaacaaccatgatctaggaataaagacaaagctgaggtaggtcttctctaaaagagcctaaaagcagaccttatcaggaacaagataatttaactgtgtaacattaaaataatttaaaatttcttagaggaatataacataatccaaagtctgtaagtgagtcatgtaatgtgtccatcacagcaaccagtataaaaaaaatcagaaatgcaaaaaagcaggggaaaatacatgatcaataagtgacaagatggtcactaaaaacagacccagatatgatccagatatagagttagctgacaaggacttctaaataaaatgattaatacagtaaagaaaatagaagaaaagatgaatgaaatgggaaatgggtgtatttaattcaaatatagaaaaatcaaatgaacattctataactaaaaaatacaatatttgataaagtaatgactgagaacttccaaaatctgattcaacatatagactcaaaaatctgggaaatatattaaaatcaagagaataaataatcagtagctcggagatgtgagaattagcaaataaccataaaacaacaatttttaatatgttaaataatttataggaaaagattgataagatgaatagagcgaaatcttaagcagagaaatgggaactaataaagaccaaaatgaaaattctggaactaaaaaaatacaatatgtgaaataaaattgctgagtggtttaatagaagattggatacaacagaagaagggatcagtgaacccaaagacagcttaaaagtttttcaaattgatacacaaaaataaaaaaatgcaaagaacaaaacagaatgtaagagagaggtgggacactgttaaaagttgtaacagatttgtaattgaagtctcagaataagagagagaatgaagcacaagaaatatttaaagagatagtgactgaaaatatttaaaaattatgatctaagagagatatcaatccactgatccaagaatctcagggaaccccaaacagaatcaatataaagaaacccacacacaggtacctcaaactaccgaaaaccaaagataaataggagatcttaaaagctgccaagggaaaaaaggaaacatgtagagacaaatgacagaattacagttgacatcttatgagaaaaaatacaggtcagaagacaatgcagtaacagtaacatcttgaaaacgttgaaagaagaaaccatcaactcagaattctgtatccagcaaaagtataaaaaattaaagtgaaataaagacattttcaggcaaacaaaagctgagaaaatttgtcaactgatctgcagtataagaaatgttaaaggaagttcttcaggctagcagacaatgatcccacattgaaatttggaccttcaaaaaggattgaagaagatgggtacgtgggtacatataaaagcctattttttcttttctatatgcctttgaaagacactcaattatgtaaagcaaaatatatatttggggatttataatatccagttgattctcattatttacagtagttatgttctataaagttgccaggaatactcgattagtaaatgctaaaccattgctcctggggaaatgcagacttaagactcctgtgagcctctggtcacaatgtttttgtcaactgagtaacatacaaccttgtgttactgtttaaagacactttatttcatatattttattgattcattaacattgaattcacactaacagcactatcactcatgcatgaacaagtcttatctaacacacttattttctccagaggtacattatagccttcttgtgcttaggaataccacatggctcttcagcgctatgtttgggagccattttaaacaacaaaatcaccaaaaaaaaaaaaaagcacaaaaatgcaaaaactgtggcactaaatagactgcaaaaaagggacactttcctgtatgagagctgaaaaaaaaaggcaggtgtcaccatgttcagcttcagttgggaatgtgtacgccagacaactcaaattttttgctgctttgtgtatgtccacaaatgaccacaaaagcactgtgagtattaattaggaggttacaaataaagtttagtgagccaatgaattcataaatacagaatctgcatgttacaaggactgactatatgtagaaggaaaatgtgacaatagcacagcatagcacaaaggctggcaggtaaatggaattatttatcttaaagttattttatctttggtgaaatgtgatatttaaattagactatgataagttagggatgcatattgtaatacctaaaacaatcactaacaaaataatacaaagaagtgtagcttgtgaaacaacacaataaaatggaatactaaacgtgatttgattaacccaaaaaaggcaagaaaggagaaataaacagatgagacaaatagaaaccaaatagtaatatggtttcaatgcagccatttggatagttacattaaatgtaaatggagtaacactccaattacaacaaagattgtcagattgaatttttttaacccaaatatatactatttagaagagatagactttagtatgcagttatagagagagtgaaagtaaagaactggaaaaaggtattccatgttctacaacaaagatattatttgttttataaccaaaacaaaggtgatacggttacaataatatcagatatttaaggctaaaagtaatttactatttaagaaaggacatttcataatgataaaagaaagggtcgattcagtaggaaaaaaaatcttcctaaatgagtatacatttaataatatgggttcaaatgtataaagcaaaagttgccagaactaaaacagagctagataattcacaatccttaaccaccgtgatctaattacatgtatagtcaagcctttcttagtgatagggatatgttctgagaaatgagtcattaagtgatttcatcattgtacaaacatcatagaatgtacttgcacaaacctagaaggtgtaggttaccatacacttgggttatatagttatagtatagcatgttgctcctaggctacaaacctgtacagcatgttactgtgctgaatactgtacacaattgtaacacaatggtgtatttgtgtatctaaacatatccaaaaataggaaatgtacagtaaaaatatggtattatatgtatggggccatcattgtatatgtggcccattgttgactgaaacattgttgtgcagcacatgactatatatgtgtagaacacagcacctaagtatgtattatgtaaatacatattcttttcagtgcatctgtaacattaaccaaaatgaaccatattggaccataaagtaattgtcaccaaatttcaagagtttgaaattatgtagaatatatatatattttctttgatgacttggaatgacattaaaacccaatgacagaaaaataattagaaatcactgcatgtggccaggtgcggtggctcacgcctgtgctgaggcgggcgaatcacgaggtcaagagatagagaccatctggccaacatggtgaaaccccatctctactaaaaatacaaaaatgagctgggcatggtggtgcatgcctgtagtcccagctactcgggagtcggaggcaggagaatcgcttgaacccgggaggtggagattgcagtgagccaagatcataccactgcactccagcctggtgacagaatgagacaccgtctcaaaaaaaaaaaaaaagaaaaagaaaaagaaaagaaattactacatgtttgcaaattgtcacacacttctatataaactgtgagtcaaagaaaatataacagtggcaattagaaaatatttggaatgataataaaatgactgggttgcaaccagcatagtgcttaaagggaaaatttctatcttttgtttgtttgttttggagacagggtctccgttacccagactgggtatagtggtgcaatcttggctcactgcaacgtccacctcccaggctctagtgatcctctccacctccgcctccctgagtagctgagactacaggcgtgtgccactacgcttggcaaattttttaaattttttgtagaggcagggtctcactatattgctcaggctggtcttgaactcatgggcttatgcaatcctcccacctcagcctcccaaagttctgggattacaggtgtgagccgccacacctggccagaaatttatatctttaaatgtatagtttgaaaaaaaagttgaaaatcaattactaaaacatccaactttaggggccagaaaaaggacaacaaacccaaggagagcaggaaagaaataataaaaataaaagcagaaaacagtgaacaataaacagacatacagtaggcaatatcaacaaagccaaactggtttttggaaaattaattaaatggataagctgctagcattactgatcaagaaaagagagagagaaaaaaaatcaatacagattccacaagcattaaaaagatactatgaaaagactatgaacaacttgtgtgaataagtttgaaatttagataaaattagtttctttaaaaagaaaatgtactaaaattgacacaagatgaacagaaaatcttaaaagttctactaaaatatttactaaagaagttgaatctgtaattaaaagcctttccacagattaaactctcaggtggctttactggtgaatttattgtaaacatttaagaaagaaatagtgccaatattaaaaaatcattccagagaacaaagaagaaacactttcaaatcattttataagctttcaataacactgatatcaaaacatgacaagaacactagaagaaaattgcaaggccctcatgaacacatgcacaaactcagtataaaatattagcaagtaaaatctagaggcatttcaaaagggtaatacatcatgaccaagtggaatttgttccagagtgtgaggttggcttaacattaaaaaatcaatcattgaaattcactacattaatgaaggggaaaaaccgttatcaagttcacattattttcggcaacattttagaataattgacccatataaaatatgtgcaaaatatctcctaaagaaggaaagagacgcgttgaaaatcaatatgacattttatggattttttagtcttgtggtataaaaatggttgttacatccctgtttatgttttagatcattgtggtataagagtgtcctaccattattttaaacaaagttcagctaatattcctttttattccagagaaaatcttgtagttgactagttttatagttaatgatgttcatttgcattagtctaagtattgttttcccattttaaagataagcttctctcatgtaagctttaggagggcaaagatcttggttttgttcattgttatagcccaagcacatagtgtctgtcacacagtaggtgctccccaaaatttaaactttgctgaatgttgaatgagtaaataaaattcagaaagatttagtgacgtgcccaagctaacattattttggcatttctctcttcctcaccctcagattcacctcctttctcttcatccctatgctgttttcttagttcatagtgttgtcacttctcactttcaacagccaccctcacctttagcctttcttctaatctgttccccacattatacctttgtctcctttctaaagtgggaatcatatcatgtccttcccctactcatttttaggggcgactttaaaggtaaagctcacctgggctacattccgcgtacctcttttcagcctcaactctcactcattttccttaagccttgccctaccattcatgagctacttgatgtttcctaatcttaaatctcctttctcctctccctgcccttcctttctactcccattttacctgattaattccatatcatctctcaagacctaattatagccttttatgattcccattcgtgcaacctgggttaggtgtccctcttgtgtgattgatttcttagtatcctgtgtatacctctactctagtacctattgcactattttataattctccattttctagattgtctcactgcaagctccttgaggatggggaatcatgtctggtttacctttgtgtccactgtgtatctctctgacacggaacttgacctacagcatcagtgtcatcatcataactgacttttatggaaagcttgctatgggcaagcactgttctaaacactttgcaagtagtaactcatcttaatcctcatgacaatcttagaaggcaggttctattattatctccactttaccaatgagaaatggagagcttaaaagaagcctactcaaggtcacccagcaaagagggaatagagccagaatttaaatttagcagagcctatgctctaagtacttcataataatgcttcaacagcattttctgaatggatgaatccaagacttgaattcggagtctcctggcctcaagtccagtgatgctctgccatctcacatacatgactcagctccctctccgcctcagtctctccaggcacacggtcttagctagatggtagaaactgttctttgtattttcccttatttcttttatttgccagctccaaatatgggatattcatgtatatgtagaagttacactcatagctggtctgttcttgtatattatttcaagtagtcctactcagaaacactttttgtagagttggggcacctactgaagaagaggaagaaagtgaaagtgaagatagtgaagacagtggtggggaggaagaagatgcagaggaggaagaggaagagaaagaggaaaatgaatctcacaaatggtcaaccggtgaagaatacatcgctgttggagattttactgctcagcaagttggagatcttacatttaaggtaggtagaataagactgaaacctaacctaagggtcgatgtccatacctaacagaataagaaaactctgcctgtacacctgtattacagattcttaaaatgcagttttataacaatctatttaaataagtaataattacaatttacaagcagtagtaatatgagattgtgttactaaagttacctcttctaaagatttttgaaagtagctttaatgttgagaattcctaatttaggggtaaaattttataatttgttattgaatgtcatgtataaattcattcaagtgagttaggcaatgtccataggtggaggtagaagggagcacttcctgccattttgtagcagtctttcctgttagcttagatatgagaggggcttacatccatgcttggttggcctgggcataaataagtggcaggtgggacagaacaataaagttgtgatttttaaagttgtgattttgagcctgtgttttctgctagagaaatgagccaaagaaatttaagtgaatatatgaattttagttcttatattaaacttcaaagtttagtaactgattaataataaaatacataagaatattatgcaaataattatatggtttgatttatagatttttttttcaaattctcctggaaaatggtatcaatattagacaataatgtatattttaattaagtgtttgcttttgtagtgtccttagtggtggaaatgcttttgtcttcaaagatgaattttatttttataaatgagtgagtgttattcaaaacatatctggtgaattaagtgggtaattatattcagtaaatactatttttgctcaaaaatagggtttaactttaatggaattgatattctttgggaatttatatgctgcttctgaaagacacttttccagagatattaaaacattcaaaaatattttacgcagtaattgaatttttggaataagtatggggccttaaaaatgattgtgaaaaatggttcccatttgcataaatggctcaagtgtatgttaggtaaccaaaaggaatgattcattaaactatgtcacatttatggttttaggtgagttaggcagaatacataggggtcgggtgatagggaagcttttgataaaccttaggataaatattggattaaaaaaagattttgcctttttttcagcacatattttgaatcattggtattgacatatactcatgattattgaattttatttaaaatggtttactttgttttgctttaagaaaggggaaattctccttgtaattgaaaaaaaacctgatggttggtggatagctaaggatgccaaaggaaatgaaggtcttgttcccagaacctacctagaggttagtcttggtttatgccttccttttctaagacttttttttttttcgcttttaataaaacatttagctgtgttcttttgtcagttgactagtgaatgacttgagatatagaatttgctttaattttggagggacaggacctgggaaaaacattgtgtattaatggtcctggggacctgtgaagtgctcttacgcatgtgagccctggaacgtgatctcacaatgaggggatgctttgtggattaatgctgatcataacaaataataggtgtctattgtttattgtaaaacataactgcagttaactttgtgttaacttccacaaatatgtgatccccttactaaaatgtgaacatactatacatgtgtgtttgtagcttgtattttcttatttcataaaataacatggtcattttctgtgccaagatatatagatttctgtctggatcagcactgtccagtagaactatgatgcaaaccacacatgtaatttaaatttttcagtagccacactgagatatctttttgctgatgccacttctgacaccaagtatgtggtttttctctgacaccaaatatgtgttattacatcagttcttctacaccaaccggtgtcagcaattcaattcgattctgatgctaatgcctggagctagcacagacccccacaggttaaaggctcagtcccacaagattgctgctcacttccgttgccagtcacaagtcccaagagccacccatacttctgactgactggctatacattcacgagttcccataccatcacctcaggggttcagtaatttactagaatgattcacagaactcaggaaaacactttccttgcatttaccagtttattataaaggatgcaactcaggaacagccatagagtgaggtattggttgggggtggctggcatgcactctctgggccttccaccttcccagcacttcgctgtgttcaccatcctggaagttcctggaaccccatcatttaggggtttttctgaaggtttcattagccatgtttaactaaatcattagcaattggtgattaactcagtctccagctcctctcccctctttgaaggttggagggtggggctgaaagttctaacctctaatacctgggttggtttttctggtaacctgtccccttcctgaagctgtttaggtgcccacctagaattacctcattaacataaactcaggagtgactgaaggggactcttgatgagtaagaaaacatactcctatcattcaggaaattccaagggtttcaggagctctgtgccaggaatcagtgacaaagaacaaatacatgtttttcattacacacatttttaaaaagtaaaaagaaacaggtagaattatttttaataatatattttatattatccagtatatcaaaaatactattttgacatatcaatatttaaaaatattgagttgttttgcttttttaacattaagttcaaaatccaatgtgtgttttacatttacagcacttctcagtttggattaatttcaagagctcactagctacatgtggccaaagggctattgtattacatagggcaggtctagatcatctttttcaatggcagcaagtcttctaatctcatttagatggtcattgaagttgtttccaacctataatcactatcgattatgttgcaaagaacatgggattagcatccactgtcagttgcaaaaagatccccccaaaaagtagcttaaataaggtagaagcctatttctctcaagcataaaagtgtggagaaaagcaatcaataattggttaagatcctatccagtattttatcctgtttctgatgtgaggctgctctgcctagagttatctctttagttttaagtcagctgctggatcttttaaggattccaaggagcaaaaggggaaagaattcaaaaggcataagctgctgcctttttaagaaggtttcttggaagttacacaaaaaaactttcaactgttgctcattgaccagcatttagttctctggcaacagttagctgcaaggaagtcttgggaaatgtagtcttttaactggatcattgttaaatcagggattttgtttgaaaaaggaggtggggaataggtggtagccagccagcaacttgtgttgtcatcaagcctgcgtgcatctttgcacacttgcccgattatccccttagataaattcctagatgttcatcactggttcaaagggtttatagctttatattttgatttatttttccaatttgccttttagaaaagttatgccaatttgtactcccacctctaacaatcagtgagtgctgtttcctcacacaattgccagtgatggctgttagcaatctttaaaatttttgccaatatgaccagcaaaaaaagtgtcattagtggtttaatgtgcatttactgtactcctaatgaggttaagcatcatctcatatgctttatgaccatttgtatatcttctttgcgaatggcactttcggttttctttattgatacataatattttatgtatttgtgtgagtgctttttacttgtatggattgtgtaataatcaagtcagggtatttgagatttccatcaccttgagtgcttatcatttttatgtgttggtaccttttcagttcttttggatatttttttctaagggatttaaaaaactctttcattgatttctaagagcttttataatattttaataatcaggatattaatccttagatatttgtgtgagctattttctttttttcccctcaggatatgcttaagttatgtgttagatattttctttgttgactttaggtcatgtttatttattatgtagctaaatctgtcagtgtttccacttatgatttttgattttgtatcatgattggaaagggcttccccatctctagattattttcttctaatgcttttatgtttcttttatttttatctttacgtcttttcttttttatttaagtaaattccatctggaatttattttgattaaacttgctgtctatctcagttcttattttttcaaatagcaaagttattaaccatgtgttgaaaatttatttcccactgagttttatatgctcatcatatatactaaattcccatctatgctcaagattttctgaaagtactgatgcttttgtttttttgtttttaaacagaaaagcttgtttttgtttttactggagggttaggtggcagtactggtatttttattggttgttttttgcattagttaaaaagcacttcacatttcaatggttttttagccttatagtgaagaagaagaaggccaagagtcaagtgaagagggcagtgaagaagatgtagaggcggtggatgaaacagcagatggagcagaagttaagcaaaggtacaaaagtgggaaaggatatcaaagtaggtttaggaaacattttatttgtttatttttattattataactaattcaatactttcttgaaatggagacaacttgtacctggagagcttttcatactattgtctgcttaaagatcattactgttttagttttgtaattatttttaatacatttagctctacctcgttttcatctggaaactgttagattttcaaaacttactgatgattatcaactgtgattaaagaagttccctaattgagtgaataggcataacctgacctgactcactttgctattttgtctccccagaactgatccccactggagtgctgttcagaaagcgatttcagaggcgggcatcttctgtcttgttaatcatgtctcgttttgctacctaatagttctgatgcgaaataggatggagactgtggaagacaccaatggatctgaaacagggttcagggcatggaatgtacagagcagaggacgtatatttctggtttctaagcctgtgctccaagtaacatttctcattagtttttttttttttttgtacaaaaagaatagataattcatggtgtcacttgaggacttggaaacattctcattgatcctgctttcctatcatttgagtggaaacagatgttaaattttatttactattcgaaaaatcctgaaagcctttaataaaaagtaagaaattggccaggcatggtgattcacactggtaatcccaacattttgggaagctgaagcaggaggatcacttgaggccaggaattcaagaccagcttgagcaacatagtgagaccctatcctacaaaaaataagaaaaattagccaggtgtggtggctcatgcctgtagtcccagctactcgggaggctgaggtgggaggattgcatgagtttgggaagtcaaggctgtagtgagctgtgattgtgccactgcactccagagcatgagtgacagggcaagaccctgtcttaaaaaaaaaaaagtaattaattacatttttttaaaggagaaatgatccataattctgtcattaaaaaaaaattacaggccgggcacagtggctcatgggcacagtggctcacacctgtaatcccagcactttgggaggccaaggcgggtggatcacctggggtcaagagttcaagaccagcctagtcaacacagcgaaacctcacctcgactaaaaatagaaaaattagctgggcgtggtagcgcatgtctgtagtcccagctcctggggaggctgaggcaggagaattgcttgaacctgggaggcggaggttgcagtgagccgagaatactccactgtactccagcctgggcgacagagtgagactccgtctcaaaaaacaaaaaaataattacatagccaaatgaaaattctcttcctcaaactcataagtaatcaccattaacaatttagtacgtgtccttcctgacctttttcgttatttattacttataagtacatccttgtatgtgtgagggtgtgtgtctatgagtagtgtgtatgtgtatacaaaaaaaatccattaattcttcagtgcatgtgatttgccaatagacattaacttacctgtgaaatggaagcgcagggtggagcaggacaggagcagggacattttgataagggtatacttgaagcagctgctccggaacacacagctctgcacgctgggcactgtatggggcttaggtccttaggagaggccagggtgctgtgatggcatcctctcaggaatttggggccaaatcgtattattcttccactaaagtctgtatgtttatatttttcttttttgggttatagttactctagtgataaagtattatagagatgcagaaacatgactgaaaacaaatccattttgatgttactgtcttcagcagataaacactgttgatgtgttaactacgatgggagctattcctgcagggttcaggccttccacgctctcacagcttctggaggaaggtaatgcgtgcctatcagccactgcactctttcagcaaagcagtcaagatccacgtctaatttttctgtcacaggcaaaacacattgttgaagaagatgttgaatctcacatctctttggtgctcatcttttcctcatccttcctatgacagtgaggaaagatccctgatcctatcagaggccagcctgtttaccagtgctccgggttccagcccctttctttttttcaaaaatgtgactcctttaattttcagccctttcctgtgtctttagctggcccaccttccccacactggttcattccctcatctgtgctatcagcacacctaattctccccaccttaaaggatcagccccttgaatcctatcccattctagccaaaacctccttttctctgatcttcttccaagcaagacttttccaaagaattatctccatttggaattttcattttccttactcattcttggctttccctgtatttggcaacttttgtctataagctcattttaaagaggattcatgctgggggacaaggggtgtcctgtataccctgagttgttgagttgtcatggaagggctgctttgaggatgcctttgctgggaaggttcttcccagtactccctaaattcccatcttttcatccttcaggtctcgcggtaaattctgccttcccagagatgccttccttgagtaatgtgggtttcccttactcccattcatgtgaacaccctttatagctctatgtcccctaataattattttatttatttgcttgtctacttattttctaagaaaattttcctcccattcaactgtaaactatggagggcaggggacatatctctgatttatctttgtatttctagaacctggtgtagcatctggcaagagtagaagctcaaaaattatttctcgaatggataaatgatgttattaaaagtattattcatgactaaagcatggaggaagagcataaaatgcttttgtgttaagaagtaaaactaacgactttgttttttctgaagtctccaaaaagtgctcatagatttctgcattttacaaaaatatttgaatgaatccttgtcatcatggggcatattattggcctaaaagtctttcttaaaggtgctttaagatgatcttttatgtgtttgtatctgtaagttttgtactgctgtttttatccataaatctatattggcgcttctattttggaaagcaagttcttagtaagcagcgtggcattttggaagtgcctgtactctagttcatagcataacattatggatttttgatttggagtttctttctttgtaagaaaatgaagaaaaaatgattttttcagggaatcaatttcgagcaaattacttcttacaaccagagctcatgccttcacaactggccttcagagatctgatgtgggatgctacagaaggcactgtaagtatagttactatcagtaaaagtgtaactcttccagattttgtcatagttgcaattagacaaacaacatgttaattgactaatgaattataaaaaacaaaaaaattgtttatgataattttgaaaatagcgatatttttataactaaggcagaatttggacttgctaccttgactttatcttgtttctcttctccattgcactcttctctcattgttagaaaggaaataatactaggtttctatcttaatcattctttgcctcaatttcttcatctgtaaagatggagtaatagtaatgcttccaacataaagttattttgataattatgtgtgtgaagggttttgaataatgcctggcatatgaaaagaactcaatagatgttagccattattatcatttatagtagtagtagcagtagtagtagtatttttgagacagggtctccctctgtcacccaggctagagggcagtggtgtgatcatggctcactgtaacctcaaattcctgggctcaagcgaccctcccacttcagcttcctgagtagctggggccacaggcctacaccaccatgcccaggtaatttttgtattttttgtaaagatggggttttgccacgttgccaggctggtctcaaactcctgagctcaagcaatctgccctcctatccctcccaaagtgctaggattacaagtgtgagccaccagtcccagtctaatataagttatttaaatgaaaaggcttatgaccgtaaagcagaatgtaaagtttaatgaattgaagctgttcttaaaaaataaaaaatcagaatgccaatttatttactcacaatctgaattatacctatgaagcagatctgaataaatatatcagatagtgcattctctctgttaaaacacctattaagaaactaaggaactatgcagataattgcttggaataaaaaatagtggggataatcttaatgccaggtggcattggttttatgctgcgttagccttctgcacttacccacattctgtaggagtgaaccgggactggaatacagtgattctatagtcatagatcatatacattttgcctgccaatatttattgttcctttcatcacagcttttaagtatttaagaaaaatgcaatatttcaaatgtaactctatgaaaaatttacctaaaatgactgatttaattttcaatgaacagagtattgaaacttttattgtatatgtgtaaattttttcttttttaaaaattctgtatacattttcataagccgaattcacaaaagacagatttgtgttagaaatcataaaaataaacttttttataactaatttttctttcagattaggtcgagaccaagtcgtatttcattgattctgacattatggagctgtaaaatgattcctcttccaggaatgagcatacaggttctcagcagacatgtacgcctctgtctatttgatggtaataaggtaaggttactgagaagtaaatcaattcatactaggattatggagaaacattcccttagattcttttccattcaactcctccccaattcccaagagagtattttttacctagtaccaaagaaaaatttgaatgactctttgaaaaattcattttttaaatgagatacaggttaaacagtacttagatggaaatttatagttttaattgtgtatattaaaaaaaagataaaagatttaaagtcagtgatctaagctagcaaatcaagaggctagaaaaagaagagtgagttaaacctgaagaaagtagaaagtgggaaataatacagataagagtagaaattaatgaaatagaaaacagatggaccaaagagaaaattttaaaaaagacaaaagttgattctttgaaaacattaataaaactgaaagatgcatagtgagactattaagacttttttaaaaagtaaaagaaaacaaactattaacatctgacatggaaatagagacattatcacagatccttcagacattaagaggccaataaggagatattataaacagctttataccagtaaatttgacaacattgatgaaatagataaattcctggagaaccataatttactgaaactggcataagaagaaatagaaaatgtgaataacctctggtaaagatattaaacctataattaaaaaaaaatcttgccacaaagaaaacttcaggcctaggtggcttcacctgtgaatttcttcaaacatttaaagaagaaataataccaatcttatacaaattcttccaaggaacagatgaaggagaaatgtttcccaacttatttcataaggccagaaaaaacatgaccccagaatatgacaagacattacaagaaaggaaaattaccagacagtatccttcatagatatagaaagtaaaattctaaacaaaatattattaaattgaatctagcaatatataaaaaggacattatgtcataaccaattggggtttatttcaggaattcaaatgtacattcctgggtaatcacatttaacatttgaaaatcaatcattataatttgccataagaaaaatcatatgatcatcttaagaggtaaggaaaaaacatttgacaaatttcaacacccatttatgatttttaaaaaattatctacaaactaggaatagaagggagagtcctcaaattgcaaaatgcaacaagaaaaaacctaaaactagcattatcttacttaacagtgaaatactgaacacttttttcctaagaccaggaacaagtcaaagatatccaagaaataaaaagataactcagttttctaaagggacaaaagacttgaatagcctcttcaaaaaagaagtatcaaaaaccactagaagtataaaaagatagtcaacatgtaagaagtcatcagggaaatgcaaatgaaaaccacagtgagagagactgacctatatgttatatataagaagcccaccttaaatattatgctataggtagcttaagagaaaaaaaggatgagaaaagatataccattcaaagtagacttcaggcactacatagtgataaaagagatcgttcaccaagaagacatagtaatcctaagtgggtacatacctaacatctgaaatttaacacacaagaaataaaaatggttagaactgaaaagagaaaccgacaaagtcacaattatagttggggcctctattatagttggggagtttaacacttctctctcagtaatataggacaagcagacagaaaattagtaaggatgtaagagaactgtataacatatcaacaaactggattagattgatattcacataacacttcacctcaaaatagtaaaatacactttctcttaagtacatatggaatagtcaccaatatagacggtcctgggtcagaaaacaaacctagacaaattgaaaagaattggaatcatataatatatggtccttgattacatggaattaaatttgaaatcagtaacaggaagataaatggaaaaatacttaaatacttgtaaatttaaaaactacttctaaataatcaaagggttaaaaggaaatttcatgggaaattagaaaatattttgaactgaacaaaaaatgaaaatgcaacatatcataatttgtggaatgttagctaaagcattgcttagagggacatttatagcactagatgcttatgttagaaaagaattctcaaatctacagtcaaagctccttcctgagaagacagtgctgcttgagctgataacggtcaatgtgaaattaaatgagttaatgtaagggaagttatcagagtgatgttatacatggaaagaacatagttctttcaaagagtgtctggatgagaggtggtgatgataacttagagaggtggaggtggagatgagagatgtggatagagatatctgggagtaaaaatcaacgaagcttggtgatggactggatatggaggagagaggaggagtggggtataggcatgacacctagtctctgacttccgcatctggatggatggtggcaacattcaatgagatggggaacactggaagaggaccacgtttggaggagttgacatgggcttggttttgcacatgctgagtatactgctaacccccagcatgaagaaaatgcctttatttcatctgaacttggggtaaagaaatgaacttatgttatgacggtaatcctccctcacttccataatacattctgcacaaaatcactgccacaaatgagccagtaggtgtcctcagtgaccaagagctgaattggtttctgtttcatacatctggtttgatactttttcctgtacctctctgtgttctcatatataagaacataaaaaggaatggaattttattttcaataatatatcaaaataatgaaatttactttatgaaagaaatttatgtgagatttccaaattgagagttatggaacatatttaatagctgcacagatactcgtgctgtttatgtaagagtgcttctttaataaatctaagcctagttatgaataaaaagcattgggctgggcgcagtggctcacgcctgtaatccccgcactttgggaggccgaggcgggcagagcacatggtcaagagatctagaccatcctggccaacatgatgaaaccgcgtctctactaaaaatacaaaaattagctggacgtggtggcgtgtgcctgtagtcccagctacttgggaggctgaggcaggagaatcacttgaacccaggaggcagaggttgcagtgagccaagattgcgccactgcactccagcctggtgacagagagaaactctgtctcaaaaaaaaaaaaaaacagaaaccaaaacacatacacacacacaaaaccaaaggcattgttgccaaaactaactaatgagacacaacttccagtaatgtttgagtcagctcctcttggaccaccccacccagagagggtaattgtaaactctgggcaaagtaaaaagcaactacctgaaggcactgcagagcattcagaagcaggcagacactggagaggagcctcaagcctttagtccactgatttattttttttctctttgttttctctcttttttgtttgtctcttttctttttcctatcttcctgtattagtttgttctcacgctgctgataaagacatacccaagaaagggcaaattacaaaagaaaggtttattggacttacagttccgcatggctgaggaggcctcacaatcatggcagaaggtgaaaggcacatctcacatggtggcagacaagagaacagagattgtgcagggaaaactcccatttttaaaaccatcagatctcatgagaatcattcaccatcatgagaacagtgcaagaaagacctgcccccatggtggcatgtgcctgtaatcccagctactcaggaggctgaggcaggagaattgcttgaaccgggacctgggaggtggaggttgcagtgagccgagatcatgtcactacactccagcctggactacagactgagactcttgtctcaaaaaaaaaaaaaaagaaagacctgcctccataattcaatcacttcctactggtttcctcccacgacatgtgagaattgagggagttacaagtcaagatgagatctgggtgaggacacagccaaaccatatcattcctcccctagtcccttccaaatctcatgtcctcacatttccaaacctatcatgccttctcaacagtcccccaaagtcttaactcatttcagcattaactcaaagttcacagtcccaacatctcatctaagataaggcaagtctcttctgcctatgagcctgtaaaatcaaaagcaagctagttattttccagatacaatggaggtacaggcattgggtaaatgcagccattccaaatgggataaactggccaaaacaaagaggctacaggccccatgcaagtccaaaatccagctggacagtcaaattttaaagctccaaaatgatctcctttgactccatgtctcacatccaggtcacgctgatgtaagaggtgggttcacatggtcttgggcagctcagcccctgttgttttgcagggtataaccccactcctggctgctttcatgggctggcactgagtgtctgcagcttttccagcagcacggtgcaagctgttggtggagctactgttctggggtctggaagatggtggccctcttctcacagctccactaggtggtgccccaggagggactctgtgtgagggggctccaaccccacatttccctttcgcacttccctagcagagattctccatgagagccccgcccctgcagcaaacttatgactggacattcagacatatcatacatcctcttgaaatctaggcagaggttcccaaacctcaattcttgacttctgggcacctgcaggctcaataccacatggaagctgccaagagtttgggcttgcaccctctgaagccacagcctgagcttatcttggccccttttagtcacagctggagtggctgggacacagggcaccaagtccctagactacacacagcatggggaccctcggcctggcccatgaaaccattttttcctcctaggcctcctggcctgtgatgggaggggctgctgtgaagacctctgacatcctctggagacatttttcacattgtcttggggagtaacatttggctccttgttacctatgcgaatttctgcagccggcttgaatttctcctcagaaaatgtgattttcttttctatcgcattgtcaggttgcaaactttccaaacctttatgctccacttcccttatgaaacaatgcctttaacagcacccaagtcatgtcttgagtgctttgctacttagaaatttcttccaacagataccctaaatcatctctctgaagttcagagttccacaaatctctagggcaggggcaaaatgccaccagtctcttcactaaaacataacaagagtcaccttttctccagtgcccaacaagttcctcatctccatcagagactacctcagcctggaccttattgttcatatcactatcagcatttttgtcaaaaagccattcagcaagtttctaggagattccaaactttcccacattttcctatcttcttctgagccctccaaactgttccaacctctgcctgttacccagttccaaagttgcttccatatttttggatatcttttcagcaacaccctactcctggtcccaatttactgtattagttcattctcatgctgctgataaagacatacctgagactgggcaatttacaaaagaaagaggtttactggacttacagttccacgtgtctgaggaggcctcacaatcatggcagaaggtgaatggcacctctcaaatggtggcagacaagagaagagcgcttgtgcagggaaaactcccatttttaaaatcatcagatctcatgagactcattcactatcacaagaacagcgcaggaaagacccatccccataattcaatcaccacccactggattctcccatgacatgtgagaattgtgggagttacaattcaagatgagatttgggtggggatacagtgaaacctatcacttcctgtgtgtcacttgagcatttttttttttttgagatggagttttgcttttgtcacccaggctggagtgcaatggcgcaatctcagttcactgcaacctctgcctcctgtgtttaagcacttctcctgcctcaccctctctagtagctgagattacaggtgctcactaccacacccagctaattttttgtatttttagtagagatggggtttcaccatgttggccaggctagtcttgaactactgacctcaggtgatccacctgccttggcctcccaaagtgctgagattacagttgtgagctaccgcacccgccccacttgaacattttttagaactccattctgagttatctgtagtgttgatgagtgtatctttttggctagtttccttagtggttgcttctaggtattaagtttatacatgcatagcttaccacagtctactagtgttaacattccagttggagtgatgtataaaaccttaccttcctttagttctttactttccctagcttgtaatatagttgtcttaaatatttcctctacatacattaagaatcttatcacacagcaccaaacataatttggaaaacctgaaagaagatccatagtatttacctatatttttactatttccattgtttattctttcttcctgatgctctaagagtcttctttttatcatgtcctatttagagaatctcctttaaccattcttttagggtaggtctgctggtgacagatttttagactttatctgagattgtccctgtttcctcttcattccaaaaggatattttaattagatagagaattctgagttgacagttatttttgtttgacacttgaaaactattgtgtcatttccttctgttctccgtggcttctaatgagaaattcatcatcattcaaattgtttttttcctgttggctaacctaaatgctgtttcttactgttttcaaggtattttcgttgtgtttcagttttcagaagtttacggtgtatctggcatgaatttctttggtttaccctgcttggggtttgctcagcttcttcaatctataggtttatgtcttttgtcaaatttggggatttttttcagccattattttctcaaatacctttgcaactccaattatttcttccagtgccgtttccctctatctagtagtgttgtggtttttattaacagtacatcaccctcctctcccaaccccagttcagaaccagatcttgacgtagagtttagagttcttgatctaagatgatgtcagatatgtcactgatccattaaaaggcccacttgttgacatggttctgcttctggtgtcatggctatgtctttgtcctcctacttgcttaggctcactactttttatgagaagcaggggcaaccttttttttttttttttttaaccctactggcttccagcaacaataaagcaatatctatttctctatcatggggtgatatatagcatacaaatccagccccttgctaccccatgctccttctggactcagagcccaggaaacctctagtttttgtctcactttactcttctatcttctatttgtggtccattgacatatttatcttacttttgggtattactctgtctttttaactatcactgcttcattgcttcatatgtggagcagaatggttgtgttgaagcataaactggttgagaagttcttgtacattcttagaaaaaaaaaaatagagccaaggtttcactatgctgcccaagctggtcccgaactcctgagctcaagcaatctccctgccgtagcctcccaagtagttagactacaggcacgagccactgcacccagcccctcttgcgtttttaatgcagtttgctgaacgaaatctctgtaaattattttgactcttcagttcttcattctttgggtctggttttgcacagaaagcagtgtgattctaagccagtcattcaccctctgtggctgcagttttctgaaatgcatagtgagatggttggactaagtcctttttagttcttagagtcaatatgtcaagaaagatataaaattatcaaacagaagaagttactcttgattccaaacttcaaaattaggattctccaaattgaaaagataaaagcagaggtagtataggatttcaattttgattatagcaaaggacttcttggccattagaagtagaaaacatttcttgaaaaacgaagaagaaccttagaataacatgcagtcttacagtaatcacaaggtagtaattataaggagtttgtattccaagagtccaggtggtaaatatacataatttcaggaaaagtttaaacatatatatattagcaatcgaaggaagtgggattttgttaatgtggaaaacaatccagctgcccataaaatactcctatattcctactactagggatgtggaatacagtgagtggaatttgacctaatataacacatttgggattattttaaattatcattttaaagctttgttttggaagtgttataataaaatattttcatctaaaataaaaattaactattatccattcctttggaagatgtcaattttggccataacattttagaatttgaattcttcattccataaatccctttgtgtttcattgttttatgtaagttttatgatgaacttcttgcatagagcattttataagagattgaatttcaataaaaatataatttatgggcctagagatcttgaggaaaaatataactgtatctgaactattaggactgtctgtcttagtgacagagtaatgaactgcatgtgaaatgcttgtatgggtcacatcttttttttttttttttttttcttgagactgaatcttgctccatcgctcaggctggagtgcagtggtgtggtatcagctcactgcaacctctgtctcccaggttccagcgattctcctgcctcagcctcctgagtagctggaattacaggcacacaccaccacacccagctgatttttgtgtttttagtagagacagggtttcatcatgttggccaggctggtctcaaactcccaaattcatgtaatccacctgcctcaacctcccaaagtgctgggattacagtcgtgagccactgtgctcaactgggtcacatcttttcttttaaaagaccatttttttgctgggtgcaatggctcacacctgtaatcccagcactttgggaggccgaggcaggcagatcacctcaggtcaggagttcgagaccagcctggccaacatggtgaaaccccgtctctactaaaaatacaaaaattagctgggcgtggtgacagggacctgtaatctcagctacttgggaggctgaggcaggagaatcacttgtacctgggaggcggaggttgcagtgagcctagatcatgccactgcattccagcctgggcgacagagcgagactccttctctaaacaaataaataaataaaaggccatttttacctaaaatttcaattacttttctggcaaacctatctcagatattaaggaattcacttaatataatttattactagcataggagtccaactctgaattcatttatgtcatacctgatataaaaagaaaaacattacagaattacatgaagtaaaaagtgaaagttctccccttgccatcttcctcacttagtgtagccactgttaactctttgggacatggaaatggtgacatttcaaagagctttttacatgatttcaaaagggaaaatctcatttcaggttctgagcaacattcatacagtcagagccacatggcaacctaaaaagcccaaaacatggaccttttctccccaggtaagtaatctgctgaatgagtggagtgagtgaatttcaaagtagaacatattcatatttctataaatagcacagagtatgtgggaacagatataaatctttagattctttggtgttctttgaggacattgataaaaattactcatgtttctgactcaccaatgttagtaattcctatgaatcatcccattcaatcagtttcagggttcatttttagaaaattctcatttgatgaaaaatgaaaacataaagataacatttaggaagtggggtgtttttcaaagatgaaatcttccaactgtgctaataaaagctgtgctttcttcagataaagtcagggatgacgcctgagggactgctacattacacccacacactgtcaagactggaatggcattaggtgggtttaaaccactgagtcagcattgcatagacgtagggaggacaaagatgtcttcgtgttgtttttatagtatcaattgtccatattttattttacattactttcgtctacctccaaggtctcattaatttagtatttacttccttcccacagctaactcccttgtataactgcatcctgaaaacccttagttacctttcctcttattgcatcaaaagatcttaaggcaagatggaggttcagtgagagggctcagggtgtggatgaggccagccacctcaactgtgtgctgtgcctgtccagacttgtcgagagcacacctcctaaaagtccatcttgatcttcttagcacccttcctctggtgagaagcatggcctctcttttggcacagtacttcacaattctgttattgcgtctctgtgtatgtgaagagtttagggtagaattttttaatgtttttcctggggtagaaggaagaactgttgggagtatgtgttattctgttgaatgaaattaaacatcagttatgtgcaagcattttttcctaggcacgtggaaactttttcatgccagtgaagttcctattccagcaaaattagtaggggaaaatacatacatgaagaataacaatatcatctacttatggaaccctaactgtgtgctaggccctgtgccaggctcttacgtacattaccttatttaatcagagtagccatgtggggcaagtactgttggtaactaccactcaggcagattgtaatggctttggagctccaagtgctttggaagcacacaggagggtaaagttaattctagtcctttggctcagggaaagttttctagaagagaaactagatcttgaaggttggatagattttacagtcaagaagggagggatacagttgtcgagggagagtgaattgaatgagcaaaagagaaaataaatgaaaattcacaaggcacacattaggaaagttgagcaaatatgtgtattcagtctttaatttttgttctgtttatgaagaacagtggttaatataaatatcttataatgtctataaactattatttgtaacacctctggagacctaggcacagtactattagcctctactctaagcaaaaaataagcaaaggtaaaggtattttccctttaaaagtgaagttaaatttttaaaatttgtaatcattggcattgatgaattcagtccatctgctttttgtttttcttaaaaggcttttattataatgcaaaggcataaactatttactaacaaatagggctgaaaccctgtgtgaggccgttcttgcattgctataaagaaatgcatgaggctggttaatttataaagaaaagaggtttaattggcccctggttctgcagactgtacaggaagcatggcacaggcatctgctcagcttctagggaggcctcaggaagcttccagtcatggcagaaggtgaagggagagcaggcatctcacgtgacagtgcaggagcaagaaggaggaaggaggtgccacacacttttaaaaaaactgatctcctgagaacgaactctctgtggtgaggacagtaccaaaccatgagggatctgccctcatgacccaaacacctcccaccaggcctcaccttcaacattgggattacaattcaacatgaaatttggtggggacatttattcaaaccacatcaaacccccttcccattttttatttttatcaataactttaatttctttatcatttcaggttactcgcatcttaccatgtttgcttgatggtgattgctttatcaggtctaattctgcatctccagatcttggaatattatttgaacttggaatttcttatattcgcaatgtatgtccgttgaaagataaggctttctaatgtatcagttaaaagggaaggttaaaaaatgtgtctattgacaaggaaatccttgaagtctttatgtgtaattgaattttaatcccttgaggaatgagaatgccagtgattctaattttatgtgtgctgatttgttttcgtagcatttaaaataatagtacttattcacatttatagcttgagtgaactccagtgcttttaaagaataaaaattcaaaaaggatgggactttgcagaaagtgagaaaagatgctcactggcatcccagcgccatggttcacctctgtcttccaggggcagagtatacttagccttgtaactgaggtttctaattaagggacttagcagagtagtgacttttataaagtgagtttaacttatgtcatataaactactgaaccagtgggtggggctctgtgctagtaattaaatgtttccacatactaataatagcttgataggtatagtatatatagttgacctcatggtaacccagagagcgttacagagatgttacattaatggtattacactgtccattcatttgtttaaggcaaattcatccatatgtattgtggagggggtaggactggggaaaggagcaggccccccaaaggaagccttaggggcctctagcaactgacagtgggggtaaaattccaagcagaaaagcccttgaatgattaatatctgcattctatctgtcagtgaaacaaaggttcatcatcccatgtagtactgatatgatttgagatcactccacagaatgcttatatcagtcaagagacaatggcagcagttgccacatcattggtttaagggattttcgagagcaattttgacaaaatatgattatcacttgatatactacctttaatatctgacccgcaggcaaaatgagattctactgtgtttcattttattttcttgtgaagaactttttagttctaaaggtgaatactaattttgttcctttaaaaggacttggtatgtgcttataaatttgactagttcagaccttaagtttcatatacttgtcttatttcctagtcaactggtgaaagaggagagttaagctgtggctgggtgtttcttaaactttttgatgccagtggagttcctattccagcaaagtaagttggctatatattcctaacgaatgaatacttctgtaaaaattcattttttagactcttgatacctcaggtttgttctatgagcatgccaataacttttggggagaggactttttatgttgactttagtgttgtttaggcagtgtatgaaaacagcatgcacagtctcatcctaaggaggaagaaatgactcctagagaagaggtattttaaaagatgtttgcactagccatctgctgagaatattctttcagtaatttcctatggtattaacacatttcaccatgctgaaaacagagcctagttgtcttcaaagagtgggaaagttaagtccagagtccagaggtcctctgtgagtctctacccttcctctgtaggtgggacattgaaatcacagtggcaaccacggtaaatgatttaaactttaagatcaaaaggcagactggaagcaaatactgcaatatgtacagaagagttagaagatcattatccctaatataaaaggaactctcaaaaattaataagaaaaagatcatctaaattttaaaatggaggaaaagaaagatctaaatctaggatataaacaagaaattcaagaagggacacaaatgggcaggcagtaggatggtgattaagatcccaaatttggattataaaattttgggctccagtcccagctctacccatgtaactgtaggtggatttcttaacatctccaagtctgaatttcacctatctttaatctggaagattgtaataattcctactccaaaggcttgttgtgaggattaatttagataatgcgccttatgtggcctcctgccacattggcagaggtagaagtcctgactgtacaagtcctttgacatcatcctagagggtgcattacctggggtgccaggtttcttgtgattgttatttgcttttttgtttttgtcttttaatatgctcagggtttttagttgtgcttagtggaagaaataaggaattgtatatctattccatctttctgaaagtgaagtcacagctatttttttaaatgaggtagagctctgtgtattaatatagacacattttcagtgtattagtatatggaaaaagttgcagaatattttgaatactgtgactccacttttgttcattaaaaactatttgtgggccaggtgaggtggctcacaatgcctgtaatctcagcactttgggaggccttggcgggaggatcacctgagcctgggagttatagaccagcctgggcaacatggtgagaccctgtctctacaaaaataaaaaaattagccaagcatggtggcacacgcctgtaatcccagctactcaggaggctgagctgggaggattgcttgaggctgagaggtcgagactgcagtgagcagttttcatgccactgcgctctagcctgggtgacagagcgagattctgcctccaaaaagcaaaaacaaaacaaagcaaaactgttcccagaagttgcctctgaggagcagaattgaggaggtggtgcattacaattaaagggctcttttaccttcttctttctacacttagtatgtgacttcaaaagaaaagcatgtagagtgttagttttgaagcatgtgttagttttgaaattcaccgtgtttatacatttgtttgcatttgcatagaaaagatagggcaggagattaaccacactagagaaggcggcatggggagggatttttcactttttacttatcattcctctgccattcaaactttttataataatctacacgttacttttatattttaaaaataatataagttcatagtggcctcatttcaaataatgatttaacacatttgaaaaatacattaaaaaaaatcacttgtcattaatgtaagtcattaaggtctgaacacgttaatgacttgaattaatttttctcattttcaaggaaaaatgtattttctacagtgtatagttaggaaagataattttctgcagcttataattaggaaagaaagactgtttatttgcccagatagtacctcatggagggatcaacaattattcttttcatttaccaacgaggcataaatgaaatgtctgagtatattagtgctaaaaaatatttaactactgactccagtgttttctacatgcccacagcttatatctgtcattgtatgttattcttttatagaacttatgagcttttcttgaatggtggtactccttatgaaaaaggtattgaagtggacccttcaatatccagaagaggtatggctctcatgtgttgtcttcctttccttaaagattaaacaaatagaagcatctgagaggtagctacattctaataagcatagcgttttttacttgaattcacacttttaaaaatatgtcatttgatataaaaattttaatcatttttaagtacttattttcttggtaacacatatgagactctaagacatcatgaagaatgaaatcatgaagaatgagaactaatgcattagttccttttcattgaccactgaactgatacttgtgactaatacagagactgcctattgctgggtcaaaggatgcagacatttgaaacagtaatatgcatgccaaattgccctctagaaatattgagcatcttttactatgttcattaaccaggcactgtgctagataatgggagaatgaagagcaagacagatatggtcattgcctcatggggctcagagcctgacagatttggaattccatttccactcctcagccacccctctatttgtttggtgattcaagacatgccacctctgctgaccccacaacgccagtcctgccttcttggaacagaaaggagtttggggtctgggatgcagttggttctacctggagtcagacatgctgttttcctttgtaatctggcagcaataatgctgtaactcatgtgatttagcaaacaatcctgtgcccttagggaggtctctcagctcatttagggtatatggatgactcttgcctttcattcaattcagcactactgggtggtatattttcatgaaatacttgttttattatactcactgtctcaagtacttaaagtttcgtgagttacttttgatttttcttaaaagcacacggcagtgttttctaccagattatgacaatgagaaggcagcctcaacttctagtgaaactgagatccttgaacagaagatcaagaaatgtactaaggtgggtacctgcttttacctgtccagtgaatttgggatcattcagcacttggagaccatctctgcttttggcttttcctcatatttagtcatcttttgttataatatttttgtcctctttaattcttcccccaaaggtcagtagggaaatgggtaacaaagctgaaattagcttactcttctatttactagttagctcttctaaccaaatctgttatttgagccatctagtaaatagaagacttgactaaatggggcttaccaatgcatgattctaccctcagggaacttttttaaatgtcaagtttattgagatataatttacatgcagtaaaatttactctttttagtttataattctttgtgttttgacaaatgtatactgtcatgtaattaccactacaatcaagatagagaactttccctcactctaaaaagttatctcatgcccctttgtagtcagctctgtatccccagcctcaggcaggcacacctattttctttctcagcagttttgctttgtccaaaatgtcatacaaatggaatcataacactcaggagccttttgagtctggcttctttcacttagcctagtgcatttgagacttacccatgccattgcatgtgccagtaatttgttcctttttgttctaaatagtacagactgtccctgacttactcaagatttttcaactttaccatggtgcaaaagcaaaacctgttcagtagacactatacttcagtacagattcaatgaattacatgagatatttatactttattacaaaataggctttgtattagatgattttgcccaactgtaggttaatgtgttatgagcatgtttaaggtaggcctgtctaagctctgatgttcagtagactagttgtaggctgggcatggtggctcacacctataattgcagcactttgggaggtggaggtggtagaatcgcttgaggccaggagttcaagaccagcctgggcaacatggcaagaccccatctctaccaaaaaaaaaaaattagctgggtatggtgatgcacacctgtagtcccagctacttgggaggcttaggtgggaggattgcttgaggattgcttgagcccaagaggttgaggctgcagtgagctgtgatggtgccactgcaccccagcctgggcagcagagtgagaccctgattaaaaaaaaaaaaagtctaagtgtattaaatgcattttcaacttatgatattatcttcaacttatgatattttcaatttatgatgggtttctggggctataacccaccataagttgaggagcatctgaattccctttgatagatatactacaatgtgtttattcattcacaaattgaagggcatttgggttgtttctaggtttgggcaattataaataaagctgctttaaacatttgtgtacaaattttctgcatgtggatatatgtcttcatctctcatgggtataaatacctaggagtgagattactgggacatatggagtttaactttataagaaactgccaaactgttttcatttttctttttctttctttttttttttttttttgagacagagtctggctctgtcccccaggctggagtgcagtggcaccatctcggctcactgcaagctccgcctcccgggttcacgccattttcctgcctcagcctaccgagtagctgggactacaggcgcccgccaccacgccctgctaatttttttgtatttttagtagagacagggtttcaccatgttggccaggatggtctcgaactcctgacctcgtgatccgcccacctcggcctcccaaagtgctaggattacaggcttgagccaccgcatccggccctaccaaactgttttcaaaatgactgtagcactttgcactctcattagcaatgtatgagagttccagttactctatattcttgacagcacttgatatgatcagtttttctgttttggccattctaataaatgagaatagtggtttctcatggtgttttaaatatacattttcctcagggagtttgtaaactaataaaatctcagatctatcagtttctcactcagtaccctcctagactagtcatttaacatctctatcagggtcttaatgtctacatctttaaaatggacataataataataatatcaaccccataaaggtgtaatgaggtttaatggaaagaaaatacataaaacagccagtatttacagtgtgtggcacatggtaactaacacaatagtgttagctataattatttactactataattatcttatatatagataaatgtaaacataaagccaggtagatggtgctatatcataaaatttgttcaaatgaagatgtgtagctggtaaaatcagggggcatttgaaatcacctttgaaggattgggaagatgcagaggaaaggagctccacagaggaggcacaaggccaagagggggaaggaagagcatggcatgggacagagactgttgcagctgaactgtcccaccatgacctgctcattgctcacagattattaagaagtagggaagtcagtgaagacttggcatgctcctgtgaatggtttttctcattccagatcatagtcttagcttaaatatcccttgttcttaccactactactgaaatttattttataattatagtgttaacagttcaatctttcaatagccattaataatgtgttcatgggtattatttactctcttagcttttttcccccttggatgttcatagagcctgtaaatcctcttttttggccagcctttccttggaaaattgttatttttcaagattagaaagaaagcagcacagtagtagtctttgtgaaagaaaacccaaatcttgtttggcctcattcttcctacatctttggcctccccactcctcatcttgttgataagcttccaagagtccggaagcactcccatgtgtatatttcaagtacagctcttaatagtgtttctttggcccccaaatactggttttcagacactttgtatgacctcaagatcaaattggactgtgtggtgcagaagttagcaaggcagccccttcttcttaagcagtgaatgctctactgtatgctgggttcttaaaggtcctgtgtccttgtgctccatacctcaggactgcgtcatttgtttcattacagtacagaataggcacccgaaaaatgtttgtgaaataatttcaaagcagagctctccctgctagtgtgaaaatatactcctcaggacttccgctcagcttccacctgtccctggcctccctctgccttgtcttggtgtgtgctcttccacagagagacttgagtgctggcttgaaattgcctctccactttgcatgaccccaaaatatacattcctgggaatttcaaacgtgagttgggacacactgctggtgcaactccaggctggctcgcacagaaaccagcttatgggcagtgaaacctgggccttgcagcagggctgggggctgtagtcagggggcggggtggggctgtgctgtgggttcaaggtaagagactaggcaccagcctgggcccttttggacatcactgagcctgtgcatcctggaggtggagactgaagcaggactgatccatttcaacatcctctctcctcccctgacccgaaaccttcggtaggtgggagaacaagacgggtaatgacaccaatagtccttctcctcctctccttcaaaggcacgccccgcctctatcctcaccctcccttctttacaaacttcacctttgtttatgcaaacttctctgctcaaaggagaaaggacaggggctctttccattatgccaaaggacatgagacagtggagacaaggccaagggcagaaagcctagttagagtttgcattagtgcccatttttacccagtgcccttgctgtttggctttacactgccctctctgactcagccagcagtcctacacatgtatatcttttggatatcaggaatcctgtgaaaatgtgaattattcggtgtagaccactggcaccagagtcctgctcacggggcttggcagtcttcttttgtggagtaggttgtgatcatggcgaccttgtcaacataagaaaaagagagcaaatagatgcttcagtttcaccaagatttgtcttttggagctatttttcaaaagggtttaacttgatgtgatttgaccaaaagcatgtgtataaacccctgaggagggaaagccctgaatttgacttcagattttcagtgcatgagttctaaatatcaagaaaccctgatctggagaagtaggttgcgtgtgtgtgtgtgtgtgtgtgtgtgtgtaaatttgctataaattcattatccttttttttgatgcattccatcttttttctcctttactttcattatatcgttgctaaaaataaataaggtaataatgttagttgcttgaatgcttgagacccattcattgtgttcattgccagagtttgctggtctacatgtgaattcaggaggaagtatatttttacttacttaattcagctaacctttagcagcccagaactttctattcgtcttaagtttgggaaaatcagatgctttctctaaagaatatctaataaagggcaagcagcattgcttcatgttgtgagaaagtgccagaaggaaaggagtgcccacactgggtggaccaatgcctgccaggcaaagcaggcaggtctacgagaaaaggagagggccaagcagaaggaaggaagttcccacccctttccctggcaaaaccttggctgttcttcatcatgagccctgagtttgggcatgcagctgaaacactgtgcaatgggaccgtggaccaaagggcagaacatgagcatgttgttcatgctcaggtcgttctgccccttgctcatgaacatgtccatggtcccagaacaacccagaatcagagcctgatccctgagaaagcatgtggtgacactgaggcagctgaaatggtcccctgcatcccgtctttaaaatgtaggtcaaatgtatacaagatcagaatttagccaggttgaaaaaagacagtttaaaaaagacagtttctgaccttatgtatcacatgctgtatatcaagataactgtgctaagagaacctgtattatatttttagatgtttctagaaattcaggatttaaagagtggtcaaggatacttctttaattccatgaaacttttttttttattataagttttagggtacatgtgcagaacgtgcaggttagttacatatgtatacatgtgccatgttggtgtgctgcacccattaactcatcatttaacattaggtatatctcctaatgctatccctcccccaccccaccccacaacaggccccggtgtatgatgttccccttcctgtgtccgtgtgttctcattgttcaattcccacctataagtgagaacatgcggtgtttggttttttgtcttgcgatagtttgctgagaatgatggtttccagcttcatccatgtccctacaaaggacatgaactcatcattttttatggctgcatagtattccatggtgtatatgtgccacattttcttaatccagtctatcattgttggacatttgggttggttccaagtctttgctattgtgaatagtgccgcaataaacatacgtgtgcatgtgtctttatagcagcatgatttataatcctttgggtatatacccagtaatgggatggctgggtcaaatggtatttctagttctagatccctgaggaatcaccacactgacttccacaatggttgaactagtttacagtcccaccaacagtgtaaaagtgttcctatttctccacatcctctccagcacctgttgtttcctgactttttaatgatgactgttctacctggtgtgagatggtatctcattgtggttttgatttgcatttctctgatggccagtgatcatgagcattttttcatgtgttttttggctgcataaatgtcttcttttgagaagtgtctgttcatatccttcgcccactttttgatggggttgtttgtttttttcttgtaaatttgtctgagttcactgtagattctgtatattagccctttgtcagatgagtagattgcaacaattttctcccattctgtaggttgcctgttcactctgatggtagtttcttttgctgtgcaggagctctttagtttaattagatcccatttgttaattttggctttggttgccattgcttttggtgttttagacatgaagtccttgcccatgcctatgtcctgaatgagattgcctaggttttcttctagggtttttatggttttaggtctaacatttaagtctttaatccatcttgaattaatttttgtataaggtgtaaggaagggatccagtttcagctttctacatatggctagccagttttcccagcaccatttattaaatagggaatcctttccccattgcttgtttttgtcaggtttgtcaaagatcagatggttgtagatatgcggcattatttctgagggctctgttctgttccataggtctatatctctgttttggtaccagtactgtgctgttttggttactgtagccttgtagtatagtttgaagtcaggtagcgtgatgcctccagctttgttcttttggcttaggattgacttggcaatgcgggctcttttttggttccatgtgaactttaaagtagttttttctaattctgtgaagaaagtcattggtagcttgatggggatggcattgaatctataaattaccttgggcggtatagccattttcacaatattgattcttcctgtccatgagcatggaatgttcttccatttgtttgtatcctcttttatttcattgagcagtggtttgtatttctccttgaagaggtccttcacatcccttgtaagttggattcctaggtattttattctctttgtagcaattgtgaatgggagttcactcatgatttggctctctgtttgtctgttattggtgtataagaatgcttgtgatttttgcacgtggattttgtaccctaagactttgctgaagttgcctatcagcttaaggagattttgggctgagacaatggggttttctagatatacaatcatgtcatctgcaaacagggacaatttgacttcctcttttcctaattgaataccctttatttccttctcctgcctgattgccctggtcggaacttccaacactatgttgaataggagtggtgagagaggacatccctgtcttgtgccagttttcaaagggaatgcttccagtttttgtccattcattatgatattggctgtgcgtttgtcatagatagctcttattattttgagatacgtcccatcaatacctaatttattgagagtttttagcatgaagggatgttgaattttgtcaaaggccttttctgcatctattgagataatcatgtggtttttgtcattggttctgtttatatgctggattacatttattgatttgcatatgttgaaccagtcttgcatcccagggatgaagcccacttgatcatggtggataagctttttgatgcattccatgaagcttaattactcgtggaatccattgctgtcacctcatcacagtggtcacattcatcctgttctcttccaacaggctggaagcctgaatattacctctgtgataattttcccttctaaaaatctaatcttaggaattaagataaaggattaatttacaaaaagtaagatctctttttaaatctttggtgatttttctcagcccaaagacatcttccttttgatagaagacaacatatcatttgtaaggtttttgagattttctatatggtccttcctcatgcttaatgacagagtttatatatttctaaaaatagtattagaaatatatattagaatgatctaagatattttcttgagtactttcaaaggttaaatcttgtgcatgatacattcccagtatttactatacatcatgtgtgagggtcttaaagaactcacttttttttttttttttttttttttttttgagacggggtctcgctgtgtctcccaggttggagtgcggtggcgcaatctcggctcactgcaagctccgcctcccgggttcacgccattctcctgcctcagcctcccaagtagctgggactacaggcgcctgccaacacgcccagctaattttttgtatttttagtagaaacggggtttcaccgtgttagccaagatggaagaactcacttttcatgtttccagattattattttgaaatctaaatattgaaattttttatatttttaaatttctgactattttttgatgctattgtaaattgttttgttggtttccttctcaaattgtgcattgttagtgtataaagtacgatttttacgtgttgattttgtattctgcaactttgctagtcatttattctgaaggtatttttcatggagtatttagggttttctacatatattctacatatttctacatcattttgtctgcaaacaaagacacttttctttttttagaaaaatatttccattattgtgttgagtaaaagtggcaggagcaggatccttgtcttgttccttatcttagaggaaaagctttcagtgtttcaccactgagtatgatgttagctgtgggcttttcatatatggcctttattatgttgcagtagtttctttctattcctagtttgttgagtgtttttatcatgaaagggtgtcaaattttaggctttctcagcatcaattgagaaaataatgtgggtttttccccttaattctgttaatgtagcacattatgttgattgatttttggatgttgagccatccttgaatttcattaataaatttgacttggtcatggtgtacaagctttttaatgtgctgttgaattcactttgctagtattttgttgaggattttgcatcaatattcaggaatattggcctgtagtttttttttttttttcttgtagtattgttggcttttttactagggtaattctgacctcataatgagtttgatagtgttttttcctcttcattttttggaaaagtttgaggaaaattggtgttaattcttctttaaaggtttggtagaattctccagtgaagccatctgatgctgggcttttctttatcaggagattttttaaattactgattcaatctccttacttgttattgagattttctatttctttgtgattcagccttagtaggttgtgtatttctagaaatgtgcctgtttcatttaggtcatccaacttgttggcatacaactatttatagtactctcttacacattttttatttctgtaaaatcaatagtaatatcccctctttcatttctgattttagttgagtgttccttagtcattctcactaaaggtttgtcaattttgttcatcttttcaaagaacagagtcttgctttcattgattttctctattgtttttctattctttattttgtctatatctgacctaatctttattatttcttccttctgctagttttgttcttctagttccttagggcataaagttaggttgttgacttgagctcttccttcttttttaatgttaagtatttatagctataaatttccctcttaggactgttttcactgtatcttgtaaattttggtatgttgtgttttcatttcatttctcaagatattttctagtttctcttgagatttcttctttgagccattgttgtttaagtatgttgtttaatttccacatatttatgtgttttccagttttccttctgcttttgatttctagtttcatttcattatgattgaaaaaagatattttgtatgatttcaatatttttaaatttattaagacttactttgtgactcaacatatggtctttcctggagaatatgtcatgtgcacttgagaaaaatgtgtattctgctgttgccgggtagagtgttttgtaaatgtcagctagatccaattagtctacagtgttattgatcttctgtttcattgttctataccttatcgaaagtaggatattgaaatcttctctattattatagatctatgtattgctcccttcaattctgtcagtgtttgcttcatatatttaggagcactgatgtttggtgcatatatgtttataattgttatatattctgaattgactgttttatgattgtacaatatcctttgtctcttgtaacttttggggggcttgaagtctattttgtctgatattaatatggctaaacatgttctcttttagttgctatttgcatgaaattttttttctgttctttcactttctacccatgagtgtcctaagtctaccgtgagtctcttatagataacatataattaaatcgtgtttttttagtgcatcctgccaatctgtatcttttgattgaggagtctaatttatttacatttaaagtgattactaatagagaaggacttacttttgccattttattactcatttgctgcttatcttatagctttttttgttcttaatttcctccctcactgattttctttgtgtttgatttttcatagtgacaaattttgattcccttttactttccatttgaaaatattctatagttattttctttgtggttaccatggtattacatataacatcctaaagttataacaatctattttaaactaataccaacttaacttggtattgcatacaacatccttaggttatagcagtctatcttaaactgataccaatttaacttcgatgttgaattattttctattttttagcccttactgtataccagacactacattaagcactccatacttatttcatttgttgttgttgttttgttttgagacagagtcttgctgtgtcacccaggttggagtgcagtggcacaatcttggctcatggcaacatccaccgcccaggctcaagggattcttctgccttggcctctgagtagctgggattacaggtgcccgccaccaaacctggctaatttttgtattttcagcagagatatggtttcaccatgttggccaggctggtctcaaactcctgacctcaagtgattcacctgtctcggcctcccaaagtgttaggattacaggtgtgagccaccatgcccagcccacacttacttcattttaatccttttagtaaccttctgaaatgcaagtattactattggtatccaataaatgaggaaaccaaagcacaaggagatgaattaattaatttaaagtcacatagctaagaagtgacaaagtcaggacttattccaggtctgtcacaccctcccatgttccacccagtactgtgaacagcctgaattatttcttctgcattcaccaaatcaggcatggcagccacatgcctttgttaaagcttgtagctgactagtccccttctttccaaaacataattagtggcttcccgtttttatttgacatttaacataggtatatatgctaacatggaagcacaaaaatggcaacacagggttgagactcgaaagtgtaaacaaatataaaaagttatctgaaatttaatgtggcctacttgtagtagaaatttttctttaaatagttaaaaatgtgttccagtaatgaagcaaaatttgggactgtttattaaagtaatatacatcaaaacattataagttggattgtaggggattgtctaatgaatacatttttttcttctttaatagtctactgccagaaacattaattggaaatatgtgttctattcacttgttgatattttatcgacaaattcttggagatgtgctcctgaaagacaggatgagcttgcaaagtactggtaagtgggctttgccacttccttatgtgcagtaatgcttcatactctgagtaaaggtaacctataccatcttgtatcttctgtttctggttgtgacttttggaataaaatatttagaacagcattgatgttaatacattacttatgggacatcttcagatccaaagcattgagctttgtgaactcgacacatattcagttctttcaaacatatgtattttcacatttcaaattctagagttttgagatcccaagagtcagatatagtcatattttcccttaatgtctctgagtaatctgttttttcccatgtgtttggtatgcacataatcattttgaagagaaaccaaaatcaaccaaaatagctggttcttagtgcatgaagtataagtatcaaatggattagtttaaattggtgaatccagatatggagtatttgggtgtcctatgtactgtctttattcttgcaacttttttgtacgtttgaaatttttaccaagtaaaatgttaaaaaataagtttaaaaatcaatgagtcaccatacatgattgaacctgcaaagataaatgcatgtgttatagtaattgccttcaaaaagaaaagcagtttaattgtattggctcttctttcagttcaataaatcagtaaccagatatgtactgagtacctggtatgtgccagatattatgctaggcccagtgatgaatgagacaggcataggcgtcccaggcctcaaacacataatttcatgaataatcctctccacccttttgaaataagtgctgtgaaggaaaatacacaacgagaacatgcactgggaagacttgattaatgtgtagggtaaggaaaggcttctttgagtgagtaatatttaacaaaagatgtgagagaggaattagacctatgagggaagtgtgtggggaaggattctttctgggtagaggggccagcatgtctgaagacccaaggaaagaagacatgcatgtgttggagggcttgaaattgaggcaggccagtatggatggagcagagtgagtgagaggcttagcacttgtggacaaataacattcataggcaggagtcctctcccagggacttatcacctggatagataggtagaagtggaactcaaaggcagagaagcgcagaaagttctcaaggaatcattataactctaagggggaggacgggtaagccttttaatcaccattgcctttgaattcattttcatgactcttgagaaacttcatgaatgatgtgacctcttaaagaggataaggcttgttagttttcccaataggtaagaagtttactcagaattgttgacttcatttgaatttaatcattagaataaaatatcctaataatatctaaagaatgaatttttctctactgaggacaccagattatagaataccttgcccttgccatttcaaaagtgtctgctatggtttcagtgtgtcccatctaaaattcatgttaccaatgtaatggtattgaaaagtggggcctttgagtggcgattaggccatgagggctgttgccttatgaatgggattagagacccttacagaagggcttgacaagggaattcgtctcacccttttgccttcagccacgtgatggcacagtgttcctcccctctggaggatgttgtaagaaggcccttaccagacaccaaatgccattaccttgatcttggatttcccagcctccagaacttggagaaataattttattttgtttatgttacccagtctcaggtattccactacagcagcgcaaacagactaagacatgtctttcctgatgtgcttctttgcacagatttttcatgtgctgttatctattgtgaaatgtcaatattctccctcactgtgtttggtcatatggccagaatcctcaattcctaattcttccagtttcacctaccactgtctgctggctccagacacaagtttgggtccttccctgagcgctggtggcctggaatcagacctgagcagcaggtcctctgtctcctttccccccaatgcttcctagtttctgctcagtctcccaagagcagggctacctctaaggggaagattccttttaccatgccacagccataaggaagaaagagaagttgaagaaaaacacagaacaaaattttctagtcttattctgttcagagcctccttgcccttactctaaaagctccattaatttggtacaggaactcaccaggatatgggtataggggcaaatgaaggttgaagggacagctttgagctctcctagaagtcaaagtgtgtagaatgtgttatcaacaaatcatttggcacaataattttcatctgaatatttttgtgtctattgcaataaaatccattgagtgaagtttgcataaaattctttctgttgttttgcatttcagatttaattagccatcccatgctggccaccttccccatgctcttggagcagcctgatgtgatggatgctctcagggtgggtagcatgcattgcaatggaaacctgctggcttatggaagcagttatacactctgtgttaatgagttctgtctaggcctttttttttgttactaggatgatgtctcccaatccctatccattgtctaggtaactcagtcctcatctttcccatcttagcataaattcccaagggctgccttccctgacccagggagcaggtggagtgcctgctatgtacactattgcaatctttgcccattttttccttgacttaggatggccactgattgtgtcctaagagcaaaaatccaaaatggtctgtaagataaatcaattgaatttgcaggggagaatcagggcatgcacatcatctttaattccatgtgtgctgtttgctgtctgaaataactgttgagtgttatgttaaatcgtatgaaatctccaattttcagccatttttggcctaagtggcagtttcatatggtttagcctaatacatcagggtcaataagtagaagagctgcatgcatgcaaggcagatacacaggtaacatcacaagtgccatgggggaggtataacccaggaccttgaagatttaaagaaggcagcaaagaaggatccaaattctgtttcactagagaggtcctgcatgagagagcctaataaaggccagggccaagaggattttgacctgctgagatgggggtgaagacgttgcaggtagaaggcttagcatgagcagacgtttgaggcaggaaggaatagagctgacagtccagcttggcatgtcagatgcaagtaagggagtggttggtagatgggcaaggtaagcctgagtctcggtgtggggctgagggcggtggtaggtggtgggtaacccaggaaggtttcttctttaggcaaactctgccaagtgcaaagaggcagaacatgtgcaggagggaggtgagcatattagggggtgactcctgctgataaaaactaggccatatgcacctgacagcagaaacagaaggaggactcagtcatctacaaagattcttattagactttgaaaccaattcatatgctagcttggctgggttggggggtgtcaatagtaataatgacattttcaacagagatgtttaagaaaatgttcatggtacatatgatctcctgtaattttagataagttcgtctggcactatagctagataatgcagaatttctctttcttctcctataaagtcactagtatcataataattattcattacacagaacatatatacactgattcttcaacaaagatttcacaagagcctactatgtattaatataaggcactgtgctggccacaggaatatttccctaggtgtgtaacaggaatctgcaccttgttcttaggaggaaacttaggatccctaatctagtctaaaatctgcatttccctgatgagcagacagcttggagatgtgcagtgacttggccggccatggagctcagccatgacccagccggggctgtccctgcgggtcagctctgggtgcacccagaatgtgccacgggctgcttgaaagcatgagggtaaagttgtgcacatatgttatttagcaaaaagaccccatttgagccataataagtataaatatatatacatttatatacctgcctgtgaaaagatctggaagaatatattccagagaggtattggtgaatatctctggatcttggattattttatctacattttcttaattttttcacattgaattatttgtgttatgataattttaaaaaagaaagtggtggttgtttctacacccatgagccttcttctctccgtggcatagtgtattacttaggagaagcttggctgtgctgtggtggttagcacaggtttatttcttacccatggtatgtatccagcatggatcagtggaagatgctgctccacagtcacccaagggtacaggctggtggagcctctactgtctcacagcaccatctggaacaagtagctgcctctgttgccagtttccctgcagaagagggagaatggagaattgttcttgggctttcactgcctttgcttcaaaggggcctgggccacttctgctcacattgcattggccaaaaccagtcacacggtccatttaacttcaaaggaggtatagtcttctttttgttccagaagaaaggaagtggatcttggtgaggtaatagtgacctttaacacgtttgctattcccaaatgagttactctaagtgaaacatcctactatttgctggtggctgaatgaaaaataaggtgggacattgacatgtaactaacaaaaatagacaaattttaccagacactaagtctacatttgctaagtgatactcacgttaaaccatattattaggttggtgcaagagaactgtggtttttgccataaaagtagtagcaaaaaccacaattacttttgcaccaactgaataaaatttaaaatgtacagcatgtgagcctcctagagtttacttacctagcacagttcagtttgtggatgacattttaataataagaagaatggcacttggcctgtttagtaaaacactctggttctgtaagggtcctcttcaaactcctaaggacccatagcacagcagttaatagggtggaggaccatagtcccctcacgtggtaataggtatgaacattccaaaatgttctcatgagtggcatagtctgttatctcctgctgagaaacgctctatcaatgcatcatttattttatggagaatctctttattggtgccatatgttatgttcatcccagggcctccctgctgagaaaggtctgatgctttcaggttactcatgatatcaggtgccaacaggaggatatctactgacatgcacagaacccagaccctggaacaggcagccgtgagactggtcatattccacccacgcattcagtttgccaggaaatggcacagtgaaagtcttaaattcatacttctgtgggactaattgaactctggggtttttatttatttgaggaaatttctgtgaagccctgtggacagattagaaatatttactcacaaaattgtacttcagtctgtctcattctgaccattgtcatcatcatgacagagagaattgtagaaaagtttggtatttggcagtgttttctattttcattactgtcttacttggaaagcttaatactattttattattcaggtgctgtggttgtatagttttcatggatgtgttagtgtttcgctgattctattcttaagttagttttgatttataattatcatgggcttctacggcatttttcacagatacatctgcctggtcattctggtgctgggtcatttgcaatagattcctaattacagattcacttcttgcttgtatagaatctgtacagcatttttaaccctgtccataagtttatttacagagtaaatttgcataagtgttgcaaggacttgttactacttggactaacataatatttctgtttgctctttagagttcgtgggctggaaaagaaagcacattaaaaagatcagagaaggtaaaatatgagtctccacactgaactccatatttgcagtacctggtgtttgcttgcctattctaatcatgtctcttttttagcaaaagtagccatagtcataatccctcttaaccagggaaactgtttcattatggctgcaaaaacacattccaagagggttacgcatgatcgttagctaatgtgagaaggaatacttgttcaagacagccatttcagattactgagttttatttaaataaaggggaagtttctaagccaaagtctctcagttgtgtatcaaatttcttttatttttaaaaaacttctctagctctcaaagcctgtatcaccaagagaagggaaaaaaaaatggcctgagctgtaccatatattgaaaacaatgcattgctcctgcttaccttgctataaaatcatggtaattaccaatccgaacttgctttaatcggtgagtcgtggtttgactgctctcatccaggatttggcaaatgggaagggctatagatggaaaatcttcttggcttttcaggtcttgtggtctctgtcacactactcagctctggtgttgtaacacaaaagcagccacagacaatatgtaaatgaccaaatgtgactgttttcctataaaactttatttatgaaaagaggtgagagtccacatttggcccacagtccatactttaccagtcctgatctaaagtattcattatctacaaggaaaatgaagtaacaaatgagctgaaaaccctaaaaattaggaaacaatttatacattgtatccttatttcagcctccatttgatcagtaccatctacatacatgtgactttgccaaaactgccaggcttagtgctattctagtacagcagccttgggcctgtagacattgcccttatgtggacatgtgtggtgggatgggtgatatctctgtgtagactctgctgcctgtggacagctctgccctcaacttgctgtgctctctgagattcccaccatggcctgtgggcatcggggcttgacatgggtacagctgatgctgcaccattcttatctgtgaagggtctgacatcctcatcaccaaaggacccctcgacctccatcccaggcattgctggaaataagccaacaactctggatcctatgcagaacacctgctacaattatcttagataacatgacagttacctctgatatgctgtcagtaagtaggttcagctgacttggcattgttttagttatatttacccctaaccacactggtgtcaccaaaattagactgcaataccttgacagaatgtgtgagacaccctccatggagcttaggagacaccctggtctcatggagccacgtagaggctctcagggagaactgctccactgtactctgtgtaactctgctcacttccacttctgaagtgccatgtcctgcctgagcagctggctcagagccgatacctgccaggcactaatggcaccctccatcctacctcttaggtggcttttagttaatagagttcacagaatttaacactttaaaaataacaatgttatttgtgggggtggtgttttcccagagagacaaagagttcctgaagtccacgtttctcctggtttaccatgactgcgtgctcccacttctccactccacacgcctacccccattcaggtgggcagaagaagagactgagactgcacggtggaaagttatcactgacttccttaagcaaaaccaagaaaaccagggcgccctccaagctctgctgtcaccagacggagttcatgaaccttttgacctttcagagcagacctatgacttcttgggtgaaatgagaaagaatgcagtgtgacagtggcagcctctagccctcagcttcccacggaatcagatggatcctccacgattacgtgaataaaatgatggaaccaaaaatcactgtcactttacaacttaggttttactcttttctttctacagaccatatttttaaagaaatgtttatacaataatttaaatattttttaaaaccataaaataaatttttataaggaatactgttatatctaaatttaaacagtatttattttttcaaaaacagctacttaagttaatggtatagatttctataaaagcaagattttgtcaaaaactaaatttatgattattcaagaaagtgaaaaaaacaacctacagaatgggaaaacatatttgcaaatcatctaactgataaaggtctagtatccaaaatatttaaatttatgagtgttaataaaatttatcttgttcaatgaagaggaagttaaa

SEQ ID NO: 15702 - DNA, 81414 bp, Homo sapiens
aactggagcaatcagagcaccgcagccagggagatgctggcgagacgacagcgagatcctctccaggccctgcggcgccgcaatcaggagctgaagcaacaggtatggtcaggctgtgcagagggccctggggcgggcgacaggcggacgcagctgcgcgcactgcgccttcccaccgtgaccccacctaatcctgggagcttgcccccaacctacttaccttcccaggttgtaacgcccccttaccccataacattccagcacccaaccccgattcaaacccctcctgatcccaactcaacccccagccaaaggcgaaacctcccaaaattcgtgaccatcaactaagcgccccctcctccgaccctcactcccacctaacgtctcaacctcctaccctaacaactcactaacccaccttatctcccaatctaaacttagtggtgtaaccatttccaacccaactctgagcctagctcctctcctccactttccaagcccatttcctttcagccttcctcaagtggagattattattgcctccgtgaactcaagcgaaataggtgtcaagaaatagtcttaatatgcaagaacattaagatctgataaatgagcaaaggaggtgaacgagagaggaaatacaagtaactcataaacatacgaggaatgttaacttcaaagatactcaagtaattgcaaagcacataaggtatcacaaaaatgttaaaaatcacaacactctgtcttgaggaaggtgtgatgaagcaggcacattcactgctcccgtgtataaggtgcttgtacagcatttcaggaaagcagcttgacaaggtgtaacatatgtgtatgcacctaggctcaaaaattacatttccagggatctgctatgtgtaataattagaaagtaggacagagattgatgtataaaagtattcatcacattgttacttatataatatacacagaacagcatagaagggaacaggctaatatggtatttctgtgtgacaggatgctgatgattattatgattttctttattctttttcatatttataaaaatttttaggccaggtgtggtggctcatgctagtagtaccagctacttgggaggctgagacaggaggatcacctgagcccaggagttcgagactagcctgggcaacataacaagacttggtctcaaaaaaaaaaaaactttttaaaaatacactgagttcttattaaaaataagaaaaaagtaaatagcaaccagtgggtttattttctgacattttaatttcactttaatttttttcatgtgatctattaccaagtatttttccactgagtaaaattattttataatctgaggccggtaagagattcactgatgctcatattttatccatttttgttctcttgtttaaagtaaaaaggatttggaaggtaaatatttaggtgactgtgtattggaatcacagtggtgcaacaaaagctaaatactcttctggtagaaataaaaaataaaacttgatggggcattgacttatgctgaacttcggtggatcttaatatggttctgtgtcttattttaaaatttcaacttttattttagattcagggggtacatgtgcaggtctgtcacatgggaacactgtgttatgctgaggtttggggtacagatgagcctatcacacaagcagtgagcacagtacccaataggcagtctttcagtcttcattcctcttccctcccccaccccactccagcagtcaccagtgtccattgctcccatctttatgtccatgtgtactcaacgagtgagaacatatggtatttggttttctgttcctatgctaattcacttaggacaatggcctccagctccatccatgttgctgcaaaggacatgatttcattcttttttatggttgcatattttttcatggtgtatatgtaccacattttctttatccagtccaccattggtgggcatctatgttgattccatgtctttgctattgtgaatagtgctgtagggaacatacacatgcatgtgacattttggtagaatcatttcttttttgggggtatatacacggaaatgggatttctgggtcaaatgatagttctgttttacgttgtttgggaaatctccaaactgctttccacagtggctgaactaattttcatgcccaccaacagtgtatatgtgtactcttttcttgtcagcctcaccagaatctgtcatttcttgattttttaataatagccattttgaccagtgtgagatggtacctcattgtagttttaatttgcatttctctgatgattagtcatgatgagttaattttaaatttagtgggacattaggagaaccaggaaaagttttagaaggaaactataaaaatgattattaaaacaaactattagaaagattattctccctggagaaatattggctctggagccttttgataccttgactatctggaaagtttgttttgatagtattagctaattcttccctgtcttcacagaggacacctgaagctgaatatggaacagattttctattcggtgtctgtaggacaagtaatcaacagcccctctgagtcaggcctgtgatgactggctctatcactaggtgtgtgaattttgtaaataacactcagatggatgccaaattgcaagagtagagaagaaactaatggaattttctcttttttcatccactttatcttctctacgtaatctatagaaaacagaccaaagaagtatgtgcctttttggagagtatattgacaaagttacatatagtgttagtaaacaaactactaagtcaagagaaacaaagtcatgatacattcaatacaatggataccactcagtaatgagaaggaatgaactaatggtacacacaacaatatggaagtatctcaaaaacatgctttgtggaaaggttacacaagagtgcttactgtatgagtccatttatataaaatttcaagaacaggcaaaactaatttatgttggaaaaatatcaaaacaggtttgtctgtggaggaataaggaggggatttactggcaagggcatgagggaacttactagggtgatggtagttttctacatcttgataagaattttggttacacagatgtatgcatttgtcgaaactcagcaaatgtatgcctcgtatttgtgcatttcactatatacatattttacatcaactattgaactttagttagtgacatccatagtccattatttagggagaaatgtattgataactgcaacttactttgaaaggcataaggtgggttgacggatagatcaaataagtatagtataatgttaatgttttttctaggtagcgggtatatgggttttcactgtaaaatttttaaaactttgttgtatgtttaaaagtgttcattataaaatattggataaaaaaagaagttttctttcctaaggcgatatggtatttaataatgtgatattttaaatggtctccataggttgatagtttgctttctgagagccaactgaaagaagctctagaacccaataaaagacaacatatttatcaaaggtaaagtatgctaaattatataagctttacaggaaccgcacttacatttcaatgcatagtatttaaggcatagagattggtcctttggaatcaaatggaagaatcacatagtgttgtaagttgaatgtagaagaaaccaacctaaacctgatggttgcggacttgctgttgtgacagcaactataaaaactgcttaatgtaaacataggtgacatgggcaggattaccctaaatccttagcctatgtagcccagatcctgtgacctggtcagaaacctctgtctataagcaattagtacttcattgggatgtcaactttaactcccatgagaagacaacactgttttctaggtgggtgttttttgttttgtatttgtttttacttaaaaaaaaatccttgggagagtttaaatagacgtgatgaactacatcaaatttagactattaattcataacatttgtattaagtttaggacatcattaagataatctttgtttttgagatatttaaggattttattacattccaaagaacatgagattcattctattaatttaagtgaattgtaattgtttggagaagttttacttaagtcaggcattcagagtgcttaaaggcaaaacaaatgaattttgaaatgtcaaatgaatttaatttataatagtaggattgattaagggatttagttcaagctgaattaacagtaatgaaagaaaagcaaaggttattgttcttgctttactagatttaaaaacagagtaagatttatagactgaatttgaaggccaagggaaaactacgtttttaaattttatgttagtaaactaaaaatcataattattattattttattttttgagactaaatctcactctgtcacccaggctggagtgcagtggcgcaatctcggctcattgcaacctgcacctcccaggttcaagcgattcttctgcctcaggctcttgagtagttgggattacagtcgtgccccaccacacctggctggattttgtattttgagtagagatgggtttcatcacgttggccaggctggtttcgaactcctgacctcaagggatcccccagccttggcctcccaaagtgctgggattataggtgtgagccactgtgcccagcctaataattgttatgttttattttttttgagatagagtctctctctgtcgcccaggctggagtgcagtggcatgatctcggctcactgcaagctccacctcccaggttcaagcgattctcctgcctcagcctcccgagtagctgggattacaggtgcccgccaccatgcctggctaattttttgtatttttagtagagatggggtttcaccgtgctagccaggatggtctcaatctcctgacctcatgccccctgctttggcctcccaaagtgctgggattataggcgtgagccaccgcgcccggcccctaataattatttttaagcccaagtaaccatagtcttctctgtgcatgaaaagaagattgttactgtcatttaaaaactcactttgacatttgcatatctgaaaatgtcatttaggtatcatttttatctgctcagtgctctgagtcttttcagtttgaaaactcatgtctcatgagctctgggagattttattttacaaaaagattatttcgttaattccatttgtctgtttcttcctgaaacacctttgagtcaggtattggatatcctggactgatcctctatatcccataacttcctgttaatagtttctgtttctttgtttgtatgggagatgtttttttggggggatgtggggggtctcactctgtcgttcaggctgtaatgaagtggcacaatcatggctcactgcaccttctgcctcccaggctcaagggatgcccccctcccccgccacgagctaccatgctagcaattctcttgactttaacacttttctttattacctatttcaacagccatattgttttatttcagcagtcatattggtttttttttttttaagatggagtctcactctgtcatgatcttggctcactgcaacctctgcctcctgggttcaagcgattctcctgccttagccttctgagtagctgggattacaggctcacgccatcacactcggctaattttttgtatttttagtagagacggagtttcaccatgttggccaggctgctctcaaactcccgacttcaggtgatccacccatcatggcctcccaaagtgctgggattacgtgagccaccgtgcctggccatcatcagtcatgttgttaatttacaagtgttttctcttgttctcgaattgttcttttttcatagcatcatgttcctgttttcatattgattgccttcttactacttccatgactaggaggctttttttttctccttaagttctcttctgttctctgaattgtctttgctttctctgggctcagattccttttaattagttaattaattaatttatatttggttattcttaaattttatcttcacgttgccggttttctttattaggtctggcttatctatttttattgaacaatgagggactaggttgattattccagagagctctcatgggcttttctactgttagatagagaggggtccttcctgctagtaccatcccctgaataagaatgaaattttgtatgttgatagggcttatcagaggctcggaagtagcttttagtctgaggatcccccagtgccagaatagggccggctctaaccctggtgtatgggaaacttctttagcagtcatgattctcttcaggtcgtttgttaattgtttttgtttgtttttttgtttttagggaagaatcccctggtaaggagggagagcagagaggggaaaagggagctaactggctcaggttttctgtaaatagacttttaaaagaaagaaccccaactaaatctaaacgtaatcagtatcattaatcttcccttgactaatataaagaccttagattgctttaacattgatttccctcctcaaagcttagatgtatgcatatgatttaatttacacaatataacacaataatattagataatttataaagtaaaccccagccactgtgcatgtcttttcatcagcagaatttcataatgtgtccctctatgatttagtttagttaacctttggtcctttatgtctgctgactcaagtcctagagttttcggcctggcagattatctccctcttatgcttgtgttgcgtcttccaccctttataggagaacatgcttccagcctttttccatggagcagaaatttgttgaaatctcttgctggctagttgtccttctttccttctttgcagtgttcagagtttgttaccttttcaaacgttttaatcattttttgtggggtttcaggagccagtgaagatgaatgtgtgcttagtttttatcctgaaccaggagtcttaaaatatcaactgtttgaggattttaataattacatagttataaaggaggtaattgtaataagtaatttattttcttggtacattatattaaaatagttttccactctgggctttaagcgaaatttctgagtctaagtttcagtagagatttttttggtcaagtaacatgacacctgccaaaataagcggctttactgtcagtctcatttgacaaaagcctgcagctaggttctctcagggtggattcatggcttgtgatatcctcaaagaccagcctttgatgtcattccactctgccatcctttgcttgttggtgatgtctctcctcatggttacaaagtccataccctcagtatctaagagcagatgtaggagagattcttttcatgcctggtaagggaggataaaatgggaggcaatcccaatatacgtgttttatgttacactggcagccgtgggccccctgctcaccctgcctgcagtggaggctgagaacataggtgccagtgggaagctgactgccagcaaagaggaagggtgggaaaggggcttttggggaggttgctagtagggtcagccccagtttgatgtttccccttctcttttgctacccttttgacaaaggacttttgttccctttaaaacgttttttatttattactgttttttatttttttctttaagttcagggatacatgtatggcattgtgcaggtttgttacataggtaaacgtgtgccatactggtttactggacagatcatcccatcacctaggtattaagccctgcatccattaattattcttcctgatgctctccctcctctaatacctccttcctacaggccccagtgtatgttgttaccctccttgtgtccatgtgttctcatcattcagctcccacttataagtgagaacatgcggagtttggttttctgttcctgcattagtttgctgaggataatgacttccaactgtaaccatgtccctccaaaggacatgattttgttcctttttatggctgcacagtattctatgagaacatgcagtgtttggttttctgtccttgtgataatttgctcagtatgatggtttccagcttcatccatgtcccttcaaaggacatgaactcatcattttttatggctgcatagtattccatggtgtatatgtgccacattttcttaatccagtctatcattgttggacatttgggttggttccaagtctttgctattgtgaatagtgccacaataaacatatgtgtgcatgggtctttatagcagcatgatttataatcctttgggtatatacccagtaatgggacagttgggtcaaatggtatttctagttctagattcctgaggaatcgccacactgacttccacaatggttgaactagtttacagtcccaccaacagtgtaaaagtttcctatttctccacatcctctccagcacttgttgtttcctgactttttaatgatcgccattctaactggtgtgagatggtatctcattgtggttttgatttgcatttccctgatggccagtgatgatgagcattttttcatgtgttttttggctgcataaatgtcttcttttgagaagtgtctgttcatatcctttgcccactttttgatggcgtcgtttgtttttttcttgtaaatttgtttgagttcattgtagattctgtatattagccctttgtcagatgagtagattgcaacaattttctcccattctgtaggttgcctgttcactctgatggtagtttcttttgctgtgcagaagctctttagtttaattagatcccatttgtcaattttggcttttgttgccattgcttttggtgttttagacatgacgtccttgcccatgcctatgtcctgaatggtaatgcctaggttttcttctagggtttttatggttttaggtccaacatttaagtctttaatccatcttgaattaatttttgtataaggtgtaaggaaggcatccagtttcaactttctacatatggctagccggttttcccagcaccatttattaaatagggaatcatttccccatttcttgtttttgtcaggtttgtcaaagatcagatagttgcagatatatggcattatttctgagggctctgttctattccataggtctatatctctgttttggtaccagtaccatgctgttttggttactgtagccttgtagtacagtttgaagttaggtagcgtgatgcctccagctttgttcttttggcttaggattgacttggtaatgtgggctcttttttggttccatatgaacttaaagtagttttttccaattctgtaaagaaagtcattggtagcttgatggggatggcattgaatctataaattaccttgggcagtatggtcattttcacgatattgatacttcctacccatgagcatggaatgttcttccatttgtttgtatcctcttttatttcattgagcagtggtttgtagttctccttgaagaggaccttcacatcccttgtaagttggatttctaggtattttattctctttgtagcaattgtgaatgggagttcagtcatgatttggctctctgtctgttattggtatataagaatgcttgtgatttttgcacattgactttgtatcctgagactttgctgaagttgcctatcagcttaaggagattataggctgagacgatggggttttctagatatacaatcatgtcatctgcaaacagggacaatttgacttcctcttttcctaattgaataccctttatttccttctcctgcctgattgccctggccagaacttccaacactatgttgaataggagtggtgagagagggcatccctgtcttgtgccagttttcaaagggaatgcttccagtttttgcccattcagtatgatattggctgtgggtttgtcttagatagctgttattattttgagatacgtcccatcaatacctaatttcttgagagtttttagcataaagggttgttaaattttgtcaaaggccttttctgcatctattgagataatcatgtggtttttgtcgttggttctgtttatatgctggattacgtttattgacttgcgtatgttgaaccagccttgcatcccagggatgaagcccacttgatcatggtggataggctttttgatgtgctgctggatttggtttgccagtattttattgaggatttttgcatcgaggttcatcagggatactggtctaaaattctctttttttgttgtgtctctgccaggctttggtatcaggatgatgctggcatcataaaatgagttagggaggattccctctttttctattgattggaatagtttcagaaggaatggtaccagctcctccttgtacctctggtagaatttggctgtgaatccatctggtcctggactttttttggttggtaagctattaattattgcctcaatttcagagcctgttattggtctattcagagattcagcttcttcctggtttagtcttgggagggtgtatttgtcgaggaatttatccatttcttctagattttctagtttatttgcatagaggtgtttatagtattctctgatggtagttggtatttctgtgggatcggtggtgatatcccctttatcattttttattgcatctatttgattcttctctcttttcttctttattagtcttgctagcggtttatcaattttgttgatcttttcaaaaaaccagctcctggattcattaattttttgaagggtttttttgtctctatctccttcagttctgctctgatcttagttatttcttgccttctgctagcttttgaatgtgtttgctcttggttctccagttcttttaattgtgatattagggtgtcaattttatttctttcctgctttctcttgtgggcatttagtgctataaatttccctctacacacagctttaaatgtgtcccagagattctggtatgttgtggctttgttctcgttggtttcaaagaacatctttatttctgccttcatttcgttatgtatccagtagtcattccggagcaggttgttcagtttccatgtggtttagtggttttgagtgagtttcttaatcctcagttctagtttgattgcactttggtctgagagacagtttgttataatttctgttcttttacatttgctgaggagtgctttacttccaactatgtggtcaattttggaataggtgtggtgtggtgctgagaataatgtatattctgttgatttgggttggagagttctgtagatgtctattaggtccacttggtgcagagctgagttcaattcctggatatcctcattaactttctgtcccgttgatctgtctaatgttgacagtggggtgttaaagtctcccattattattatgtgggagtctaagtctctttctaggtctctaaggacttgctttatgaatctgggtgctcctgtattgggtgcatatatatttaggatagttacctcttcttgttgaattgatccctttaccattatgtaatggccttctttgtctcttttgatctttgttggtttaaagtctgttttatcagagactaggattgcaacccctgcctttttttgttttccatttgcttggtagatcttcctccatccctttattttgagcctatgtgtgtctctgtacatgagatgggtttcctgaatacaacacactgatgggccttgactctttatccaattttccaatctgtgtcttttaattggagcatttagcccatttacatttaaggttaatattgtcatgtgtgaatttgatcctgtcattatgatgttagctggttattttgctcattagttgatgcagtttcttcctagcctcgatggtcttcacaatctggcatgtttttgcagtggctggtaccagttgttcctttccatgtttagtgcttccttcaggagctcttttagggcaggcctggtggtgacaaaatctctcagcatctgcttgtctgtaaaggattttatttctccttcacttatgaagcttagtttggctggatatgaaattcggggttgaaaattcttttctttaagaagttgaatattggccgccattctcttctggcttgtagagtttctgctgagaggtcagctgttagtctgatgggcttccctttgtgggtaacccgagctttctctctggctgcccttaacattttttccttcatttcaactttcgtgaatctgacaattatgtgtcttggagttgctcttctcgaggagtatctttgtggcgttttctgtatttcctgaatttgaatgttggcctgccttgctagattggggaagttctcctggataatatcttgcagagtgttttccaacttggttcaattctccccatcactttcaggtacaccaatcagatgtagatttgatcttttcacatagtcccatatttcttggaggctttgtttgtttctttttattcttttttctctaaacttctctgtttgctttatttcattcatttgatcttccatcactgataccctttcttccagttgatcgaatcagctactgaagcttgtgcattcgtcacgtagttcttgtgccatggttttcagctccatcaggtcctttaaggacttctctgcattggttattctagttagccattcgtctaatcttttttcaaggtttttaacttgttttccacgggttcgaacttcctcctttagctcggagaagtttgatcatctgaagccttcttctctcaactcatgaaagtcattctccgtccagctttgttctgttgctggtgaggagctgcaatcctttgaaggaggagaggcgctctgatttttagaattttcagtttttctgctctgttttttccccatctctgtggttttatctacctttggtctttgatgatggtgatgtacagatggggttttggtgtggatgtcctttctgtttgttagttttccttctaacagtcaggaccctcagctgcaggtctgttggagtttgccggaggtccactccagacgctgtttgcctgggtatcagcagcagaggctgcagaacagcgaatattggtgaacagcaaatgttgctgcctgatcattcctctggaagttttgtctcagaggagtacccggctgtatgaggtgtcagtctgcccctactggggggtgcctcccagttaggctacttgggggtcagggacccacttgaggaggcagtctgtccgttctcagatgtcaagctgcatgctgggagaaccactactgtcttccaagctgtcagacagggacatttaagtctgcagaggtttctgctgccttttgtttggctatgccctgtccccagaggtggactctaaagaggcaggcaggcctccttgagctgcggtgggctccacccagtttgagcttccaggctgctttgtttacctactcaagcctcggcaatggctaacaaacagcctcgctgctgccttgcagtttgatctcagactgctgtgctagcaattagcgaggctctctgggcgtaggaccctctgagccatgtgcgcgatgtaatctcctggtgtgccgtttgctaagactgtgggaaaagcgcagtattagggtgggggtgacccgattttccaggtgctgtctgtcatccctttccttggctaggaaagggaattcccttgtcccttgtgcttcccgggtgaggcaatgcctcgccctgcttcagctcatgctcggtgtgctgcacccactttcctgcacccactgtctgatagtccctagtgagatgaacccagtacctcagttggaaatgcagaaatcattcatcttctgcgtcactcactctgggagctgtagactggagttgttcgtatttggccatcttggaaccgccccaagtgttcctttttctctgcaattttgccaacatctgtttttttgactttttaataatcaccgttctgactggcatgagatggtacttcactgtgctgaatgtgtgtcttttgagaagtgtcacttcatgtccttttgctcactttttaatggggtttttttttcttataaatttgcttatttttagactctggatattagacattcatcagatggatagattgtaaacattttcccccattctgtaggttgtctgttcattctgatgatagtgagaggtgacagcatgctggcagtcctcacagccctcgctcactcttggcgcctcctctgcctgggctcccactttggcggcacttgaggagcccttcagcctgccgctgccctgtgggagcccctttctgggctggccaaggccggagccagctccctcagcttgcgaggaggtgtggagggagaggcgcgggtgggaaccgggcctgcacacggtgcttgtgggccagcgtgagttccgggtgggcgtgggctccgtggactctgcacttggagcggccagccagccagccccaccggccctgggcagtgaggggcttagcacctgggccagcagctgctgtgctcaatttctcacccggccttagctgccttcccgcggggcagggctcgggaccttcagcccgccatgcctgagcctccccgccctctgtgggctcctgtgcggcccgagcctccctgacaagtgccaccccctgctccacagtgcccagtcccatcgaccacccaagggctgaggagtgcgggcgcacggtgtgggactggcaggcagctccacctgcagccctggtgcgggatctgctgggtgaagccagctgggctcctgagtctggtggggatgtggagaacctttatgtctagctaagggattgtaaatacaccaatcagcactctgtatctagctcaaggtttgtaaacacaccaatcagccccctgtgtctagctcagtgtttgtgaatgcaccaattgacactctgtatctagctactctggtggagccttggagaacctttatgtctagctcagggattgtaaacacaccaatcggcactctgtatctagctcaaggtttgtaaacacaccaatcagcaccctgtgtctaactcagggtttgtgaatgcacccatcgacactctatatctaactactctggtggggacttggagaacctttgtgtggacactctttatctagctaatctagtggggacctggagaacctttgtgtctagctcagggattgtaaacgcaccagtcagcaacctgtcagaacagactactcggctctctgtaaaatggaccaatcagcaggatgtaggtggggccagataaaagaataaaagcaggctgccggagccagcaatggcaacccgcttgggtccccttccacactgtggaagctttgttctttcgctgtttgcaataaatcttgctactgctcactctttgggtccacactgcctttatgagctgtaacactcaccgcgaaggtctgcagcttcactcctgaagtcagcgagaccatgagcccactgggaggaatgaacaactccagacgtgccgccttaagagctgtaacactcaccgtgaaggtctgcagcttcactcctgagccagcgagaccacgaacccaccagaaggaagaaactccaaacacatccgaacgtcagaaggaacaaactctggacacgccgcctttaagaactataacactcactgcgagggtccacggcttcattcttgaagtcagtgagaccaagaacccaccaattctggacacaatagtttcttttgctgtgcaaaagttctttagtttgatgagatcctatttgtcaagttttgcttttgttgcaattgcttttggctttttgttgtcatgaaatatttgcctgtgcctatgtcctgaatgctattgcttggattttcttctagagtttttatagttttgggttttacatttaagtctttaatctatcttgaattaatttttgtatatggtgtatggaaggggttctagtttcaattttctgcgtatagctagccagctcttccagcatcatttattaaatagggggccctttccgcattgcttgtttttgtcaggtttgtcaaagatcagatggttgtaggtgtgcaagtcttatttctgagttctctattctgttccattggcctatgtgtctgttcttttaccagtaccatgctgttttagttactgtagccttgtaatatagtttgaagttaggtggtgtgatgcctccagctttgttctttttgcttatttgggctcttcttttgttccatataaattttaaaatagctttttctaattctgtgaagaatgtcaatggaagtttgatgggaatagcattgaatctatacattatttggggcagtatgtccattttcacgatatgattcttcctatccacaagcatggaatgtttctccatttttttgtgtcacctctgatttctggagcagtgtttgtagttatccttgagaaggtccctctcactttctttgttagctgtattcctaggtattttattctttttgtagcagttgtgaatgtgagttcaggatttagctctctgcctgcctgttgttggtatataggaatgctagcaatttttgcacattgattttgtatcctgagactttgctgaggttgcttatcagcttaagaagtttctgggccaagacaatgggttttctagatataggatcatgtcatctgcaaacagggataatttgagttcctctcttcctatttgaatactccttatttctttctcttgcctgacttcccaggccagaacttccaacactgcattgaataggagcaatgagggagggcatccttgtcttgtgcctgttttcaaagggaatgcttcaagcatttgcccattcagtatgatattggctgtcggtttgtcatatatggctctgattattttgaggtatattccttcaatatctagtttattgaaatttcttaacatgaaaagatgttgaattttattgaaagccttttctgcatttattgagatagtcatttttttttgtcttaagttctgtttatgtgatgaatcacatttattaatttgtatatgttgaaccaaactttcatcctggggatgaagccaacttgatcatggtagataagctttttgatgtgctgctggattcggtttgccagtattttgttgcggatttttgtatcgatgttcatgaaggatattggctttaagttttctgtttttgctgtatctctcccaggttttggtatcgggaggatgctggatacaatcagttagggaggagtccctccttttcagttgtttggaataatttcagtagaaatggttcccactcttctttttacctttggtagaattcagctgtgaattcatctggtcctgggagtgttttggttggtaagctatttggtaaagctgcctcaattttagaactcattattgatctgttcagggattcaatttcttcctggttcagtcttgggagggtgtatgtgtccaagaactcatccatttcttctagattttctagttcatgtgcatagaggtgtttatagtattctctgctgattgtttgtatttctgtggggtcagtggtgatatcccccttataatttctgattgtgtttatttgattcttctctcttttctttattagtctagctagtggtgtatctattttattaatttttttcaaaaaaccagctcctgaatttgttctttgtagggtttttcatgtctctatctccttcagttcagctctgatcttggttatttcttgtcttctgctagctttagggtttgtttgctcttggttctctagttcttttagttgagatgttaggttgttaacttgagatctttctagctttttgatgtgggcatttagtgatataaattttcctctgaacactgctttagctgcatttcagagattctgatacgttgtctctttgttctcattagtttcaaagaacttcttgatttctgctttaatttcattatttacctgagtcattcagggacaggtggttattttccttgtagttgtgtgattttgactggatttctttctttctttctttcttttttttaaatgtgtctatcagaatgactttatttcagtacactgagccccatcaggcagtgtggtttgtgcaaggctgtgcgagggacaggcttgggctaagagaagggaggtgagttgttaagtgcactgcagtctgtggggtgctacatcgctttcacacacacctgctcctttggcccatacctggcaggggcctttggtcataggacagcatgggggagactactgcatggagtctgggattggggtgggtcatggtgtcacaggtgagggtgccggtgaagacaggctggccccagctttgcaccacctgggctaaaggcctttggactactcctaggagtcaggcctggctccattagctcctggcactctggtctggccctctccctccttaaccaagcaggtccaaggtcaagagtggcccaagatcagccaagagggggccatcccacctctacagcttagttgcctggtcagctatagtggcaaaaggcaacatggttaattgcagctttctccagtcctaaggacactggctctccaacaccccttccttgtttaggggcctctgccaaagaaaaattctacctcctgtttcagaaaatctaaccagcaaccagcctgttgattctatggcagtgagcaagagaaagagggagaaagaggctggtgggagtgtctttgagtatagctaccaatttcaaatggtcctgcaacctgtggacactgtccgcttaccatcagcagggagaggcggggccctggaggctaggctaagcttaggtgctataaacattagtgtggcagggcaggaggcagtgagctccctctctccatccccttactgaacaaacacttcaataaataaaactgtttgaagatggcattgcaacaagaacggatggaaagcaaggacctggaatcagcaggcaccttaaactctcccaaggcccctggaaggggaatgggctgggaacattatctctgcagccattcagggggagtactactcctgccctcctccagtggctggtgtggtcctgttccctggtgaacatgagggcttcctgctccctcctgactttccagtctctgtattagctcttgggatgcttttctagcctcccaaaccaaaatggcaacaaaaccagacagaggtcaaccccagccccagtcctcagtgcccagtcagggggcattgatagcggagtgaccagcaaggggaggcagcagctgcctgggtcctcagggcaccctggtgggtgggagtgagggtggggccagtccagcctaggatgggcagcagcaaggtctcccagggggtggtttatctccctctgtctccccgtggtagtaaacggagttccctgcagccagtcagaggcccacctgaggagggagtgcagcctctgccagtgttcttccctgtcaggagccagttaatggtcacccccaggcctcaggccatcaccatcgtgggtagttcctcatcctttctggacctggggtccctgggccacatggcacttgcatgtgctcacacacttgtatacacacatgcactcacacacacaggcaattcctcacaaacactctgactcaacaaagcgagttttaaagtggagttaacttcagagagaggtgaagatgatatcccaacattagaaggttttcctgtggatagatcaggcaccgtcttcctcatattccttcttggagacccacatcttcttaaaggtgtcatggaggcaaggatagagccctcaatccacgtggaatacagtctctcctgaggtgcaaatatcctgatcttcacttcactcagtagcctgtcaccaaaacctttgaacaaggtagagcctcccaagaggacgatgttggagaaaagtgtgaactgcaggtccatgtctgacttctggatggcgaacaccaggaccttgtggatgccttcactctcctccctgatcaagtctggcctgaagagcagctcaggggcccggaattgggaaggaccaatctcaatggtgctgccatcaggcaggtagtactgagccttctctgtctctagtgtctcttccttctgggggtttatggataggtaggagggtctttcttttatggccttgacaatctcaaactcaaaggatgagtggaaatctcaaacgatgagtggaaatcatagccctccttatgcaggtagaggtgcaggaagcgagagatgttccagcttgcgatgtcaattcgcatgatggagtggggcatggcaaagccctgatagatgggcacagcatgggtgatgccatccccagaatccagcaccacccccgtggtcctgcctgtggcataaaggctgagcacagcttacatggagatgaaaatagcaggcacattgaagctcttgaagaaaacgttggcagctcattcctggtgtctttgtgggtttaaaggtgcctcagtgaggagcacgagatgctcctctgagaaagtctgcagctggtccttagaatagacatattgccagatgtgttccatgtcgttccagtccttgacaatgccatgctccgtgagatagcagattgagagcagcccttggtgctccttggctttgaagccaatgaagatgtcaccttcaagggctcctgccatgatacgaatatgcatgggtaggcccacatactttggaaagcagtatttgtggatctgatcaccagcaaaaccagctttaatcacaccagattcattgtcgatcatgacaggctggttggtgattgtatcgtaagactccacggcagaggaatctctcctggggaaggaactaccagttgggtctgccgctagtgccattcatgaatttcttaatcttgagttctaatttgattgcattttggtctgtttgttataatttcagttctttttcatttgctgaggaatattttatttccgattacttgatcaattttagagtaagtgccttgtggtgatgagtagaatgcatattttgttgtttttgggtggagagttctgtagatatctattaggttcacttgatccagagctgagttcaggtcctgaatatctttatcaattttctgtgtggatgacctgcctaatattgtcagtggggtattaaagtctcccactattattgtatgggagtccaagtcactttgaaaatcataagaacttgctgtatgaatctgggttgccgagaccagctcggtcatggagaccctaacccagcggcgctagaggaattaaagacacacacacagaaatatagtgtgtggagtgggaaatcaggggtctcacagctttcagagctgagagcattgaacagagatttacccacatatttattgacagcaagccagtgataagtattgtttctatagattatagatttactaaaagtattccttacgggaaataaagggatgggccgaaataaaggggaggttctggctagttatctgcaacaggaacatgtccttaaggcacagatcgctcatgctattgtttgtggttcaggaatgcctttaagcagttttccgccctgggtgggccaggtgttcctttccctcattctggtaaacccacaaccttcaccatgggcatcatggccatcatgaacatgtcacagtgctgcagagattttgtttatggccagttttggggccagtttatggccagatttcggggtctcttcccaacatgggtgctctttttttgggtgcatatgtatttaggatagctcttcttgttgaattgaaccttttaccattgtgtaatgcccttctttgtcttttttttatctttattggcttaaagtctgttttgtcagaagctagaattgcaacccctgcttttttctgttttccatttgcttggtaaattttcctccatccctttattttgaacctatgtgtgtctttgcaaatgacgtggatctcttgaagacagcataccgatggatcttgactctttatccagcttgccattctgtgtctttttaattggggcatttaacccacttacatttaaggttagtattgttttgtgtgagtttgatcctatcatcattattctagctggttattttgcagatttgtttatgtggttgcttcatagtgtcactggtctgtgtacttcagtgtgtttttatagtgggtggtatcaatttctcctttccgtatttagtccttccttcaggagctcttgcagggcaggcctggtggtgacaaattccctaagcatttgcttggtctgaaaaggatcttatttctccttcatgtatgaagcttagtttggccggatttgaaattctgggttggaaatttcttttctttaagaatgatgaatattggtccccagtctctgctggcttatagggtttgggtttccactgagaggtatgctgttagtctgatgagcttccttttgtaggtgagctggcctttctctctggctgcctttaacttttttttttttcattttgaccttgaagaatcatgattatgtgtgttggggttgatcttctcatggagtaccttactggggttctctggatttcctgaatttgaatgttggcttgtcttgctaggttgggggaattcttctgtatgatattctaaagtatgtttttcaacgtggttccatttttcctgtcttttttaggtaccccaataagtcacgggtttggtctgtatacataatcccatatttctctaaggttttgttcattcattttcattcttttttccctattcttgtccgcctgtcttaattcagaaacataatcttcaagctctgagattctttcctctgccttgtctattctgctattgatacttgtgattgcattataaagttcttgtgtttttcacctctatcaggtcagttatgttcctctcttaattggctgttctggctatcagctcctgtattggtttatcatgattcttagcttctttgcagtgggtttcaacatactcctttaactcaacaaagttttttattacccactttctgaagcctccttctgtaagttcagccatctcagcatcatcccacttctgtgcccttgctggagtggtgttgtggtcatttggagcagaagaggcactctggctttttgagttttcagcattttgtgtcaattatttctcatctttgtgggcttatttgcctttgatctttgaggttgctgacctttaaataggatttttgttgagtttttattgttgatgttgttgttgttgttttctgtttgtttttcttttaacagtcaggacactctactgtagtgttgctgtggtttgctgtaccccagaccctaattgcctcagtttttcccatacctggaagtatcaccagtgaaggctgcaaaacagcaaatatggcagccagctccttcctctggaagctctgtcccaggagagtactgatttgttgccagcccaaacgcactttgtaggaggtggctggaaaccccttttgggaggtctcacccagtcaggtggaatgggattacagacccacttaaagaagcagtctggctgctttttggtagagcacatatgatacattaggaggggactctttcttctggaccatttgtattctccaaagccagcaggctagaatggctaagtctactgaaccccagagatagcagccacccctgccccggtaacttggaactgcctcagaaagattccagactgctttggttggctggctggaattccaagccagtgggtcttaacttgtgagttgccatggaagtgggggccatggaagtggggcccacggaacaatgctgcttggctccctggattcagctccctttctagggatatatacagatggatatccccccttgctggggatcttggggccagagtatataaaattcctgggtcactgtatgtgcctgagcagctgctctgctgagacaccacacagttctgtgtattggacccaaggccctggtggcatgaactcaggagatctcctgatctgtgggttgcagagatccgtgggagaaacatggttttctgggcagggttgcatggtcactcaccacttctcttggttggggatgggggttcctttggctgcatgccactcccaggttggctcttgttccccttgttccctggcttttctacattctcatgggtcaaggtgtttgccttgtcagtctcaatgtgagaacctggatatttcagtttaaagtgctgaattcacttgcccttcttcattcctctcagtgagtgccatagaccacagctgcttctaattggccatcttggatcaacgttgttattccctttttcactgcttatttcatttcactcacatctataagcaaaaaaaaaaaaaaaaaaaaaaagactcaaacggcataaaaaagtgacttttgtaggttattgtttagtaaagcatttgaattaaaaaaatctcatcatgagctatagctcatatttggtcattttttgtacttctcatttgggtatctaagacttaatgctgaattgaggcatctgtggaataaataaaactctggacctgtctggacaagcaagctcaaagcaggagtgtgctgtggtgggaataggccaactgtggaatcctaaactgccttcatattgttgctgtaccattgagcagctatgtggacttggtacacatagcttgagaagctatgtagaacttctctttctttaagtggagtgagggttgttatgaggcttaaatgaggtaatgtttgtaaactgcttaacatggttggcacacagtaaactttaggtactattatcagttttgtctctgaggctagttcctaggtttatggagttgtagagctggagaagcattttaaagtccagcgttcttccttattttagagagaggaaactgatgcccagagacactgaaggtttctgaggcttggttatcatgtctatgtgttttacagcttggctatgaggatcatctgagctaataggtggaaaagcatttatatgtcagttttttagtattgttcatacagtggctaattgccttgcctgctcaacgactgaatgattttataaaatagctttctggttctgataatagaaaaatcaatatattttcttttttttcttaatttagatgtatccagttaaagcaggcaatagatgaaaataaaaatgctcttcaaaaattaagcaaagtaagtattgaggttaatcacattattaaaacatctcttcctatacaagtatttttattaagtggaagttaattcaagttggtaagttcctgggtttacgttagtgatatagtctaactgcagccagtgctggcttgccgaacaggcttgctaagtctgtgcttgggagcaaagcaaaatccagggctccaactaccgaaaaatgttcagctttgatgaactcacctgctattaaggattcagacaatcctggaaggagctatttttatttttgcattttgtgagttgttttacagtttagaattatttttattttaatttctttgtggggaaataatgcataatctggccctgagggtaagtggtaaagaagcttcttgtatcaaatggcagctctgatatcaatgtctctgcagaaacaagaggaacaggaatttaaccttgacaatcccttcaggatttttttttttttttcacatgagccttggctacagctagatgtccaggtccagagactcatggagtctttaaagtggaaggcacctgaaagtcagctctccagctgtatattactcccctttactgcatctgagatatgtggtcactgaagagctcctccaaatttctccagtgacacaaaacttttcaacttagactgtttgaaaacctaattatttctgtttcacaggtgaggaaattgaagctctcagtggtgaagcatccatgcctcttctgtcaataagtggcagaacttgggattggtgcctgtctcattgactttaaagccgatcttctgtcagaacatatctcttactgactatggaaggtctataatacttagcaagaaaataaaagagaaacctaaaacaagtggtataattttattttttcatttggtttgcattccaacacaattgcctgtttcttttaaatctaatttatttccctaagataggtgtaatgtcacactgatatttactttgttatatagcacttattggaattttttgttgttcttttgaaattaggaaactgaaattaattttttagtgaaatagacctatattctctcataggctgatgaatctgcacctgttgcaaactataatcagagaaaagaagaggagcatactcttttggacaagcttacccaacaactgcagggccttgctgtgacaataagcagagaaaatataactgagtatgcttcctttctacctttcttttttcttttttaaagatatatcaccaatagctttaatgtttaactcaaagacatatagcagtatagatataaacaaatgacactaacaatagaatcagtcaacatttatttattgtgtataatagaaggtgttagatcccatgagagatggaaagaagtgtaagtcatagtctctgccctcaggcaatttataatttagttgaaacaaaacagagatctgaaaagctaaatgaacaaatgttagaaaataaagatgatatatttaatgtcaatgttgatgtgtaaaagggaaatgatttggaatgtctacttgcattgttctccctttcataaacattctttaaaaatttgaagcaaagactgagtgtggtgactcatacctgtaatcccagcattttggaaggctgaggcaggaggatcacttgaggccaggagttcaagaccagcctgggcaatacagtggaccccatctctacaaaaaaacccaaactagtcaggcttggtggcacgtacctgtagtcccagctacttgggaggctgaggcaaggaggattgcttgagcccagaagttccaggctgcagtgagctataatcacctcagtgcacagcctgggcaacggagtgagacactgtctctattaaaaaaaaaaaaaattgaagtagggacatgcattgtttgtctgccagagtgtatgttaataatagcttctgaaagttgtaaagaagacttacatatacaagttgagtattccttatctgaaatgcttgggatcagaagtatcttcagttttggattgttttggattttggaatatttgcattgtacttacttgttgagcatccctaatctggaaatctacattttgaaagactccaatgagcatttccttggagtgttattttgatgctccaaaagtttcagatttaggagtatttcggattttggattttctgattagggatacccaacctgtacgaacaaacccaatttgtgggaagcaaaagaaaaaaatcagttattcagactatttcagtgttgttctccaacctttatactgtatcctgggaaaaaatgctgaaggtggtagatgcaaggatctagaatttccaccgattcttagtactgagaatggcagagtagttggtattggactaaccttcccaccataaatgactataaagtctggacaaaatatacaaagcatctgtttgaagccactgagcatctaccaagcagggttgatattcttgatatagggagacacatgaagcaaatcctacattcacctagaccttttccctgggaataatttatgagctgtggtggaggaaggtagattccaagcagggaatagtagtcttactcgactgaggagacagagatcacactttggagctgctcagttcactgagagttgtggagcaaggtgccatagagagaagggagctgcacagaaacaactccagcaatctgaaaggtctcctgggctgtatagggcatgatgcctgcaaggcctggcagaaagtacctgctgggagactaagagcttaatggattctggtaatcatatagtcctggaaaaacactggagtttgtacctagttctagtaaagagacttgggaaatgtttcaggcatttagtagaggacacagaaggcccaggccctaggagtaaagaaaacaccctgagagtaacaaccatgatctaggaataaagacaaagctgaggtaggtcttctctaaaagagcctaaaagcagaccttatcaggaacaagataatttaactgtgtaacattaaaataatttaaaatttcttagaggaatataacataatccaaagtctgtaagtgagtcatgtaatgtgtccatcacagcaaccagtataaaaaaaatcagaaatgcaaaaaagcaggggaaaatacatgatcaataagtgacaagatggtcactaaaaacagacccagatatgatccagatatagagttagctgacaaggacttctaaataaaatgattaatacagtaaagaaaatagaagaaaagatgaatgaaatgggaaatgggtgtatttaattcaaatatagaaaaatcaaatgaacattctataactaaaaaatacaatatttgataaagtaatgactgagaacttccaaaatctgattcaacatatagactcaaaaatctgggaaatatattaaaatcaagagaataaataatcagtagctcggagatgtgagaattagcaaataaccataaaacaacaatttttaatatgttaaataatttataggaaaagattgataagatgaatagagcgaaatcttaagcagagaaatgggaactaataaagaccaaaatgaaaattctggaactaaaaaaatacaatatgtgaaataaaattgctgagtggtttaatagaagattggatacaacagaagaagggatcagtgaacccaaagacagcttaaaagtttttcaaattgatacacaaaaataaaaaaatgcaaagaacaaaacagaatgtaagagagaggtgggacactgttaaaagttgtaacagatttgtaattgaagtctcagaataagagagagaatgaagcacaagaaatatttaaagagatagtgactgaaaatatttaaaaattatgatctaagagagatatcaatccactgatccaagaatctcagggaaccccaaacagaatcaatataaagaaacccacacacaggtacctcaaactaccgaaaaccaaagataaataggagatcttaaaagctgccaagggaaaaaaggaaacatgtagagacaaatgacagaattacagttgacatcttatgagaaaaaatacaggtcagaagacaatgcagtaacagtaacatcttgaaaacgttgaaagaagaaaccatcaactcagaattctgtatccagcaaaagtataaaaaattaaagtgaaataaagacattttcaggcaaacaaaagctgagaaaatttgtcaactgatctgcagtataagaaatgttaaaggaagttcttcaggctagcagacaatgatcccacattgaaatttggaccttcaaaaaggattgaagaagatgggtacgtgggtacatataaaagcctattttttcttttctatatgcctttgaaagacactcaattatgtaaagcaaaatatatatttggggatttataatatccagttgattctcattatttacagtagttatgttctataaagttgccaggaatactcgattagtaaatgctaaaccattgctcctggggaaatgcagacttaagactcctgtgagcctctggtcacaatgtttttgtcaactgagtaacatacaaccttgtgttactgtttaaagacactttatttcatatattttattgattcattaacattgaattcacactaacagcactatcactcatgcatgaacaagtcttatctaacacacttattttctccagaggtacattatagccttcttgtgcttaggaataccacatggctcttcagcgctatgtttgggagccattttaaacaacaaaatcaccaaaaaaaaaaaaaagcacaaaaatgcaaaaactgtggcactaaatagactgcaaaaaagggacactttcctgtatgagagctgaaaaaaaaaggcaggtgtcaccatgttcagcttcagttgggaatgtgtacgccagacaactcaaattttttgctgctttgtgtatgtccacaaatgaccacaaaagcactgtgagtattaattaggaggttacaaataaagtttagtgagccaatgaattcataaatacagaatctgcatgttacaaggactgactatatgtagaaggaaaatgtgacaatagcacagcatagcacaaaggctggcaggtaaatggaattatttatcttaaagttattttatctttggtgaaatgtgatatttaaattagactatgataagttagggatgcatattgtaatacctaaaacaatcactaacaaaataatacaaagaagtgtagcttgtgaaacaacacaataaaatggaatactaaacgtgatttgattaacccaaaaaaggcaagaaaggagaaataaacagatgagacaaatagaaaccaaatagtaatatggtttcaatgcagccatttggatagttacattaaatgtaaatggagtaacactccaattacaacaaagattgtcagattgaatttttttaacccaaatatatactatttagaagagatagactttagtatgcagttatagagagagtgaaagtaaagaactggaaaaaggtattccatgttctacaacaaagatattatttgttttataaccaaaacaaaggtgatacggttacaataatatcagatatttaaggctaaaagtaatttactatttaagaaaggacatttcataatgataaaagaaagggtcgattcagtaggaaaaaaaatcttcctaaatgagtatacatttaataatatgggttcaaatgtataaagcaaaagttgccagaactaaaacagagctagataattcacaatccttaaccaccgtgatctaattacatgtatagtcaagcctttcttagtgatagggatatgttctgagaaatgagtcattaagtgatttcatcattgtacaaacatcatagaatgtacttgcacaaacctagaaggtgtaggttaccatacacttgggttatatagttatagtatagcatgttgctcctaggctacaaacctgtacagcatgttactgtgctgaatactgtacacaattgtaacacaatggtgtatttgtgtatctaaacatatccaaaaataggaaatgtacagtaaaaatatggtattatatgtatggggccatcattgtatatgtggcccattgttgactgaaacattgttgtgcagcacatgactatatatgtgtagaacacagcacctaagtatgtattatgtaaatacatattcttttcagtgcatctgtaacattaaccaaaatgaaccatattggaccataaagtaattgtcaccaaatttcaagagtttgaaattatgtagaatatatatatattttctttgatgacttggaatgacattaaaacccaatgacagaaaaataattagaaatcactgcatgtggccaggtgcggtggctcacgcctgtgctgaggcgggcgaatcacgaggtcaagagatagagaccatctggccaacatggtgaaaccccatctctactaaaaatacaaaaatgagctgggcatggtggtgcatgcctgtagtcccagctactcgggagtcggaggcaggagaatcgcttgaacccgggaggtggagattgcagtgagccaagatcataccactgcactccagcctggtgacagaatgagacaccgtctcaaaaaaaaaaaaaaagaaaaagaaaaagaaaagaaattactacatgtttgcaaattgtcacacacttctatataaactgtgagtcaaagaaaatataacagtggcaattagaaaatatttggaatgataataaaatgactgggttgcaaccagcatagtgcttaaagggaaaatttctatcttttgtttgtttgttttggagacagggtctccgttacccagactgggtatagtggtgcaatcttggctcactgcaacgtccacctcccaggctctagtgatcctctccacctccgcctccctgagtagctgagactacaggcgtgtgccactacgcttggcaaattttttaaattttttgtagaggcagggtctcactatattgctcaggctggtcttgaactcatgggcttatgcaatcctcccacctcagcctcccaaagttctgggattacaggtgtgagccgccacacctggccagaaatttatatctttaaatgtatagtttgaaaaaaaagttgaaaatcaattactaaaacatccaactttaggggccagaaaaaggacaacaaacccaaggagagcaggaaagaaataataaaaataaaagcagaaaacagtgaacaataaacagacatacagtaggcaatatcaacaaagccaaactggtttttggaaaattaattaaatggataagctgctagcattactgatcaagaaaagagagagagaaaaaaaatcaatacagattccacaagcattaaaaagatactatgaaaagactatgaacaacttgtgtgaataagtttgaaatttagataaaattagtttctttaaaaagaaaatgtactaaaattgacacaagatgaacagaaaatcttaaaagttctactaaaatatttactaaagaagttgaatctgtaattaaaagcctttccacagattaaactctcaggtggctttactggtgaatttattgtaaacatttaagaaagaaatagtgccaatattaaaaaatcattccagagaacaaagaagaaacactttcaaatcattttataagctttcaataacactgatatcaaaacatgacaagaacactagaagaaaattgcaaggccctcatgaacacatgcacaaactcagtataaaatattagcaagtaaaatctagaggcatttcaaaagggtaatacatcatgaccaagtggaatttgttccagagtgtgaggttggcttaacattaaaaaatcaatcattgaaattcactacattaatgaaggggaaaaaccgttatcaagttcacattattttcggcaacattttagaataattgacccatataaaatatgtgcaaaatatctcctaaagaaggaaagagacgcgttgaaaatcaatatgacattttatggattttttagtcttgtggtataaaaatggttgttacatccctgtttatgttttagatcattgtggtataagagtgtcctaccattattttaaacaaagttcagctaatattcctttttattccagagaaaatcttgtagttgactagttttatagttaatgatgttcatttgcattagtctaagtattgttttcccattttaaagataagcttctctcatgtaagctttaggagggcaaagatcttggttttgttcattgttatagcccaagcacatagtgtctgtcacacagtaggtgctccccaaaatttaaactttgctgaatgttgaatgagtaaataaaattcagaaagatttagtgacgtgcccaagctaacattattttggcatttctctcttcctcaccctcagattcacctcctttctcttcatccctatgctgttttcttagttcatagtgttgtcacttctcactttcaacagccaccctcacctttagcctttcttctaatctgttccccacattatacctttgtctcctttctaaagtgggaatcatatcatgtccttcccctactcatttttaggggcgactttaaaggtaaagctcacctgggctacattccgcgtacctcttttcagcctcaactctcactcattttccttaagccttgccctaccattcatgagctacttgatgtttcctaatcttaaatctcctttctcctctccctgcccttcctttctactcccattttacctgattaattccatatcatctctcaagacctaattatagccttttatgattcccattcgtgcaacctgggttaggtgtccctcttgtgtgattgatttcttagtatcctgtgtatacctctactctagtacctattgcactattttataattctccattttctagattgtctcactgcaagctccttgaggatggggaatcatgtctggtttacctttgtgtccactgtgtatctctctgacacggaacttgacctacagcatcagtgtcatcatcataactgacttttatggaaagcttgctatgggcaagcactgttctaaacactttgcaagtagtaactcatcttaatcctcatgacaatcttagaaggcaggttctattattatctccactttaccaatgagaaatggagagcttaaaagaagcctactcaaggtcacccagcaaagagggaatagagccagaatttaaatttagcagagcctatgctctaagtacttcataataatgcttcaacagcattttctgaatggatgaatccaagacttgaattcggagtctcctggcctcaagtccagtgatgctctgccatctcacatacatgactcagctccctctccgcctcagtctctccaggcacacggtcttagctagatggtagaaactgttctttgtattttcccttatttcttttatttgccagctccaaatatgggatattcatgtatatgtagaagttacactcatagctggtctgttcttgtatattatttcaagtagtcctactcagaaacactttttgtagagttggggcacctactgaagaagaggaagaaagtgaaagtgaagatagtgaagacagtggtggggaggaagaagatgcagaggaggaagaggaagagaaagaggaaaatgaatctcacaaatggtcaaccggtgaagaatacatcgctgttggagattttactgctcagcaagttggagatcttacatttaaggtaggtagaataagactgaaacctaacctaagggtcgatgtccatacctaacagaataagaaaactctgcctgtacacctgtattacagattcttaaaatgcagttttataacaatctatttaaataagtaataattacaatttacaagcagtagtaatatgagattgtgttactaaagttacctcttctaaagatttttgaaagtagctttaatgttgagaattcctaatttaggggtaaaattttataatttgttattgaatgtcatgtataaattcattcaagtgagttaggcaatgtccataggtggaggtagaagggagcacttcctgccattttgtagcagtctttcctgttagcttagatatgagaggggcttacatccatgcttggttggcctgggcataaataagtggcaggtgggacagaacaataaagttgtgatttttaaagttgtgattttgagcctgtgttttctgctagagaaatgagccaaagaaatttaagtgaatatatgaattttagttcttatattaaacttcaaagtttagtaactgattaataataaaatacataagaatattatgcaaataattatatggtttgatttatagatttttttttcaaattctcctggaaaatggtatcaatattagacaataatgtatattttaattaagtgtttgcttttgtagtgtccttagtggtggaaatgcttttgtcttcaaagatgaattttatttttataaatgagtgagtgttattcaaaacatatctggtgaattaagtgggtaattatattcagtaaatactatttttgctcaaaaatagggtttaactttaatggaattgatattctttgggaatttatatgctgcttctgaaagacacttttccagagatattaaaacattcaaaaatattttacgcagtaattgaatttttggaataagtatggggccttaaaaatgattgtgaaaaatggttcccatttgcataaatggctcaagtgtatgttaggtaaccaaaaggaatgattcattaaactatgtcacatttatggttttaggtgagttaggcagaatacataggggtcgggtgatagggaagcttttgataaaccttaggataaatattggattaaaaaaagattttgcctttttttcagcacatattttgaatcattggtattgacatatactcatgattattgaattttatttaaaatggtttactttgttttgctttaagaaaggggaaattctccttgtaattgaaaaaaaacctgatggttggtggatagctaaggatgccaaaggaaatgaaggtcttgttcccagaacctacctagaggttagtcttggtttatgccttccttttctaagacttttttttttttcgcttttaataaaacatttagctgtgttcttttgtcagttgactagtgaatgacttgagatatagaatttgctttaattttggagggacaggacctgggaaaaacattgtgtattaatggtcctggggacctgtgaagtgctcttacgcatgtgagccctggaacgtgatctcacaatgaggggatgctttgtggattaatgctgatcataacaaataataggtgtctattgtttattgtaaaacataactgcagttaactttgtgttaacttccacaaatatgtgatccccttactaaaatgtgaacatactatacatgtgtgtttgtagcttgtattttcttatttcataaaataacatggtcattttctgtgccaagatatatagatttctgtctggatcagcactgtccagtagaactatgatgcaaaccacacatgtaatttaaatttttcagtagccacactgagatatctttttgctgatgccacttctgacaccaagtatgtggtttttctctgacaccaaatatgtgttattacatcagttcttctacaccaaccggtgtcagcaattcaattcgattctgatgctaatgcctggagctagcacagacccccacaggttaaaggctcagtcccacaagattgctgctcacttccgttgccagtcacaagtcccaagagccacccatacttctgactgactggctatacattcacgagttcccataccatcacctcaggggttcagtaatttactagaatgattcacagaactcaggaaaacactttccttgcatttaccagtttattataaaggatgcaactcaggaacagccatagagtgaggtattggttgggggtggctggcatgcactctctgggccttccaccttcccagcacttcgctgtgttcaccatcctggaagttcctggaaccccatcatttaggggtttttctgaaggtttcattagccatgtttaactaaatcattagcaattggtgattaactcagtctccagctcctctcccctctttgaaggttggagggtggggctgaaagttctaacctctaatacctgggttggtttttctggtaacctgtccccttcctgaagctgtttaggtgcccacctagaattacctcattaacataaactcaggagtgactgaaggggactcttgatgagtaagaaaacatactcctatcattcaggaaattccaagggtttcaggagctctgtgccaggaatcagtgacaaagaacaaatacatgtttttcattacacacatttttaaaaagtaaaaagaaacaggtagaattatttttaataatatattttatattatccagtatatcaaaaatactattttgacatatcaatatttaaaaatattgagttgttttgcttttttaacattaagttcaaaatccaatgtgtgttttacatttacagcacttctcagtttggattaatttcaagagctcactagctacatgtggccaaagggctattgtattacatagggcaggtctagatcatctttttcaatggcagcaagtcttctaatctcatttagatggtcattgaagttgtttccaacctataatcactatcgattatgttgcaaagaacatgggattagcatccactgtcagttgcaaaaagatccccccaaaaagtagcttaaataaggtagaagcctatttctctcaagcataaaagtgtggagaaaagcaatcaataattggttaagatcctatccagtattttatcctgtttctgatgtgaggctgctctgcctagagttatctctttagttttaagtcagctgctggatcttttaaggattccaaggagcaaaaggggaaagaattcaaaaggcataagctgctgcctttttaagaaggtttcttggaagttacacaaaaaaactttcaactgttgctcattgaccagcatttagttctctggcaacagttagctgcaaggaagtcttgggaaatgtagtcttttaactggatcattgttaaatcagggattttgtttgaaaaaggaggtggggaataggtggtagccagccagcaacttgtgttgtcatcaagcctgcgtgcatctttgcacacttgcccgattatccccttagataaattcctagatgttcatcactggttcaaagggtttatagctttatattttgatttatttttccaatttgccttttagaaaagttatgccaatttgtactcccacctctaacaatcagtgagtgctgtttcctcacacaattgccagtgatggctgttagcaatctttaaaatttttgccaatatgaccagcaaaaaaagtgtcattagtggtttaatgtgcatttactgtactcctaatgaggttaagcatcatctcatatgctttatgaccatttgtatatcttctttgcgaatggcactttcggttttctttattgatacataatattttatgtatttgtgtgagtgctttttacttgtatggattgtgtaataatcaagtcagggtatttgagatttccatcaccttgagtgcttatcatttttatgtgttggtaccttttcagttcttttggatatttttttctaagggatttaaaaaactctttcattgatttctaagagcttttataatattttaataatcaggatattaatccttagatatttgtgtgagctattttctttttttcccctcaggatatgcttaagttatgtgttagatattttctttgttgactttaggtcatgtttatttattatgtagctaaatctgtcagtgtttccacttatgatttttgattttgtatcatgattggaaagggcttccccatctctagattattttcttctaatgcttttatgtttcttttatttttatctttacgtcttttcttttttatttaagtaaattccatctggaatttattttgattaaacttgctgtctatctcagttcttattttttcaaatagcaaagttattaaccatgtgttgaaaatttatttcccactgagttttatatgctcatcatatatactaaattcccatctatgctcaagattttctgaaagtactgatgcttttgtttttttgtttttaaacagaaaagcttgtttttgtttttactggagggttaggtggcagtactggtatttttattggttgttttttgcattagttaaaaagcacttcacatttcaatggttttttagccttatagtgaagaagaagaaggccaagagtcaagtgaagagggcagtgaagaagatgtagaggcggtggatgaaacagcagatggagcagaagttaagcaaaggtacaaaagtgggaaaggatatcaaagtaggtttaggaaacattttatttgtttatttttattattataactaattcaatactttcttgaaatggagacaacttgtacctggagagcttttcatactattgtctgcttaaagatcattactgttttagttttgtaattatttttaatacatttagctctacctcgttttcatctggaaactgttagattttcaaaacttactgatgattatcaactgtgattaaagaagttccctaattgagtgaataggcataacctgacctgactcactttgctattttgtctccccagaactgatccccactggagtgctgttcagaaagcgatttcagaggcgggcatcttctgtcttgttaatcatgtctcgttttgctacctaatagttctgatgcgaaataggatggagactgtggaagacaccaatggatctgaaacagggttcagggcatggaatgtacagagcagaggacgtatatttctggtttctaagcctgtgctccaagtaacatttctcattagtttttttttttttttgtacaaaaagaatagataattcatggtgtcacttgaggacttggaaacattctcattgatcctgctttcctatcatttgagtggaaacagatgttaaattttatttactattcgaaaaatcctgaaagcctttaataaaaagtaagaaattggccaggcatggtgattcacactggtaatcccaacattttgggaagctgaagcaggaggatcacttgaggccaggaattcaagaccagcttgagcaacatagtgagaccctatcctacaaaaaataagaaaaattagccaggtgtggtggctcatgcctgtagtcccagctactcgggaggctgaggtgggaggattgcatgagtttgggaagtcaaggctgtagtgagctgtgattgtgccactgcactccagagcatgagtgacagggcaagaccctgtcttaaaaaaaaaaaagtaattaattacatttttttaaaggagaaatgatccataattctgtcattaaaaaaaaattacaggccgggcacagtggctcatgggcacagtggctcacacctgtaatcccagcactttgggaggccaaggcgggtggatcacctggggtcaagagttcaagaccagcctagtcaacacagcgaaacctcacctcgactaaaaatagaaaaattagctgggcgtggtagcgcatgtctgtagtcccagctcctggggaggctgaggcaggagaattgcttgaacctgggaggcggaggttgcagtgagccgagaatactccactgtactccagcctgggcgacagagtgagactccgtctcaaaaaacaaaaaaataattacatagccaaatgaaaattctcttcctcaaactcataagtaatcaccattaacaatttagtacgtgtccttcctgacctttttcgttatttattacttataagtacatccttgtatgtgtgagggtgtgtgtctatgagtagtgtgtatgtgtatacaaaaaaaatccattaattcttcagtgcatgtgatttgccaatagacattaacttacctgtgaaatggaagcgcagggtggagcaggacaggagcagggacattttgataagggtatacttgaagcagctgctccggaacacacagctctgcacgctgggcactgtatggggcttaggtccttaggagaggccagggtgctgtgatggcatcctctcaggaatttggggccaaatcgtattattcttccactaaagtctgtatgtttatatttttcttttttgggttatagttactctagtgataaagtattatagagatgcagaaacatgactgaaaacaaatccattttgatgttactgtcttcagcagataaacactgttgatgtgttaactacgatgggagctattcctgcagggttcaggccttccacgctctcacagcttctggaggaaggtaatgcgtgcctatcagccactgcactctttcagcaaagcagtcaagatccacgtctaatttttctgtcacaggcaaaacacattgttgaagaagatgttgaatctcacatctctttggtgctcatcttttcctcatccttcctatgacagtgaggaaagatccctgatcctatcagaggccagcctgtttaccagtgctccgggttccagcccctttctttttttcaaaaatgtgactcctttaattttcagccctttcctgtgtctttagctggcccaccttccccacactggttcattccctcatctgtgctatcagcacacctaattctccccaccttaaaggatcagccccttgaatcctatcccattctagccaaaacctccttttctctgatcttcttccaagcaagacttttccaaagaattatctccatttggaattttcattttccttactcattcttggctttccctgtatttggcaacttttgtctataagctcattttaaagaggattcatgctgggggacaaggggtgtcctgtataccctgagttgttgagttgtcatggaagggctgctttgaggatgcctttgctgggaaggttcttcccagtactccctaaattcccatcttttcatccttcaggtctcgcggtaaattctgccttcccagagatgccttccttgagtaatgtgggtttcccttactcccattcatgtgaacaccctttatagctctatgtcccctaataattattttatttatttgcttgtctacttattttctaagaaaattttcctcccattcaactgtaaactatggagggcaggggacatatctctgatttatctttgtatttctagaacctggtgtagcatctggcaagagtagaagctcaaaaattatttctcgaatggataaatgatgttattaaaagtattattcatgactaaagcatggaggaagagcataaaatgcttttgtgttaagaagtaaaactaacgactttgttttttctgaagtctccaaaaagtgctcatagatttctgcattttacaaaaatatttgaatgaatccttgtcatcatggggcatattattggcctaaaagtctttcttaaaggtgctttaagatgatcttttatgtgtttgtatctgtaagttttgtactgctgtttttatccataaatctatattggcgcttctattttggaaagcaagttcttagtaagcagcgtggcattttggaagtgcctgtactctagttcatagcataacattatggatttttgatttggagtttctttctttgtaagaaaatgaagaaaaaatgattttttcagggaatcaatttcgagcaaattacttcttacaaccagagctcatgccttcacaactggccttcagagatctgatgtgggatgctacagaaggcactgtaagtatagttactatcagtaaaagtgtaactcttccagattttgtcatagttgcaattagacaaacaacatgttaattgactaatgaattataaaaaacaaaaaaattgtttatgataattttgaaaatagcgatatttttataactaaggcagaatttggacttgctaccttgactttatcttgtttctcttctccattgcactcttctctcattgttagaaaggaaataatactaggtttctatcttaatcattctttgcctcaatttcttcatctgtaaagatggagtaatagtaatgcttccaacataaagttattttgataattatgtgtgtgaagggttttgaataatgcctggcatatgaaaagaactcaatagatgttagccattattatcatttatagtagtagtagcagtagtagtagtatttttgagacagggtctccctctgtcacccaggctagagggcagtggtgtgatcatggctcactgtaacctcaaattcctgggctcaagcgaccctcccacttcagcttcctgagtagctggggccacaggcctacaccaccatgcccaggtaatttttgtattttttgtaaagatggggttttgccacgttgccaggctggtctcaaactcctgagctcaagcaatctgccctcctatccctcccaaagtgctaggattacaagtgtgagccaccagtcccagtctaatataagttatttaaatgaaaaggcttatgaccgtaaagcagaatgtaaagtttaatgaattgaagctgttcttaaaaaataaaaaatcagaatgccaatttatttactcacaatctgaattatacctatgaagcagatctgaataaatatatcagatagtgcattctctctgttaaaacacctattaagaaactaaggaactatgcagataattgcttggaataaaaaatagtggggataatcttaatgccaggtggcattggttttatgctgcgttagccttctgcacttacccacattctgtaggagtgaaccgggactggaatacagtgattctatagtcatagatcatatacattttgcctgccaatatttattgttcctttcatcacagcttttaagtatttaagaaaaatgcaatatttcaaatgtaactctatgaaaaatttacctaaaatgactgatttaattttcaatgaacagagtattgaaacttttattgtatatgtgtaaattttttcttttttaaaaattctgtatacattttcataagccgaattcacaaaagacagatttgtgttagaaatcataaaaataaacttttttataactaatttttctttcagattaggtcgagaccaagtcgtatttcattgattctgacattatggagctgtaaaatgattcctcttccaggaatgagcatacaggttctcagcagacatgtacgcctctgtctatttgatggtaataaggtaaggttactgagaagtaaatcaattcatactaggattatggagaaacattcccttagattcttttccattcaactcctccccaattcccaagagagtattttttacctagtaccaaagaaaaatttgaatgactctttgaaaaattcattttttaaatgagatacaggttaaacagtacttagatggaaatttatagttttaattgtgtatattaaaaaaaagataaaagatttaaagtcagtgatctaagctagcaaatcaagaggctagaaaaagaagagtgagttaaacctgaagaaagtagaaagtgggaaataatacagataagagtagaaattaatgaaatagaaaacagatggaccaaagagaaaattttaaaaaagacaaaagttgattctttgaaaacattaataaaactgaaagatgcatagtgagactattaagacttttttaaaaagtaaaagaaaacaaactattaacatctgacatggaaatagagacattatcacagatccttcagacattaagaggccaataaggagatattataaacagctttataccagtaaatttgacaacattgatgaaatagataaattcctggagaaccataatttactgaaactggcataagaagaaatagaaaatgtgaataacctctggtaaagatattaaacctataattaaaaaaaaatcttgccacaaagaaaacttcaggcctaggtggcttcacctgtgaatttcttcaaacatttaaagaagaaataataccaatcttatacaaattcttccaaggaacagatgaaggagaaatgtttcccaacttatttcataaggccagaaaaaacatgaccccagaatatgacaagacattacaagaaaggaaaattaccagacagtatccttcatagatatagaaagtaaaattctaaacaaaatattattaaattgaatctagcaatatataaaaaggacattatgtcataaccaattggggtttatttcaggaattcaaatgtacattcctgggtaatcacatttaacatttgaaaatcaatcattataatttgccataagaaaaatcatatgatcatcttaagaggtaaggaaaaaacatttgacaaatttcaacacccatttatgatttttaaaaaattatctacaaactaggaatagaagggagagtcctcaaattgcaaaatgcaacaagaaaaaacctaaaactagcattatcttacttaacagtgaaatactgaacacttttttcctaagaccaggaacaagtcaaagatatccaagaaataaaaagataactcagttttctaaagggacaaaagacttgaatagcctcttcaaaaaagaagtatcaaaaaccactagaagtataaaaagatagtcaacatgtaagaagtcatcagggaaatgcaaatgaaaaccacagtgagagagactgacctatatgttatatataagaagcccaccttaaatattatgctataggtagcttaagagaaaaaaaggatgagaaaagatataccattcaaagtagacttcaggcactacatagtgataaaagagatcgttcaccaagaagacatagtaatcctaagtgggtacatacctaacatctgaaatttaacacacaagaaataaaaatggttagaactgaaaagagaaaccgacaaagtcacaattatagttggggcctctattatagttggggagtttaacacttctctctcagtaatataggacaagcagacagaaaattagtaaggatgtaagagaactgtataacatatcaacaaactggattagattgatattcacataacacttcacctcaaaatagtaaaatacactttctcttaagtacatatggaatagtcaccaatatagacggtcctgggtcagaaaacaaacctagacaaattgaaaagaattggaatcatataatatatggtccttgattacatggaattaaatttgaaatcagtaacaggaagataaatggaaaaatacttaaatacttgtaaatttaaaaactacttctaaataatcaaagggttaaaaggaaatttcatgggaaattagaaaatattttgaactgaacaaaaaatgaaaatgcaacatatcataatttgtggaatgttagctaaagcattgcttagagggacatttatagcactagatgcttatgttagaaaagaattctcaaatctacagtcaaagctccttcctgagaagacagtgctgcttgagctgataacggtcaatgtgaaattaaatgagttaatgtaagggaagttatcagagtgatgttatacatggaaagaacatagttctttcaaagagtgtctggatgagaggtggtgatgataacttagagaggtggaggtggagatgagagatgtggatagagatatctgggagtaaaaatcaacgaagcttggtgatggactggatatggaggagagaggaggagtggggtataggcatgacacctagtctctgacttccgcatctggatggatggtggcaacattcaatgagatggggaacactggaagaggaccacgtttggaggagttgacatgggcttggttttgcacatgctgagtatactgctaacccccagcatgaagaaaatgcctttatttcatctgaacttggggtaaagaaatgaacttatgttatgacggtaatcctccctcacttccataatacattctgcacaaaatcactgccacaaatgagccagtaggtgtcctcagtgaccaagagctgaattggtttctgtttcatacatctggtttgatactttttcctgtacctctctgtgttctcatatataagaacataaaaaggaatggaattttattttcaataatatatcaaaataatgaaatttactttatgaaagaaatttatgtgagatttccaaattgagagttatggaacatatttaatagctgcacagatactcgtgctgtttatgtaagagtgcttctttaataaatctaagcctagttatgaataaaaagcattgggctgggcgcagtggctcacgcctgtaatccccgcactttgggaggccgaggcgggcagagcacatggtcaagagatctagaccatcctggccaacatgatgaaaccgcgtctctactaaaaatacaaaaattagctggacgtggtggcgtgtgcctgtagtcccagctacttgggaggctgaggcaggagaatcacttgaacccaggaggcagaggttgcagtgagccaagattgcgccactgcactccagcctggtgacagagagaaactctgtctcaaaaaaaaaaaaaaacagaaaccaaaacacatacacacacacaaaaccaaaggcattgttgccaaaactaactaatgagacacaacttccagtaatgtttgagtcagctcctcttggaccaccccacccagagagggtaattgtaaactctgggcaaagtaaaaagcaactacctgaaggcactgcagagcattcagaagcaggcagacactggagaggagcctcaagcctttagtccactgatttattttttttctctttgttttctctcttttttgtttgtctcttttctttttcctatcttcctgtattagtttgttctcacgctgctgataaagacatacccaagaaagggcaaattacaaaagaaaggtttattggacttacagttccgcatggctgaggaggcctcacaatcatggcagaaggtgaaaggcacatctcacatggtggcagacaagagaacagagattgtgcagggaaaactcccatttttaaaaccatcagatctcatgagaatcattcaccatcatgagaacagtgcaagaaagacctgcccccatggtggcatgtgcctgtaatcccagctactcaggaggctgaggcaggagaattgcttgaaccgggacctgggaggtggaggttgcagtgagccgagatcatgtcactacactccagcctggactacagactgagactcttgtctcaaaaaaaaaaaaaaagaaagacctgcctccataattcaatcacttcctactggtttcctcccacgacatgtgagaattgagggagttacaagtcaagatgagatctgggtgaggacacagccaaaccatatcattcctcccctagtcccttccaaatctcatgtcctcacatttccaaacctatcatgccttctcaacagtcccccaaagtcttaactcatttcagcattaactcaaagttcacagtcccaacatctcatctaagataaggcaagtctcttctgcctatgagcctgtaaaatcaaaagcaagctagttattttccagatacaatggaggtacaggcattgggtaaatgcagccattccaaatgggataaactggccaaaacaaagaggctacaggccccatgcaagtccaaaatccagctggacagtcaaattttaaagctccaaaatgatctcctttgactccatgtctcacatccaggtcacgctgatgtaagaggtgggttcacatggtcttgggcagctcagcccctgttgttttgcagggtataaccccactcctggctgctttcatgggctggcactgagtgtctgcagcttttccagcagcacggtgcaagctgttggtggagctactgttctggggtctggaagatggtggccctcttctcacagctccactaggtggtgccccaggagggactctgtgtgagggggctccaaccccacatttccctttcgcacttccctagcagagattctccatgagagccccgcccctgcagcaaacttatgactggacattcagacatatcatacatcctcttgaaatctaggcagaggttcccaaacctcaattcttgacttctgggcacctgcaggctcaataccacatggaagctgccaagagtttgggcttgcaccctctgaagccacagcctgagcttatcttggccccttttagtcacagctggagtggctgggacacagggcaccaagtccctagactacacacagcatggggaccctcggcctggcccatgaaaccattttttcctcctaggcctcctggcctgtgatgggaggggctgctgtgaagacctctgacatcctctggagacatttttcacattgtcttggggagtaacatttggctccttgttacctatgcgaatttctgcagccggcttgaatttctcctcagaaaatgtgattttcttttctatcgcattgtcaggttgcaaactttccaaacctttatgctccacttcccttatgaaacaatgcctttaacagcacccaagtcatgtcttgagtgctttgctacttagaaatttcttccaacagataccctaaatcatctctctgaagttcagagttccacaaatctctagggcaggggcaaaatgccaccagtctcttcactaaaacataacaagagtcaccttttctccagtgcccaacaagttcctcatctccatcagagactacctcagcctggaccttattgttcatatcactatcagcatttttgtcaaaaagccattcagcaagtttctaggagattccaaactttcccacattttcctatcttcttctgagccctccaaactgttccaacctctgcctgttacccagttccaaagttgcttccatatttttggatatcttttcagcaacaccctactcctggtcccaatttactgtattagttcattctcatgctgctgataaagacatacctgagactgggcaatttacaaaagaaagaggtttactggacttacagttccacgtgtctgaggaggcctcacaatcatggcagaaggtgaatggcacctctcaaatggtggcagacaagagaagagcgcttgtgcagggaaaactcccatttttaaaatcatcagatctcatgagactcattcactatcacaagaacagcgcaggaaagacccatccccataattcaatcaccacccactggattctcccatgacatgtgagaattgtgggagttacaattcaagatgagatttgggtggggatacagtgaaacctatcacttcctgtgtgtcacttgagcatttttttttttttgagatggagttttgcttttgtcacccaggctggagtgcaatggcgcaatctcagttcactgcaacctctgcctcctgtgtttaagcacttctcctgcctcaccctctctagtagctgagattacaggtgctcactaccacacccagctaattttttgtatttttagtagagatggggtttcaccatgttggccaggctagtcttgaactactgacctcaggtgatccacctgccttggcctcccaaagtgctgagattacagttgtgagctaccgcacccgccccacttgaacattttttagaactccattctgagttatctgtagtgttgatgagtgtatctttttggctagtttccttagtggttgcttctaggtattaagtttatacatgcatagcttaccacagtctactagtgttaacattccagttggagtgatgtataaaaccttaccttcctttagttctttactttccctagcttgtaatatagttgtcttaaatatttcctctacatacattaagaatcttatcacacagcaccaaacataatttggaaaacctgaaagaagatccatagtatttacctatatttttactatttccattgtttattctttcttcctgatgctctaagagtcttctttttatcatgtcctatttagagaatctcctttaaccattcttttagggtaggtctgctggtgacagatttttagactttatctgagattgtccctgtttcctcttcattccaaaaggatattttaattagatagagaattctgagttgacagttatttttgtttgacacttgaaaactattgtgtcatttccttctgttctccgtggcttctaatgagaaattcatcatcattcaaattgtttttttcctgttggctaacctaaatgctgtttcttactgttttcaaggtattttcgttgtgtttcagttttcagaagtttacggtgtatctggcatgaatttctttggtttaccctgcttggggtttgctcagcttcttcaatctataggtttatgtcttttgtcaaatttggggatttttttcagccattattttctcaaatacctttgcaactccaattatttcttccagtgccgtttccctctatctagtagtgttgtggtttttattaacagtacatcaccctcctctcccaaccccagttcagaaccagatcttgacgtagagtttagagttcttgatctaagatgatgtcagatatgtcactgatccattaaaaggcccacttgttgacatggttctgcttctggtgtcatggctatgtctttgtcctcctacttgcttaggctcactactttttatgagaagcaggggcaaccttttttttttttttttttaaccctactggcttccagcaacaataaagcaatatctatttctctatcatggggtgatatatagcatacaaatccagccccttgctaccccatgctccttctggactcagagcccaggaaacctctagtttttgtctcactttactcttctatcttctatttgtggtccattgacatatttatcttacttttgggtattactctgtctttttaactatcactgcttcattgcttcatatgtggagcagaatggttgtgttgaagcataaactggttgagaagttcttgtacattcttagaaaaaaaaaaatagagccaaggtttcactatgctgcccaagctggtcccgaactcctgagctcaagcaatctccctgccgtagcctcccaagtagttagactacaggcacgagccactgcacccagcccctcttgcgtttttaatgcagtttgctgaacgaaatctctgtaaattattttgactcttcagttcttcattctttgggtctggttttgcacagaaagcagtgtgattctaagccagtcattcaccctctgtggctgcagttttctgaaatgcatagtgagatggttggactaagtcctttttagttcttagagtcaatatgtcaagaaagatataaaattatcaaacagaagaagttactcttgattccaaacttcaaaattaggattctccaaattgaaaagataaaagcagaggtagtataggatttcaattttgattatagcaaaggacttcttggccattagaagtagaaaacatttcttgaaaaacgaagaagaaccttagaataacatgcagtcttacagtaatcacaaggtagtaattataaggagtttgtattccaagagtccaggtggtaaatatacataatttcaggaaaagtttaaacatatatatattagcaatcgaaggaagtgggattttgttaatgtggaaaacaatccagctgcccataaaatactcctatattcctactactagggatgtggaatacagtgagtggaatttgacctaatataacacatttgggattattttaaattatcattttaaagctttgttttggaagtgttataataaaatattttcatctaaaataaaaattaactattatccattcctttggaagatgtcaattttggccataacattttagaatttgaattcttcattccataaatccctttgtgtttcattgttttatgtaagttttatgatgaacttcttgcatagagcattttataagagattgaatttcaataaaaatataatttatgggcctagagatcttgaggaaaaatataactgtatctgaactattaggactgtctgtcttagtgacagagtaatgaactgcatgtgaaatgcttgtatgggtcacatcttttttttttttttttttttcttgagactgaatcttgctccatcgctcaggctggagtgcagtggtgtggtatcagctcactgcaacctctgtctcccaggttccagcgattctcctgcctcagcctcctgagtagctggaattacaggcacacaccaccacacccagctgatttttgtgtttttagtagagacagggtttcatcatgttggccaggctggtctcaaactcccaaattcatgtaatccacctgcctcaacctcccaaagtgctgggattacagtcgtgagccactgtgctcaactgggtcacatcttttcttttaaaagaccatttttttgctgggtgcaatggctcacacctgtaatcccagcactttgggaggccgaggcaggcagatcacctcaggtcaggagttcgagaccagcctggccaacatggtgaaaccccgtctctactaaaaatacaaaaattagctgggcgtggtgacagggacctgtaatctcagctacttgggaggctgaggcaggagaatcacttgtacctgggaggcggaggttgcagtgagcctagatcatgccactgcattccagcctgggcgacagagcgagactccttctctaaacaaataaataaataaaaggccatttttacctaaaatttcaattacttttctggcaaacctatctcagatattaaggaattcacttaatataatttattactagcataggagtccaactctgaattcatttatgtcatacctgatataaaaagaaaaacattacagaattacatgaagtaaaaagtgaaagttctccccttgccatcttcctcacttagtgtagccactgttaactctttgggacatggaaatggtgacatttcaaagagctttttacatgatttcaaaagggaaaatctcatttcaggttctgagcaacattcatacagtcagagccacatggcaacctaaaaagcccaaaacatggaccttttctccccaggtaagtaatctgctgaatgagtggagtgagtgaatttcaaagtagaacatattcatatttctataaatagcacagagtatgtgggaacagatataaatctttagattctttggtgttctttgaggacattgataaaaattactcatgtttctgactcaccaatgttagtaattcctatgaatcatcccattcaatcagtttcagggttcatttttagaaaattctcatttgatgaaaaatgaaaacataaagataacatttaggaagtggggtgtttttcaaagatgaaatcttccaactgtgctaataaaagctgtgctttcttcagataaagtcagggatgacgcctgagggactgctacattacacccacacactgtcaagactggaatggcattaggtgggtttaaaccactgagtcagcattgcatagacgtagggaggacaaagatgtcttcgtgttgtttttatagtatcaattgtccatattttattttacattactttcgtctacctccaaggtctcattaatttagtatttacttccttcccacagctaactcccttgtataactgcatcctgaaaacccttagttacctttcctcttattgcatcaaaagatcttaaggcaagatggaggttcagtgagagggctcagggtgtggatgaggccagccacctcaactgtgtgctgtgcctgtccagacttgtcgagagcacacctcctaaaagtccatcttgatcttcttagcacccttcctctggtgagaagcatggcctctcttttggcacagtacttcacaattctgttattgcgtctctgtgtatgtgaagagtttagggtagaattttttaatgtttttcctggggtagaaggaagaactgttgggagtatgtgttattctgttgaatgaaattaaacatcagttatgtgcaagcattttttcctaggcacgtggaaactttttcatgccagtgaagttcctattccagcaaaattagtaggggaaaatacatacatgaagaataacaatatcatctacttatggaaccctaactgtgtgctaggccctgtgccaggctcttacgtacattaccttatttaatcagagtagccatgtggggcaagtactgttggtaactaccactcaggcagattgtaatggctttggagctccaagtgctttggaagcacacaggagggtaaagttaattctagtcctttggctcagggaaagttttctagaagagaaactagatcttgaaggttggatagattttacagtcaagaagggagggatacagttgtcgagggagagtgaattgaatgagcaaaagagaaaataaatgaaaattcacaaggcacacattaggaaagttgagcaaatatgtgtattcagtctttaatttttgttctgtttatgaagaacagtggttaatataaatatcttataatgtctataaactattatttgtaacacctctggagacctaggcacagtactattagcctctactctaagcaaaaaataagcaaaggtaaaggtattttccctttaaaagtgaagttaaatttttaaaatttgtaatcattggcattgatgaattcagtccatctgctttttgtttttcttaaaaggcttttattataatgcaaaggcataaactatttactaacaaatagggctgaaaccctgtgtgaggccgttcttgcattgctataaagaaatgcatgaggctggttaatttataaagaaaagaggtttaattggcccctggttctgcagactgtacaggaagcatggcacaggcatctgctcagcttctagggaggcctcaggaagcttccagtcatggcagaaggtgaagggagagcaggcatctcacgtgacagtgcaggagcaagaaggaggaaggaggtgccacacacttttaaaaaaactgatctcctgagaacgaactctctgtggtgaggacagtaccaaaccatgagggatctgccctcatgacccaaacacctcccaccaggcctcaccttcaacattgggattacaattcaacatgaaatttggtggggacatttattcaaaccacatcaaacccccttcccattttttatttttatcaataactttaatttctttatcatttcaggttactcgcatcttaccatgtttgcttgatggtgattgctttatcaggtctaattctgcatctccagatcttggaatattatttgaacttggaatttcttatattcgcaatgtatgtccgttgaaagataaggctttctaatgtatcagttaaaagggaaggttaaaaaatgtgtctattgacaaggaaatccttgaagtctttatgtgtaattgaattttaatcccttgaggaatgagaatgccagtgattctaattttatgtgtgctgatttgttttcgtagcatttaaaataatagtacttattcacatttatagcttgagtgaactccagtgcttttaaagaataaaaattcaaaaaggatgggactttgcagaaagtgagaaaagatgctcactggcatcccagcgccatggttcacctctgtcttccaggggcagagtatacttagccttgtaactgaggtttctaattaagggacttagcagagtagtgacttttataaagtgagtttaacttatgtcatataaactactgaaccagtgggtggggctctgtgctagtaattaaatgtttccacatactaataatagcttgataggtatagtatatatagttgacctcatggtaacccagagagcgttacagagatgttacattaatggtattacactgtccattcatttgtttaaggcaaattcatccatatgtattgtggagggggtaggactggggaaaggagcaggccccccaaaggaagccttaggggcctctagcaactgacagtgggggtaaaattccaagcagaaaagcccttgaatgattaatatctgcattctatctgtcagtgaaacaaaggttcatcatcccatgtagtactgatatgatttgagatcactccacagaatgcttatatcagtcaagagacaatggcagcagttgccacatcattggtttaagggattttcgagagcaattttgacaaaatatgattatcacttgatatactacctttaatatctgacccgcaggcaaaatgagattctactgtgtttcattttattttcttgtgaagaactttttagttctaaaggtgaatactaattttgttcctttaaaaggacttggtatgtgcttataaatttgactagttcagaccttaagtttcatatacttgtcttatttcctagtcaactggtgaaagaggagagttaagctgtggctgggtgtttcttaaactttttgatgccagtggagttcctattccagcaaagtaagttggctatatattcctaacgaatgaatacttctgtaaaaattcattttttagactcttgatacctcaggtttgttctatgagcatgccaataacttttggggagaggactttttatgttgactttagtgttgtttaggcagtgtatgaaaacagcatgcacagtctcatcctaaggaggaagaaatgactcctagagaagaggtattttaaaagatgtttgcactagccatctgctgagaatattctttcagtaatttcctatggtattaacacatttcaccatgctgaaaacagagcctagttgtcttcaaagagtgggaaagttaagtccagagtccagaggtcctctgtgagtctctacccttcctctgtaggtgggacattgaaatcacagtggcaaccacggtaaatgatttaaactttaagatcaaaaggcagactggaagcaaatactgcaatatgtacagaagagttagaagatcattatccctaatataaaaggaactctcaaaaattaataagaaaaagatcatctaaattttaaaatggaggaaaagaaagatctaaatctaggatataaacaagaaattcaagaagggacacaaatgggcaggcagtaggatggtgattaagatcccaaatttggattataaaattttgggctccagtcccagctctacccatgtaactgtaggtggatttcttaacatctccaagtctgaatttcacctatctttaatctggaagattgtaataattcctactccaaaggcttgttgtgaggattaatttagataatgcgccttatgtggcctcctgccacattggcagaggtagaagtcctgactgtacaagtcctttgacatcatcctagagggtgcattacctggggtgccaggtttcttgtgattgttatttgcttttttgtttttgtcttttaatatgctcagggtttttagttgtgcttagtggaagaaataaggaattgtatatctattccatctttctgaaagtgaagtcacagctatttttttaaatgaggtagagctctgtgtattaatatagacacattttcagtgtattagtatatggaaaaagttgcagaatattttgaatactgtgactccacttttgttcattaaaaactatttgtgggccaggtgaggtggctcacaatgcctgtaatctcagcactttgggaggccttggcgggaggatcacctgagcctgggagttatagaccagcctgggcaacatggtgagaccctgtctctacaaaaataaaaaaattagccaagcatggtggcacacgcctgtaatcccagctactcaggaggctgagctgggaggattgcttgaggctgagaggtcgagactgcagtgagcagttttcatgccactgcgctctagcctgggtgacagagcgagattctgcctccaaaaagcaaaaacaaaacaaagcaaaactgttcccagaagttgcctctgaggagcagaattgaggaggtggtgcattacaattaaagggctcttttaccttcttctttctacacttagtatgtgacttcaaaagaaaagcatgtagagtgttagttttgaagcatgtgttagttttgaaattcaccgtgtttatacatttgtttgcatttgcatagaaaagatagggcaggagattaaccacactagagaaggcggcatggggagggatttttcactttttacttatcattcctctgccattcaaactttttataataatctacacgttacttttatattttaaaaataatataagttcatagtggcctcatttcaaataatgatttaacacatttgaaaaatacattaaaaaaaatcacttgtcattaatgtaagtcattaaggtctgaacacgttaatgacttgaattaatttttctcattttcaaggaaaaatgtattttctacagtgtatagttaggaaagataattttctgcagcttataattaggaaagaaagactgtttatttgcccagatagtacctcatggagggatcaacaattattcttttcatttaccaacgaggcataaatgaaatgtctgagtatattagtgctaaaaaatatttaactactgactccagtgttttctacatgcccacagcttatatctgtcattgtatgttattcttttatagaacttatgagcttttcttgaatggtggtactccttatgaaaaaggtattgaagtggacccttcaatatccagaagaggtatggctctcatgtgttgtcttcctttccttaaagattaaacaaatagaagcatctgagaggtagctacattctaataagcatagcgttttttacttgaattcacacttttaaaaatatgtcatttgatataaaaattttaatcatttttaagtacttattttcttggtaacacatatgagactctaagacatcatgaagaatgaaatcatgaagaatgagaactaatgcattagttccttttcattgaccactgaactgatacttgtgactaatacagagactgcctattgctgggtcaaaggatgcagacatttgaaacagtaatatgcatgccaaattgccctctagaaatattgagcatcttttactatgttcattaaccaggcactgtgctagataatgggagaatgaagagcaagacagatatggtcattgcctcatggggctcagagcctgacagatttggaattccatttccactcctcagccacccctctatttgtttggtgattcaagacatgccacctctgctgaccccacaacgccagtcctgccttcttggaacagaaaggagtttggggtctgggatgcagttggttctacctggagtcagacatgctgttttcctttgtaatctggcagcaataatgctgtaactcatgtgatttagcaaacaatcctgtgcccttagggaggtctctcagctcatttagggtatatggatgactcttgcctttcattcaattcagcactactgggtggtatattttcatgaaatacttgttttattatactcactgtctcaagtacttaaagtttcgtgagttacttttgatttttcttaaaagcacacggcagtgttttctaccagattatgacaatgagaaggcagcctcaacttctagtgaaactgagatccttgaacagaagatcaagaaatgtactaaggtgggtacctgcttttacctgtccagtgaatttgggatcattcagcacttggagaccatctctgcttttggcttttcctcatatttagtcatcttttgttataatatttttgtcctctttaattcttcccccaaaggtcagtagggaaatgggtaacaaagctgaaattagcttactcttctatttactagttagctcttctaaccaaatctgttatttgagccatctagtaaatagaagacttgactaaatggggcttaccaatgcatgattctaccctcagggaacttttttaaatgtcaagtttattgagatataatttacatgcagtaaaatttactctttttagtttataattctttgtgttttgacaaatgtatactgtcatgtaattaccactacaatcaagatagagaactttccctcactctaaaaagttatctcatgcccctttgtagtcagctctgtatccccagcctcaggcaggcacacctattttctttctcagcagttttgctttgtccaaaatgtcatacaaatggaatcataacactcaggagccttttgagtctggcttctttcacttagcctagtgcatttgagacttacccatgccattgcatgtgccagtaatttgttcctttttgttctaaatagtacagactgtccctgacttactcaagatttttcaactttaccatggtgcaaaagcaaaacctgttcagtagacactatacttcagtacagattcaatgaattacatgagatatttatactttattacaaaataggctttgtattagatgattttgcccaactgtaggttaatgtgttatgagcatgtttaaggtaggcctgtctaagctctgatgttcagtagactagttgtaggctgggcatggtggctcacacctataattgcagcactttgggaggtggaggtggtagaatcgcttgaggccaggagttcaagaccagcctgggcaacatggcaagaccccatctctaccaaaaaaaaaaaattagctgggtatggtgatgcacacctgtagtcccagctacttgggaggcttaggtgggaggattgcttgaggattgcttgagcccaagaggttgaggctgcagtgagctgtgatggtgccactgcaccccagcctgggcagcagagtgagaccctgattaaaaaaaaaaaaagtctaagtgtattaaatgcattttcaacttatgatattatcttcaacttatgatattttcaatttatgatgggtttctggggctataacccaccataagttgaggagcatctgaattccctttgatagatatactacaatgtgtttattcattcacaaattgaagggcatttgggttgtttctaggtttgggcaattataaataaagctgctttaaacatttgtgtacaaattttctgcatgtggatatatgtcttcatctctcatgggtataaatacctaggagtgagattactgggacatatggagtttaactttataagaaactgccaaactgttttcatttttctttttctttctttttttttttttttttgagacagagtctggctctgtcccccaggctggagtgcagtggcaccatctcggctcactgcaagctccgcctcccgggttcacgccattttcctgcctcagcctaccgagtagctgggactacaggcgcccgccaccacgccctgctaatttttttgtatttttagtagagacagggtttcaccatgttggccaggatggtctcgaactcctgacctcgtgatccgcccacctcggcctcccaaagtgctaggattacaggcttgagccaccgcatccggccctaccaaactgttttcaaaatgactgtagcactttgcactctcattagcaatgtatgagagttccagttactctatattcttgacagcacttgatatgatcagtttttctgttttggccattctaataaatgagaatagtggtttctcatggtgttttaaatatacattttcctcagggagtttgtaaactaataaaatctcagatctatcagtttctcactcagtaccctcctagactagtcatttaacatctctatcagggtcttaatgtctacatctttaaaatggacataataataataatatcaaccccataaaggtgtaatgaggtttaatggaaagaaaatacataaaacagccagtatttacagtgtgtggcacatggtaactaacacaatagtgttagctataattatttactactataattatcttatatatagataaatgtaaacataaagccaggtagatggtgctatatcataaaatttgttcaaatgaagatgtgtagctggtaaaatcagggggcatttgaaatcacctttgaaggattgggaagatgcagaggaaaggagctccacagaggaggcacaaggccaagagggggaaggaagagcatggcatgggacagagactgttgcagctgaactgtcccaccatgacctgctcattgctcacagattattaagaagtagggaagtcagtgaagacttggcatgctcctgtgaatggtttttctcattccagatcatagtcttagcttaaatatcccttgttcttaccactactactgaaatttattttataattatagtgttaacagttcaatctttcaatagccattaataatgtgttcatgggtattatttactctcttagcttttttcccccttggatgttcatagagcctgtaaatcctcttttttggccagcctttccttggaaaattgttatttttcaagattagaaagaaagcagcacagtagtagtctttgtgaaagaaaacccaaatcttgtttggcctcattcttcctacatctttggcctccccactcctcatcttgttgataagcttccaagagtccggaagcactcccatgtgtatatttcaagtacagctcttaatagtgtttctttggcccccaaatactggttttcagacactttgtatgacctcaagatcaaattggactgtgtggtgcagaagttagcaaggcagccccttcttcttaagcagtgaatgctctactgtatgctgggttcttaaaggtcctgtgtccttgtgctccatacctcaggactgcgtcatttgtttcattacagtacagaataggcacccgaaaaatgtttgtgaaataatttcaaagcagagctctccctgctagtgtgaaaatatactcctcaggacttccgctcagcttccacctgtccctggcctccctctgccttgtcttggtgtgtgctcttccacagagagacttgagtgctggcttgaaattgcctctccactttgcatgaccccaaaatatacattcctgggaatttcaaacgtgagttgggacacactgctggtgcaactccaggctggctcgcacagaaaccagcttatgggcagtgaaacctgggccttgcagcagggctgggggctgtagtcagggggcggggtggggctgtgctgtgggttcaaggtaagagactaggcaccagcctgggcccttttggacatcactgagcctgtgcatcctggaggtggagactgaagcaggactgatccatttcaacatcctctctcctcccctgacccgaaaccttcggtaggtgggagaacaagacgggtaatgacaccaatagtccttctcctcctctccttcaaaggcacgccccgcctctatcctcaccctcccttctttacaaacttcacctttgtttatgcaaacttctctgctcaaaggagaaaggacaggggctctttccattatgccaaaggacatgagacagtggagacaaggccaagggcagaaagcctagttagagtttgcattagtgcccatttttacccagtgcccttgctgtttggctttacactgccctctctgactcagccagcagtcctacacatgtatatcttttggatatcaggaatcctgtgaaaatgtgaattattcggtgtagaccactggcaccagagtcctgctcacggggcttggcagtcttcttttgtggagtaggttgtgatcatggcgaccttgtcaacataagaaaaagagagcaaatagatgcttcagtttcaccaagatttgtcttttggagctatttttcaaaagggtttaacttgatgtgatttgaccaaaagcatgtgtataaacccctgaggagggaaagccctgaatttgacttcagattttcagtgcatgagttctaaatatcaagaaaccctgatctggagaagtaggttgcgtgtgtgtgtgtgtgtgtgtgtgtgtgtaaatttgctataaattcattatccttttttttgatgcattccatcttttttctcctttactttcattatatcgttgctaaaaataaataaggtaataatgttagttgcttgaatgcttgagacccattcattgtgttcattgccagagtttgctggtctacatgtgaattcaggaggaagtatatttttacttacttaattcagctaacctttagcagcccagaactttctattcgtcttaagtttgggaaaatcagatgctttctctaaagaatatctaataaagggcaagcagcattgcttcatgttgtgagaaagtgccagaaggaaaggagtgcccacactgggtggaccaatgcctgccaggcaaagcaggcaggtctacgagaaaaggagagggccaagcagaaggaaggaagttcccacccctttccctggcaaaaccttggctgttcttcatcatgagccctgagtttgggcatgcagctgaaacactgtgcaatgggaccgtggaccaaagggcagaacatgagcatgttgttcatgctcaggtcgttctgccccttgctcatgaacatgtccatggtcccagaacaacccagaatcagagcctgatccctgagaaagcatgtggtgacactgaggcagctgaaatggtcccctgcatcccgtctttaaaatgtaggtcaaatgtatacaagatcagaatttagccaggttgaaaaaagacagtttaaaaaagacagtttctgaccttatgtatcacatgctgtatatcaagataactgtgctaagagaacctgtattatatttttagatgtttctagaaattcaggatttaaagagtggtcaaggatacttctttaattccatgaaacttttttttttattataagttttagggtacatgtgcagaacgtgcaggttagttacatatgtatacatgtgccatgttggtgtgctgcacccattaactcatcatttaacattaggtatatctcctaatgctatccctcccccaccccaccccacaacaggccccggtgtatgatgttccccttcctgtgtccgtgtgttctcattgttcaattcccacctataagtgagaacatgcggtgtttggttttttgtcttgcgatagtttgctgagaatgatggtttccagcttcatccatgtccctacaaaggacatgaactcatcattttttatggctgcatagtattccatggtgtatatgtgccacattttcttaatccagtctatcattgttggacatttgggttggttccaagtctttgctattgtgaatagtgccgcaataaacatacgtgtgcatgtgtctttatagcagcatgatttataatcctttgggtatatacccagtaatgggatggctgggtcaaatggtatttctagttctagatccctgaggaatcaccacactgacttccacaatggttgaactagtttacagtcccaccaacagtgtaaaagtgttcctatttctccacatcctctccagcacctgttgtttcctgactttttaatgatgactgttctacctggtgtgagatggtatctcattgtggttttgatttgcatttctctgatggccagtgatcatgagcattttttcatgtgttttttggctgcataaatgtcttcttttgagaagtgtctgttcatatccttcgcccactttttgatggggttgtttgtttttttcttgtaaatttgtctgagttcactgtagattctgtatattagccctttgtcagatgagtagattgcaacaattttctcccattctgtaggttgcctgttcactctgatggtagtttcttttgctgtgcaggagctctttagtttaattagatcccatttgttaattttggctttggttgccattgcttttggtgttttagacatgaagtccttgcccatgcctatgtcctgaatgagattgcctaggttttcttctagggtttttatggttttaggtctaacatttaagtctttaatccatcttgaattaatttttgtataaggtgtaaggaagggatccagtttcagctttctacatatggctagccagttttcccagcaccatttattaaatagggaatcctttccccattgcttgtttttgtcaggtttgtcaaagatcagatggttgtagatatgcggcattatttctgagggctctgttctgttccataggtctatatctctgttttggtaccagtactgtgctgttttggttactgtagccttgtagtatagtttgaagtcaggtagcgtgatgcctccagctttgttcttttggcttaggattgacttggcaatgcgggctcttttttggttccatgtgaactttaaagtagttttttctaattctgtgaagaaagtcattggtagcttgatggggatggcattgaatctataaattaccttgggcggtatagccattttcacaatattgattcttcctgtccatgagcatggaatgttcttccatttgtttgtatcctcttttatttcattgagcagtggtttgtatttctccttgaagaggtccttcacatcccttgtaagttggattcctaggtattttattctctttgtagcaattgtgaatgggagttcactcatgatttggctctctgtttgtctgttattggtgtataagaatgcttgtgatttttgcacgtggattttgtaccctaagactttgctgaagttgcctatcagcttaaggagattttgggctgagacaatggggttttctagatatacaatcatgtcatctgcaaacagggacaatttgacttcctcttttcctaattgaataccctttatttccttctcctgcctgattgccctggtcggaacttccaacactatgttgaataggagtggtgagagaggacatccctgtcttgtgccagttttcaaagggaatgcttccagtttttgtccattcattatgatattggctgtgcgtttgtcatagatagctcttattattttgagatacgtcccatcaatacctaatttattgagagtttttagcatgaagggatgttgaattttgtcaaaggccttttctgcatctattgagataatcatgtggtttttgtcattggttctgtttatatgctggattacatttattgatttgcatatgttgaaccagtcttgcatcccagggatgaagcccacttgatcatggtggataagctttttgatgcattccatgaagcttaattactcgtggaatccattgctgtcacctcatcacagtggtcacattcatcctgttctcttccaacaggctggaagcctgaatattacctctgtgataattttcccttctaaaaatctaatcttaggaattaagataaaggattaatttacaaaaagtaagatctctttttaaatctttggtgatttttctcagcccaaagacatcttccttttgatagaagacaacatatcatttgtaaggtttttgagattttctatatggtccttcctcatgcttaatgacagagtttatatatttctaaaaatagtattagaaatatatattagaatgatctaagatattttcttgagtactttcaaaggttaaatcttgtgcatgatacattcccagtatttactatacatcatgtgtgagggtcttaaagaactcacttttttttttttttttttttttttttttgagacggggtctcgctgtgtctcccaggttggagtgcggtggcgcaatctcggctcactgcaagctccgcctcccgggttcacgccattctcctgcctcagcctcccaagtagctgggactacaggcgcctgccaacacgcccagctaattttttgtatttttagtagaaacggggtttcaccgtgttagccaagatggaagaactcacttttcatgtttccagattattattttgaaatctaaatattgaaattttttatatttttaaatttctgactattttttgatgctattgtaaattgttttgttggtttccttctcaaattgtgcattgttagtgtataaagtacgatttttacgtgttgattttgtattctgcaactttgctagtcatttattctgaaggtatttttcatggagtatttagggttttctacatatattctacatatttctacatcattttgtctgcaaacaaagacacttttctttttttagaaaaatatttccattattgtgttgagtaaaagtggcaggagcaggatccttgtcttgttccttatcttagaggaaaagctttcagtgtttcaccactgagtatgatgttagctgtgggcttttcatatatggcctttattatgttgcagtagtttctttctattcctagtttgttgagtgtttttatcatgaaagggtgtcaaattttaggctttctcagcatcaattgagaaaataatgtgggtttttccccttaattctgttaatgtagcacattatgttgattgatttttggatgttgagccatccttgaatttcattaataaatttgacttggtcatggtgtacaagctttttaatgtgctgttgaattcactttgctagtattttgttgaggattttgcatcaatattcaggaatattggcctgtagtttttttttttttttcttgtagtattgttggcttttttactagggtaattctgacctcataatgagtttgatagtgttttttcctcttcattttttggaaaagtttgaggaaaattggtgttaattcttctttaaaggtttggtagaattctccagtgaagccatctgatgctgggcttttctttatcaggagattttttaaattactgattcaatctccttacttgttattgagattttctatttctttgtgattcagccttagtaggttgtgtatttctagaaatgtgcctgtttcatttaggtcatccaacttgttggcatacaactatttatagtactctcttacacattttttatttctgtaaaatcaatagtaatatcccctctttcatttctgattttagttgagtgttccttagtcattctcactaaaggtttgtcaattttgttcatcttttcaaagaacagagtcttgctttcattgattttctctattgtttttctattctttattttgtctatatctgacctaatctttattatttcttccttctgctagttttgttcttctagttccttagggcataaagttaggttgttgacttgagctcttccttcttttttaatgttaagtatttatagctataaatttccctcttaggactgttttcactgtatcttgtaaattttggtatgttgtgttttcatttcatttctcaagatattttctagtttctcttgagatttcttctttgagccattgttgtttaagtatgttgtttaatttccacatatttatgtgttttccagttttccttctgcttttgatttctagtttcatttcattatgattgaaaaaagatattttgtatgatttcaatatttttaaatttattaagacttactttgtgactcaacatatggtctttcctggagaatatgtcatgtgcacttgagaaaaatgtgtattctgctgttgccgggtagagtgttttgtaaatgtcagctagatccaattagtctacagtgttattgatcttctgtttcattgttctataccttatcgaaagtaggatattgaaatcttctctattattatagatctatgtattgctcccttcaattctgtcagtgtttgcttcatatatttaggagcactgatgtttggtgcatatatgtttataattgttatatattctgaattgactgttttatgattgtacaatatcctttgtctcttgtaacttttggggggcttgaagtctattttgtctgatattaatatggctaaacatgttctcttttagttgctatttgcatgaaattttttttctgttctttcactttctacccatgagtgtcctaagtctaccgtgagtctcttatagataacatataattaaatcgtgtttttttagtgcatcctgccaatctgtatcttttgattgaggagtctaatttatttacatttaaagtgattactaatagagaaggacttacttttgccattttattactcatttgctgcttatcttatagctttttttgttcttaatttcctccctcactgattttctttgtgtttgatttttcatagtgacaaattttgattcccttttactttccatttgaaaatattctatagttattttctttgtggttaccatggtattacatataacatcctaaagttataacaatctattttaaactaataccaacttaacttggtattgcatacaacatccttaggttatagcagtctatcttaaactgataccaatttaacttcgatgttgaattattttctattttttagcccttactgtataccagacactacattaagcactccatacttatttcatttgttgttgttgttttgttttgagacagagtcttgctgtgtcacccaggttggagtgcagtggcacaatcttggctcatggcaacatccaccgcccaggctcaagggattcttctgccttggcctctgagtagctgggattacaggtgcccgccaccaaacctggctaatttttgtattttcagcagagatatggtttcaccatgttggccaggctggtctcaaactcctgacctcaagtgattcacctgtctcggcctcccaaagtgttaggattacaggtgtgagccaccatgcccagcccacacttacttcattttaatccttttagtaaccttctgaaatgcaagtattactattggtatccaataaatgaggaaaccaaagcacaaggagatgaattaattaatttaaagtcacatagctaagaagtgacaaagtcaggacttattccaggtctgtcacaccctcccatgttccacccagtactgtgaacagcctgaattatttcttctgcattcaccaaatcaggcatggcagccacatgcctttgttaaagcttgtagctgactagtccccttctttccaaaacataattagtggcttcccgtttttatttgacatttaacataggtatatatgctaacatggaagcacaaaaatggcaacacagggttgagactcgaaagtgtaaacaaatataaaaagttatctgaaatttaatgtggcctacttgtagtagaaatttttctttaaatagttaaaaatgtgttccagtaatgaagcaaaatttgggactgtttattaaagtaatatacatcaaaacattataagttggattgtaggggattgtctaatgaatacatttttttcttctttaatagtctactgccagaaacattaattggaaatatgtgttctattcacttgttgatattttatcgacaaattcttggagatgtgctcctgaaagacaggatgagcttgcaaagtactggtaagtgggctttgccacttccttatgtgcagtaatgcttcatactctgagtaaaggtaacctataccatcttgtatcttctgtttctggttgtgacttttggaataaaatatttagaacagcattgatgttaatacattacttatgggacatcttcagatccaaagcattgagctttgtgaactcgacacatattcagttctttcaaacatatgtattttcacatttcaaattctagagttttgagatcccaagagtcagatatagtcatattttcccttaatgtctctgagtaatctgttttttcccatgtgtttggtatgcacataatcattttgaagagaaaccaaaatcaaccaaaatagctggttcttagtgcatgaagtataagtatcaaatggattagtttaaattggtgaatccagatatggagtatttgggtgtcctatgtactgtctttattcttgcaacttttttgtacgtttgaaatttttaccaagtaaaatgttaaaaaataagtttaaaaatcaatgagtcaccatacatgattgaacctgcaaagataaatgcatgtgttatagtaattgccttcaaaaagaaaagcagtttaattgtattggctcttctttcagttcaataaatcagtaaccagatatgtactgagtacctggtatgtgccagatattatgctaggcccagtgatgaatgagacaggcataggcgtcccaggcctcaaacacataatttcatgaataatcctctccacccttttgaaataagtgctgtgaaggaaaatacacaacgagaacatgcactgggaagacttgattaatgtgtagggtaaggaaaggcttctttgagtgagtaatatttaacaaaagatgtgagagaggaattagacctatgagggaagtgtgtggggaaggattctttctgggtagaggggccagcatgtctgaagacccaaggaaagaagacatgcatgtgttggagggcttgaaattgaggcaggccagtatggatggagcagagtgagtgagaggcttagcacttgtggacaaataacattcataggcaggagtcctctcccagggacttatcacctggatagataggtagaagtggaactcaaaggcagagaagcgcagaaagttctcaaggaatcattataactctaagggggaggacgggtaagccttttaatcaccattgcctttgaattcattttcatgactcttgagaaacttcatgaatgatgtgacctcttaaagaggataaggcttgttagttttcccaataggtaagaagtttactcagaattgttgacttcatttgaatttaatcattagaataaaatatcctaataatatctaaagaatgaatttttctctactgaggacaccagattatagaataccttgcccttgccatttcaaaagtgtctgctatggtttcagtgtgtcccatctaaaattcatgttaccaatgtaatggtattgaaaagtggggcctttgagtggcgattaggccatgagggctgttgccttatgaatgggattagagacccttacagaagggcttgacaagggaattcgtctcacccttttgccttcagccacgtgatggcacagtgttcctcccctctggaggatgttgtaagaaggcccttaccagacaccaaatgccattaccttgatcttggatttcccagcctccagaacttggagaaataattttattttgtttatgttacccagtctcaggtattccactacagcagcgcaaacagactaagacatgtctttcctgatgtgcttctttgcacagatttttcatgtgctgttatctattgtgaaatgtcaatattctccctcactgtgtttggtcatatggccagaatcctcaattcctaattcttccagtttcacctaccactgtctgctggctccagacacaagtttgggtccttccctgagcgctggtggcctggaatcagacctgagcagcaggtcctctgtctcctttccccccaatgcttcctagtttctgctcagtctcccaagagcagggctacctctaaggggaagattccttttaccatgccacagccataaggaagaaagagaagttgaagaaaaacacagaacaaaattttctagtcttattctgttcagagcctccttgcccttactctaaaagctccattaatttggtacaggaactcaccaggatatgggtataggggcaaatgaaggttgaagggacagctttgagctctcctagaagtcaaagtgtgtagaatgtgttatcaacaaatcatttggcacaataattttcatctgaatatttttgtgtctattgcaataaaatccattgagtgaagtttgcataaaattctttctgttgttttgcatttcagatttaattagccatcccatgctggccaccttccccatgctcttggagcagcctgatgtgatggatgctctcagggtgggtagcatgcattgcaatggaaacctgctggcttatggaagcagttatacactctgtgttaatgagttctgtctaggcctttttttttgttactaggatgatgtctcccaatccctatccattgtctaggtaactcagtcctcatctttcccatcttagcataaattcccaagggctgccttccctgacccagggagcaggtggagtgcctgctatgtacactattgcaatctttgcccattttttccttgacttaggatggccactgattgtgtcctaagagcaaaaatccaaaatggtctgtaagataaatcaattgaatttgcaggggagaatcagggcatgcacatcatctttaattccatgtgtgctgtttgctgtctgaaataactgttgagtgttatgttaaatcgtatgaaatctccaattttcagccatttttggcctaagtggcagtttcatatggtttagcctaatacatcagggtcaataagtagaagagctgcatgcatgcaaggcagatacacaggtaacatcacaagtgccatgggggaggtataacccaggaccttgaagatttaaagaaggcagcaaagaaggatccaaattctgtttcactagagaggtcctgcatgagagagcctaataaaggccagggccaagaggattttgacctgctgagatgggggtgaagacgttgcaggtagaaggcttagcatgagcagacgtttgaggcaggaaggaatagagctgacagtccagcttggcatgtcagatgcaagtaagggagtggttggtagatgggcaaggtaagcctgagtctcggtgtggggctgagggcggtggtaggtggtgggtaacccaggaaggtttcttctttaggcaaactctgccaagtgcaaagaggcagaacatgtgcaggagggaggtgagcatattagggggtgactcctgctgataaaaactaggccatatgcacctgacagcagaaacagaaggaggactcagtcatctacaaagattcttattagactttgaaaccaattcatatgctagcttggctgggttggggggtgtcaatagtaataatgacattttcaacagagatgtttaagaaaatgttcatggtacatatgatctcctgtaattttagataagttcgtctggcactatagctagataatgcagaatttctctttcttctcctataaagtcactagtatcataataattattcattacacagaacatatatacactgattcttcaacaaagatttcacaagagcctactatgtattaatataaggcactgtgctggccacaggaatatttccctaggtgtgtaacaggaatctgcaccttgttcttaggaggaaacttaggatccctaatctagtctaaaatctgcatttccctgatgagcagacagcttggagatgtgcagtgacttggccggccatggagctcagccatgacccagccggggctgtccctgcgggtcagctctgggtgcacccagaatgtgccacgggctgcttgaaagcatgagggtaaagttgtgcacatatgttatttagcaaaaagaccccatttgagccataataagtataaatatatatacatttatatacctgcctgtgaaaagatctggaagaatatattccagagaggtattggtgaatatctctggatcttggattattttatctacattttcttaattttttcacattgaattatttgtgttatgataattttaaaaaagaaagtggtggttgtttctacacccatgagccttcttctctccgtggcatagtgtattacttaggagaagcttggctgtgctgtggtggttagcacaggtttatttcttacccatggtatgtatccagcatggatcagtggaagatgctgctccacagtcacccaagggtacaggctggtggagcctctactgtctcacagcaccatctggaacaagtagctgcctctgttgccagtttccctgcagaagagggagaatggagaattgttcttgggctttcactgcctttgcttcaaaggggcctgggccacttctgctcacattgcattggccaaaaccagtcacacggtccatttaacttcaaaggaggtatagtcttctttttgttccagaagaaaggaagtggatcttggtgaggtaatagtgacctttaacacgtttgctattcccaaatgagttactctaagtgaaacatcctactatttgctggtggctgaatgaaaaataaggtgggacattgacatgtaactaacaaaaatagacaaattttaccagacactaagtctacatttgctaagtgatactcacgttaaaccatattattaggttggtgcaagagaactgtggtttttgccataaaagtagtagcaaaaaccacaattacttttgcaccaactgaataaaatttaaaatgtacagcatgtgagcctcctagagtttacttacctagcacagttcagtttgtggatgacattttaataataagaagaatggcacttggcctgtttagtaaaacactctggttctgtaagggtcctcttcaaactcctaaggacccatagcacagcagttaatagggtggaggaccatagtcccctcacgtggtaataggtatgaacattccaaaatgttctcatgagtggcatagtctgttatctcctgctgagaaacgctctatcaatgcatcatttattttatggagaatctctttattggtgccatatgttatgttcatcccagggcctccctgctgagaaaggtctgatgctttcaggttactcatgatatcaggtgccaacaggaggatatctactgacatgcacagaacccagaccctggaacaggcagccgtgagactggtcatattccacccacgcattcagtttgccaggaaatggcacagtgaaagtcttaaattcatacttctgtgggactaattgaactctggggtttttatttatttgaggaaatttctgtgaagccctgtggacagattagaaatatttactcacaaaattgtacttcagtctgtctcattctgaccattgtcatcatcatgacagagagaattgtagaaaagtttggtatttggcagtgttttctattttcattactgtcttacttggaaagcttaatactattttattattcaggtgctgtggttgtatagttttcatggatgtgttagtgtttcgctgattctattcttaagttagttttgatttataattatcatgggcttctacggcatttttcacagatacatctgcctggtcattctggtgctgggtcatttgcaatagattcctaattacagattcacttcttgcttgtatagaatctgtacagcatttttaaccctgtccataagtttatttacagagtaaatttgcataagtgttgcaaggacttgttactacttggactaacataatatttctgtttgctctttagagttcgtgggctggaaaagaaagcacattaaaaagatcagagaaggtaaaatatgagtctccacactgaactccatatttgcagtacctggtgtttgcttgcctattctaatcatgtctcttttttagcaaaagtagccatagtcataatccctcttaaccagggaaactgtttcattatggctgcaaaaacacattccaagagggttacgcatgatcgttagctaatgtgagaaggaatacttgttcaagacagccatttcagattactgagttttatttaaataaaggggaagtttctaagccaaagtctctcagttgtgtatcaaatttcttttatttttaaaaaacttctctagctctcaaagcctgtatcaccaagagaagggaaaaaaaaatggcctgagctgtaccatatattgaaaacaatgcattgctcctgcttaccttgctataaaatcatggtaattaccaatccgaacttgctttaatcggtgagtcgtggtttgactgctctcatccaggatttggcaaatgggaagggctatagatggaaaatcttcttggcttttcaggtcttgtggtctctgtcacactactcagctctggtgttgtaacacaaaagcagccacagacaatatgtaaatgaccaaatgtgactgttttcctataaaactttatttatgaaaagaggtgagagtccacatttggcccacagtccatactttaccagtcctgatctaaagtattcattatctacaaggaaaatgaagtaacaaatgagctgaaaaccctaaaaattaggaaacaatttatacattgtatccttatttcagcctccatttgatcagtaccatctacatacatgtgactttgccaaaactgccaggcttagtgctattctagtacagcagccttgggcctgtagacattgcccttatgtggacatgtgtggtgggatgggtgatatctctgtgtagactctgctgcctgtggacagctctgccctcaacttgctgtgctctctgagattcccaccatggcctgtgggcatcggggcttgacatgggtacagctgatgctgcaccattcttatctgtgaagggtctgacatcctcatcaccaaaggacccctcgacctccatcccaggcattgctggaaataagccaacaactctggatcctatgcagaacacctgctacaattatcttagataacatgacagttacctctgatatgctgtcagtaagtaggttcagctgacttggcattgttttagttatatttacccctaaccacactggtgtcaccaaaattagactgcaataccttgacagaatgtgtgagacaccctccatggagcttaggagacaccctggtctcatggagccacgtagaggctctcagggagaactgctccactgtactctgtgtaactctgctcacttccacttctgaagtgccatgtcctgcctgagcagctggctcagagccgatacctgccaggcactaatggcaccctccatcctacctcttaggtggcttttagttaatagagttcacagaatttaacactttaaaaataacaatgttatttgtgggggtggtgttttcccagagagacaaagagttcctgaagtccacgtttctcctggtttaccatgactgcgtgctcccacttctccactccacacgcctacccccattcaggtgggcagaagaagagactgagactgcacggtggaaagttatcactgacttccttaagcaaaaccaagaaaaccagggcgccctccaagctctgctgtcaccagacggagttcatgaaccttttgacctttcagagcagacctatgacttcttgggtgaaatgagaaagaatgcagtgtgacagtggcagcctctagccctcagcttcccacggaatcagatggatcctccacgattacgtgaataaaatgatggaaccaaaaatcactgtcactttacaacttaggttttactcttttctttctacagaccatatttttaaagaaatgtttatacaataatttaaatattttttaaaaccataaaataaatttttataaggaa

SEQ ID NO: 15703 - DNA, 81670 bp, Homo sapiens
ggttggtttccctggcaactggagcaatcagagcaccgcagccagggagatgctggcgagacgacagcgagatcctctccaggccctgcggcgccgcaatcaggagctgaagcaacaggtatggtcaggctgtgcagagggccctggggcgggcgacaggcggacgcagctgcgcgcactgcgccttcccaccgtgaccccacctaatcctgggagcttgcccccaacctacttaccttcccaggttgtaacgcccccttaccccataacattccagcacccaaccccgattcaaacccctcctgatcccaactcaacccccagccaaaggcgaaacctcccaaaattcgtgaccatcaactaagcgccccctcctccgaccctcactcccacctaacgtctcaacctcctaccctaacaactcactaacccaccttatctcccaatctaaacttagtggtgtaaccatttccaacccaactctgagcctagctcctctcctccactttccaagcccatttcctttcagccttcctcaagtggagattattattgcctccgtgaactcaagcgaaataggtgtcaagaaatagtcttaatatgcaagaacattaagatctgataaatgagcaaaggaggtgaacgagagaggaaatacaagtaactcataaacatacgaggaatgttaacttcaaagatactcaagtaattgcaaagcacataaggtatcacaaaaatgttaaaaatcacaacactctgtcttgaggaaggtgtgatgaagcaggcacattcactgctcccgtgtataaggtgcttgtacagcatttcaggaaagcagcttgacaaggtgtaacatatgtgtatgcacctaggctcaaaaattacatttccagggatctgctatgtgtaataattagaaagtaggacagagattgatgtataaaagtattcatcacattgttacttatataatatacacagaacagcatagaagggaacaggctaatatggtatttctgtgtgacaggatgctgatgattattatgattttctttattctttttcatatttataaaaatttttaggccaggtgtggtggctcatgctagtagtaccagctacttgggaggctgagacaggaggatcacctgagcccaggagttcgagactagcctgggcaacataacaagacttggtctcaaaaaaaaaaaaactttttaaaaatacactgagttcttattaaaaataagaaaaaagtaaatagcaaccagtgggtttattttctgacattttaatttcactttaatttttttcatgtgatctattaccaagtatttttccactgagtaaaattattttataatctgaggccggtaagagattcactgatgctcatattttatccatttttgttctcttgtttaaagtaaaaaggatttggaaggtaaatatttaggtgactgtgtattggaatcacagtggtgcaacaaaagctaaatactcttctggtagaaataaaaaataaaacttgatggggcattgacttatgctgaacttcggtggatcttaatatggttctgtgtcttattttaaaatttcaacttttattttagattcagggggtacatgtgcaggtctgtcacatgggaacactgtgttatgctgaggtttggggtacagatgagcctatcacacaagcagtgagcacagtacccaataggcagtctttcagtcttcattcctcttccctcccccaccccactccagcagtcaccagtgtccattgctcccatctttatgtccatgtgtactcaacgagtgagaacatatggtatttggttttctgttcctatgctaattcacttaggacaatggcctccagctccatccatgttgctgcaaaggacatgatttcattcttttttatggttgcatattttttcatggtgtatatgtaccacattttctttatccagtccaccattggtgggcatctatgttgattccatgtctttgctattgtgaatagtgctgtagggaacatacacatgcatgtgacattttggtagaatcatttcttttttgggggtatatacacggaaatgggatttctgggtcaaatgatagttctgttttacgttgtttgggaaatctccaaactgctttccacagtggctgaactaattttcatgcccaccaacagtgtatatgtgtactcttttcttgtcagcctcaccagaatctgtcatttcttgattttttaataatagccattttgaccagtgtgagatggtacctcattgtagttttaatttgcatttctctgatgattagtcatgatgagttaattttaaatttagtgggacattaggagaaccaggaaaagttttagaaggaaactataaaaatgattattaaaacaaactattagaaagattattctccctggagaaatattggctctggagccttttgataccttgactatctggaaagtttgttttgatagtattagctaattcttccctgtcttcacagaggacacctgaagctgaatatggaacagattttctattcggtgtctgtaggacaagtaatcaacagcccctctgagtcaggcctgtgatgactggctctatcactaggtgtgtgaattttgtaaataacactcagatggatgccaaattgcaagagtagagaagaaactaatggaattttctcttttttcatccactttatcttctctacgtaatctatagaaaacagaccaaagaagtatgtgcctttttggagagtatattgacaaagttacatatagtgttagtaaacaaactactaagtcaagagaaacaaagtcatgatacattcaatacaatggataccactcagtaatgagaaggaatgaactaatggtacacacaacaatatggaagtatctcaaaaacatgctttgtggaaaggttacacaagagtgcttactgtatgagtccatttatataaaatttcaagaacaggcaaaactaatttatgttggaaaaatatcaaaacaggtttgtctgtggaggaataaggaggggatttactggcaagggcatgagggaacttactagggtgatggtagttttctacatcttgataagaattttggttacacagatgtatgcatttgtcgaaactcagcaaatgtatgcctcgtatttgtgcatttcactatatacatattttacatcaactattgaactttagttagtgacatccatagtccattatttagggagaaatgtattgataactgcaacttactttgaaaggcataaggtgggttgacggatagatcaaataagtatagtataatgttaatgttttttctaggtagcgggtatatgggttttcactgtaaaatttttaaaactttgttgtatgtttaaaagtgttcattataaaatattggataaaaaaagaagttttctttcctaaggcgatatggtatttaataatgtgatattttaaatggtctccataggttgatagtttgctttctgagagccaactgaaagaagctctagaacccaataaaagacaacatatttatcaaaggtaaagtatgctaaattatataagctttacaggaaccgcacttacatttcaatgcatagtatttaaggcatagagattggtcctttggaatcaaatggaagaatcacatagtgttgtaagttgaatgtagaagaaaccaacctaaacctgatggttgcggacttgctgttgtgacagcaactataaaaactgcttaatgtaaacataggtgacatgggcaggattaccctaaatccttagcctatgtagcccagatcctgtgacctggtcagaaacctctgtctataagcaattagtacttcattgggatgtcaactttaactcccatgagaagacaacactgttttctaggtgggtgttttttgttttgtatttgtttttacttaaaaaaaaatccttgggagagtttaaatagacgtgatgaactacatcaaatttagactattaattcataacatttgtattaagtttaggacatcattaagataatctttgtttttgagatatttaaggattttattacattccaaagaacatgagattcattctattaatttaagtgaattgtaattgtttggagaagttttacttaagtcaggcattcagagtgcttaaaggcaaaacaaatgaattttgaaatgtcaaatgaatttaatttataatagtaggattgattaagggatttagttcaagctgaattaacagtaatgaaagaaaagcaaaggttattgttcttgctttactagatttaaaaacagagtaagatttatagactgaatttgaaggccaagggaaaactacgtttttaaattttatgttagtaaactaaaaatcataattattattattttattttttgagactaaatctcactctgtcacccaggctggagtgcagtggcgcaatctcggctcattgcaacctgcacctcccaggttcaagcgattcttctgcctcaggctcttgagtagttgggattacagtcgtgccccaccacacctggctggattttgtattttgagtagagatgggtttcatcacgttggccaggctggtttcgaactcctgacctcaagggatcccccagccttggcctcccaaagtgctgggattataggtgtgagccactgtgcccagcctaataattgttatgttttattttttttgagatagagtctctctctgtcgcccaggctggagtgcagtggcatgatctcggctcactgcaagctccacctcccaggttcaagcgattctcctgcctcagcctcccgagtagctgggattacaggtgcccgccaccatgcctggctaattttttgtatttttagtagagatggggtttcaccgtgctagccaggatggtctcaatctcctgacctcatgccccctgctttggcctcccaaagtgctgggattataggcgtgagccaccgcgcccggcccctaataattatttttaagcccaagtaaccatagtcttctctgtgcatgaaaagaagattgttactgtcatttaaaaactcactttgacatttgcatatctgaaaatgtcatttaggtatcatttttatctgctcagtgctctgagtcttttcagtttgaaaactcatgtctcatgagctctgggagattttattttacaaaaagattatttcgttaattccatttgtctgtttcttcctgaaacacctttgagtcaggtattggatatcctggactgatcctctatatcccataacttcctgttaatagtttctgtttctttgtttgtatgggagatgtttttttggggggatgtggggggtctcactctgtcgttcaggctgtaatgaagtggcacaatcatggctcactgcaccttctgcctcccaggctcaagggatgcccccctcccccgccacgagctaccatgctagcaattctcttgactttaacacttttctttattacctatttcaacagccatattgttttatttcagcagtcatattggtttttttttttttaagatggagtctcactctgtcatgatcttggctcactgcaacctctgcctcctgggttcaagcgattctcctgccttagccttctgagtagctgggattacaggctcacgccatcacactcggctaattttttgtatttttagtagagacggagtttcaccatgttggccaggctgctctcaaactcccgacttcaggtgatccacccatcatggcctcccaaagtgctgggattacgtgagccaccgtgcctggccatcatcagtcatgttgttaatttacaagtgttttctcttgttctcgaattgttcttttttcatagcatcatgttcctgttttcatattgattgccttcttactacttccatgactaggaggctttttttttctccttaagttctcttctgttctctgaattgtctttgctttctctgggctcagattccttttaattagttaattaattaatttatatttggttattcttaaattttatcttcacgttgccggttttctttattaggtctggcttatctatttttattgaacaatgagggactaggttgattattccagagagctctcatgggcttttctactgttagatagagaggggtccttcctgctagtaccatcccctgaataagaatgaaattttgtatgttgatagggcttatcagaggctcggaagtagcttttagtctgaggatcccccagtgccagaatagggccggctctaaccctggtgtatgggaaacttctttagcagtcatgattctcttcaggtcgtttgttaattgtttttgtttgtttttttgtttttagggaagaatcccctggtaaggagggagagcagagaggggaaaagggagctaactggctcaggttttctgtaaatagacttttaaaagaaagaaccccaactaaatctaaacgtaatcagtatcattaatcttcccttgactaatataaagaccttagattgctttaacattgatttccctcctcaaagcttagatgtatgcatatgatttaatttacacaatataacacaataatattagataatttataaagtaaaccccagccactgtgcatgtcttttcatcagcagaatttcataatgtgtccctctatgatttagtttagttaacctttggtcctttatgtctgctgactcaagtcctagagttttcggcctggcagattatctccctcttatgcttgtgttgcgtcttccaccctttataggagaacatgcttccagcctttttccatggagcagaaatttgttgaaatctcttgctggctagttgtccttctttccttctttgcagtgttcagagtttgttaccttttcaaacgttttaatcattttttgtggggtttcaggagccagtgaagatgaatgtgtgcttagtttttatcctgaaccaggagtcttaaaatatcaactgtttgaggattttaataattacatagttataaaggaggtaattgtaataagtaatttattttcttggtacattatattaaaatagttttccactctgggctttaagcgaaatttctgagtctaagtttcagtagagatttttttggtcaagtaacatgacacctgccaaaataagcggctttactgtcagtctcatttgacaaaagcctgcagctaggttctctcagggtggattcatggcttgtgatatcctcaaagaccagcctttgatgtcattccactctgccatcctttgcttgttggtgatgtctctcctcatggttacaaagtccataccctcagtatctaagagcagatgtaggagagattcttttcatgcctggtaagggaggataaaatgggaggcaatcccaatatacgtgttttatgttacactggcagccgtgggccccctgctcaccctgcctgcagtggaggctgagaacataggtgccagtgggaagctgactgccagcaaagaggaagggtgggaaaggggcttttggggaggttgctagtagggtcagccccagtttgatgtttccccttctcttttgctacccttttgacaaaggacttttgttccctttaaaacgttttttatttattactgttttttatttttttctttaagttcagggatacatgtatggcattgtgcaggtttgttacataggtaaacgtgtgccatactggtttactggacagatcatcccatcacctaggtattaagccctgcatccattaattattcttcctgatgctctccctcctctaatacctccttcctacaggccccagtgtatgttgttaccctccttgtgtccatgtgttctcatcattcagctcccacttataagtgagaacatgcggagtttggttttctgttcctgcattagtttgctgaggataatgacttccaactgtaaccatgtccctccaaaggacatgattttgttcctttttatggctgcacagtattctatgagaacatgcagtgtttggttttctgtccttgtgataatttgctcagtatgatggtttccagcttcatccatgtcccttcaaaggacatgaactcatcattttttatggctgcatagtattccatggtgtatatgtgccacattttcttaatccagtctatcattgttggacatttgggttggttccaagtctttgctattgtgaatagtgccacaataaacatatgtgtgcatgggtctttatagcagcatgatttataatcctttgggtatatacccagtaatgggacagttgggtcaaatggtatttctagttctagattcctgaggaatcgccacactgacttccacaatggttgaactagtttacagtcccaccaacagtgtaaaagtttcctatttctccacatcctctccagcacttgttgtttcctgactttttaatgatcgccattctaactggtgtgagatggtatctcattgtggttttgatttgcatttccctgatggccagtgatgatgagcattttttcatgtgttttttggctgcataaatgtcttcttttgagaagtgtctgttcatatcctttgcccactttttgatggcgtcgtttgtttttttcttgtaaatttgtttgagttcattgtagattctgtatattagccctttgtcagatgagtagattgcaacaattttctcccattctgtaggttgcctgttcactctgatggtagtttcttttgctgtgcagaagctctttagtttaattagatcccatttgtcaattttggcttttgttgccattgcttttggtgttttagacatgacgtccttgcccatgcctatgtcctgaatggtaatgcctaggttttcttctagggtttttatggttttaggtccaacatttaagtctttaatccatcttgaattaatttttgtataaggtgtaaggaaggcatccagtttcaactttctacatatggctagccggttttcccagcaccatttattaaatagggaatcatttccccatttcttgtttttgtcaggtttgtcaaagatcagatagttgcagatatatggcattatttctgagggctctgttctattccataggtctatatctctgttttggtaccagtaccatgctgttttggttactgtagccttgtagtacagtttgaagttaggtagcgtgatgcctccagctttgttcttttggcttaggattgacttggtaatgtgggctcttttttggttccatatgaacttaaagtagttttttccaattctgtaaagaaagtcattggtagcttgatggggatggcattgaatctataaattaccttgggcagtatggtcattttcacgatattgatacttcctacccatgagcatggaatgttcttccatttgtttgtatcctcttttatttcattgagcagtggtttgtagttctccttgaagaggaccttcacatcccttgtaagttggatttctaggtattttattctctttgtagcaattgtgaatgggagttcagtcatgatttggctctctgtctgttattggtatataagaatgcttgtgatttttgcacattgactttgtatcctgagactttgctgaagttgcctatcagcttaaggagattataggctgagacgatggggttttctagatatacaatcatgtcatctgcaaacagggacaatttgacttcctcttttcctaattgaataccctttatttccttctcctgcctgattgccctggccagaacttccaacactatgttgaataggagtggtgagagagggcatccctgtcttgtgccagttttcaaagggaatgcttccagtttttgcccattcagtatgatattggctgtgggtttgtcttagatagctgttattattttgagatacgtcccatcaatacctaatttcttgagagtttttagcataaagggttgttaaattttgtcaaaggccttttctgcatctattgagataatcatgtggtttttgtcgttggttctgtttatatgctggattacgtttattgacttgcgtatgttgaaccagccttgcatcccagggatgaagcccacttgatcatggtggataggctttttgatgtgctgctggatttggtttgccagtattttattgaggatttttgcatcgaggttcatcagggatactggtctaaaattctctttttttgttgtgtctctgccaggctttggtatcaggatgatgctggcatcataaaatgagttagggaggattccctctttttctattgattggaatagtttcagaaggaatggtaccagctcctccttgtacctctggtagaatttggctgtgaatccatctggtcctggactttttttggttggtaagctattaattattgcctcaatttcagagcctgttattggtctattcagagattcagcttcttcctggtttagtcttgggagggtgtatttgtcgaggaatttatccatttcttctagattttctagtttatttgcatagaggtgtttatagtattctctgatggtagttggtatttctgtgggatcggtggtgatatcccctttatcattttttattgcatctatttgattcttctctcttttcttctttattagtcttgctagcggtttatcaattttgttgatcttttcaaaaaaccagctcctggattcattaattttttgaagggtttttttgtctctatctccttcagttctgctctgatcttagttatttcttgccttctgctagcttttgaatgtgtttgctcttggttctccagttcttttaattgtgatattagggtgtcaattttatttctttcctgctttctcttgtgggcatttagtgctataaatttccctctacacacagctttaaatgtgtcccagagattctggtatgttgtggctttgttctcgttggtttcaaagaacatctttatttctgccttcatttcgttatgtatccagtagtcattccggagcaggttgttcagtttccatgtggtttagtggttttgagtgagtttcttaatcctcagttctagtttgattgcactttggtctgagagacagtttgttataatttctgttcttttacatttgctgaggagtgctttacttccaactatgtggtcaattttggaataggtgtggtgtggtgctgagaataatgtatattctgttgatttgggttggagagttctgtagatgtctattaggtccacttggtgcagagctgagttcaattcctggatatcctcattaactttctgtcccgttgatctgtctaatgttgacagtggggtgttaaagtctcccattattattatgtgggagtctaagtctctttctaggtctctaaggacttgctttatgaatctgggtgctcctgtattgggtgcatatatatttaggatagttacctcttcttgttgaattgatccctttaccattatgtaatggccttctttgtctcttttgatctttgttggtttaaagtctgttttatcagagactaggattgcaacccctgcctttttttgttttccatttgcttggtagatcttcctccatccctttattttgagcctatgtgtgtctctgtacatgagatgggtttcctgaatacaacacactgatgggccttgactctttatccaattttccaatctgtgtcttttaattggagcatttagcccatttacatttaaggttaatattgtcatgtgtgaatttgatcctgtcattatgatgttagctggttattttgctcattagttgatgcagtttcttcctagcctcgatggtcttcacaatctggcatgtttttgcagtggctggtaccagttgttcctttccatgtttagtgcttccttcaggagctcttttagggcaggcctggtggtgacaaaatctctcagcatctgcttgtctgtaaaggattttatttctccttcacttatgaagcttagtttggctggatatgaaattcggggttgaaaattcttttctttaagaagttgaatattggccgccattctcttctggcttgtagagtttctgctgagaggtcagctgttagtctgatgggcttccctttgtgggtaacccgagctttctctctggctgcccttaacattttttccttcatttcaactttcgtgaatctgacaattatgtgtcttggagttgctcttctcgaggagtatctttgtggcgttttctgtatttcctgaatttgaatgttggcctgccttgctagattggggaagttctcctggataatatcttgcagagtgttttccaacttggttcaattctccccatcactttcaggtacaccaatcagatgtagatttgatcttttcacatagtcccatatttcttggaggctttgtttgtttctttttattcttttttctctaaacttctctgtttgctttatttcattcatttgatcttccatcactgataccctttcttccagttgatcgaatcagctactgaagcttgtgcattcgtcacgtagttcttgtgccatggttttcagctccatcaggtcctttaaggacttctctgcattggttattctagttagccattcgtctaatcttttttcaaggtttttaacttgttttccacgggttcgaacttcctcctttagctcggagaagtttgatcatctgaagccttcttctctcaactcatgaaagtcattctccgtccagctttgttctgttgctggtgaggagctgcaatcctttgaaggaggagaggcgctctgatttttagaattttcagtttttctgctctgttttttccccatctctgtggttttatctacctttggtctttgatgatggtgatgtacagatggggttttggtgtggatgtcctttctgtttgttagttttccttctaacagtcaggaccctcagctgcaggtctgttggagtttgccggaggtccactccagacgctgtttgcctgggtatcagcagcagaggctgcagaacagcgaatattggtgaacagcaaatgttgctgcctgatcattcctctggaagttttgtctcagaggagtacccggctgtatgaggtgtcagtctgcccctactggggggtgcctcccagttaggctacttgggggtcagggacccacttgaggaggcagtctgtccgttctcagatgtcaagctgcatgctgggagaaccactactgtcttccaagctgtcagacagggacatttaagtctgcagaggtttctgctgccttttgtttggctatgccctgtccccagaggtggactctaaagaggcaggcaggcctccttgagctgcggtgggctccacccagtttgagcttccaggctgctttgtttacctactcaagcctcggcaatggctaacaaacagcctcgctgctgccttgcagtttgatctcagactgctgtgctagcaattagcgaggctctctgggcgtaggaccctctgagccatgtgcgcgatgtaatctcctggtgtgccgtttgctaagactgtgggaaaagcgcagtattagggtgggggtgacccgattttccaggtgctgtctgtcatccctttccttggctaggaaagggaattcccttgtcccttgtgcttcccgggtgaggcaatgcctcgccctgcttcagctcatgctcggtgtgctgcacccactttcctgcacccactgtctgatagtccctagtgagatgaacccagtacctcagttggaaatgcagaaatcattcatcttctgcgtcactcactctgggagctgtagactggagttgttcgtatttggccatcttggaaccgccccaagtgttcctttttctctgcaattttgccaacatctgtttttttgactttttaataatcaccgttctgactggcatgagatggtacttcactgtgctgaatgtgtgtcttttgagaagtgtcacttcatgtccttttgctcactttttaatggggtttttttttcttataaatttgcttatttttagactctggatattagacattcatcagatggatagattgtaaacattttcccccattctgtaggttgtctgttcattctgatgatagtgagaggtgacagcatgctggcagtcctcacagccctcgctcactcttggcgcctcctctgcctgggctcccactttggcggcacttgaggagcccttcagcctgccgctgccctgtgggagcccctttctgggctggccaaggccggagccagctccctcagcttgcgaggaggtgtggagggagaggcgcgggtgggaaccgggcctgcacacggtgcttgtgggccagcgtgagttccgggtgggcgtgggctccgtggactctgcacttggagcggccagccagccagccccaccggccctgggcagtgaggggcttagcacctgggccagcagctgctgtgctcaatttctcacccggccttagctgccttcccgcggggcagggctcgggaccttcagcccgccatgcctgagcctccccgccctctgtgggctcctgtgcggcccgagcctccctgacaagtgccaccccctgctccacagtgcccagtcccatcgaccacccaagggctgaggagtgcgggcgcacggtgtgggactggcaggcagctccacctgcagccctggtgcgggatctgctgggtgaagccagctgggctcctgagtctggtggggatgtggagaacctttatgtctagctaagggattgtaaatacaccaatcagcactctgtatctagctcaaggtttgtaaacacaccaatcagccccctgtgtctagctcagtgtttgtgaatgcaccaattgacactctgtatctagctactctggtggagccttggagaacctttatgtctagctcagggattgtaaacacaccaatcggcactctgtatctagctcaaggtttgtaaacacaccaatcagcaccctgtgtctaactcagggtttgtgaatgcacccatcgacactctatatctaactactctggtggggacttggagaacctttgtgtggacactctttatctagctaatctagtggggacctggagaacctttgtgtctagctcagggattgtaaacgcaccagtcagcaacctgtcagaacagactactcggctctctgtaaaatggaccaatcagcaggatgtaggtggggccagataaaagaataaaagcaggctgccggagccagcaatggcaacccgcttgggtccccttccacactgtggaagctttgttctttcgctgtttgcaataaatcttgctactgctcactctttgggtccacactgcctttatgagctgtaacactcaccgcgaaggtctgcagcttcactcctgaagtcagcgagaccatgagcccactgggaggaatgaacaactccagacgtgccgccttaagagctgtaacactcaccgtgaaggtctgcagcttcactcctgagccagcgagaccacgaacccaccagaaggaagaaactccaaacacatccgaacgtcagaaggaacaaactctggacacgccgcctttaagaactataacactcactgcgagggtccacggcttcattcttgaagtcagtgagaccaagaacccaccaattctggacacaatagtttcttttgctgtgcaaaagttctttagtttgatgagatcctatttgtcaagttttgcttttgttgcaattgcttttggctttttgttgtcatgaaatatttgcctgtgcctatgtcctgaatgctattgcttggattttcttctagagtttttatagttttgggttttacatttaagtctttaatctatcttgaattaatttttgtatatggtgtatggaaggggttctagtttcaattttctgcgtatagctagccagctcttccagcatcatttattaaatagggggccctttccgcattgcttgtttttgtcaggtttgtcaaagatcagatggttgtaggtgtgcaagtcttatttctgagttctctattctgttccattggcctatgtgtctgttcttttaccagtaccatgctgttttagttactgtagccttgtaatatagtttgaagttaggtggtgtgatgcctccagctttgttctttttgcttatttgggctcttcttttgttccatataaattttaaaatagctttttctaattctgtgaagaatgtcaatggaagtttgatgggaatagcattgaatctatacattatttggggcagtatgtccattttcacgatatgattcttcctatccacaagcatggaatgtttctccatttttttgtgtcacctctgatttctggagcagtgtttgtagttatccttgagaaggtccctctcactttctttgttagctgtattcctaggtattttattctttttgtagcagttgtgaatgtgagttcaggatttagctctctgcctgcctgttgttggtatataggaatgctagcaatttttgcacattgattttgtatcctgagactttgctgaggttgcttatcagcttaagaagtttctgggccaagacaatgggttttctagatataggatcatgtcatctgcaaacagggataatttgagttcctctcttcctatttgaatactccttatttctttctcttgcctgacttcccaggccagaacttccaacactgcattgaataggagcaatgagggagggcatccttgtcttgtgcctgttttcaaagggaatgcttcaagcatttgcccattcagtatgatattggctgtcggtttgtcatatatggctctgattattttgaggtatattccttcaatatctagtttattgaaatttcttaacatgaaaagatgttgaattttattgaaagccttttctgcatttattgagatagtcatttttttttgtcttaagttctgtttatgtgatgaatcacatttattaatttgtatatgttgaaccaaactttcatcctggggatgaagccaacttgatcatggtagataagctttttgatgtgctgctggattcggtttgccagtattttgttgcggatttttgtatcgatgttcatgaaggatattggctttaagttttctgtttttgctgtatctctcccaggttttggtatcgggaggatgctggatacaatcagttagggaggagtccctccttttcagttgtttggaataatttcagtagaaatggttcccactcttctttttacctttggtagaattcagctgtgaattcatctggtcctgggagtgttttggttggtaagctatttggtaaagctgcctcaattttagaactcattattgatctgttcagggattcaatttcttcctggttcagtcttgggagggtgtatgtgtccaagaactcatccatttcttctagattttctagttcatgtgcatagaggtgtttatagtattctctgctgattgtttgtatttctgtggggtcagtggtgatatcccccttataatttctgattgtgtttatttgattcttctctcttttctttattagtctagctagtggtgtatctattttattaatttttttcaaaaaaccagctcctgaatttgttctttgtagggtttttcatgtctctatctccttcagttcagctctgatcttggttatttcttgtcttctgctagctttagggtttgtttgctcttggttctctagttcttttagttgagatgttaggttgttaacttgagatctttctagctttttgatgtgggcatttagtgatataaattttcctctgaacactgctttagctgcatttcagagattctgatacgttgtctctttgttctcattagtttcaaagaacttcttgatttctgctttaatttcattatttacctgagtcattcagggacaggtggttattttccttgtagttgtgtgattttgactggatttctttctttctttctttcttttttttaaatgtgtctatcagaatgactttatttcagtacactgagccccatcaggcagtgtggtttgtgcaaggctgtgcgagggacaggcttgggctaagagaagggaggtgagttgttaagtgcactgcagtctgtggggtgctacatcgctttcacacacacctgctcctttggcccatacctggcaggggcctttggtcataggacagcatgggggagactactgcatggagtctgggattggggtgggtcatggtgtcacaggtgagggtgccggtgaagacaggctggccccagctttgcaccacctgggctaaaggcctttggactactcctaggagtcaggcctggctccattagctcctggcactctggtctggccctctccctccttaaccaagcaggtccaaggtcaagagtggcccaagatcagccaagagggggccatcccacctctacagcttagttgcctggtcagctatagtggcaaaaggcaacatggttaattgcagctttctccagtcctaaggacactggctctccaacaccccttccttgtttaggggcctctgccaaagaaaaattctacctcctgtttcagaaaatctaaccagcaaccagcctgttgattctatggcagtgagcaagagaaagagggagaaagaggctggtgggagtgtctttgagtatagctaccaatttcaaatggtcctgcaacctgtggacactgtccgcttaccatcagcagggagaggcggggccctggaggctaggctaagcttaggtgctataaacattagtgtggcagggcaggaggcagtgagctccctctctccatccccttactgaacaaacacttcaataaataaaactgtttgaagatggcattgcaacaagaacggatggaaagcaaggacctggaatcagcaggcaccttaaactctcccaaggcccctggaaggggaatgggctgggaacattatctctgcagccattcagggggagtactactcctgccctcctccagtggctggtgtggtcctgttccctggtgaacatgagggcttcctgctccctcctgactttccagtctctgtattagctcttgggatgcttttctagcctcccaaaccaaaatggcaacaaaaccagacagaggtcaaccccagccccagtcctcagtgcccagtcagggggcattgatagcggagtgaccagcaaggggaggcagcagctgcctgggtcctcagggcaccctggtgggtgggagtgagggtggggccagtccagcctaggatgggcagcagcaaggtctcccagggggtggtttatctccctctgtctccccgtggtagtaaacggagttccctgcagccagtcagaggcccacctgaggagggagtgcagcctctgccagtgttcttccctgtcaggagccagttaatggtcacccccaggcctcaggccatcaccatcgtgggtagttcctcatcctttctggacctggggtccctgggccacatggcacttgcatgtgctcacacacttgtatacacacatgcactcacacacacaggcaattcctcacaaacactctgactcaacaaagcgagttttaaagtggagttaacttcagagagaggtgaagatgatatcccaacattagaaggttttcctgtggatagatcaggcaccgtcttcctcatattccttcttggagacccacatcttcttaaaggtgtcatggaggcaaggatagagccctcaatccacgtggaatacagtctctcctgaggtgcaaatatcctgatcttcacttcactcagtagcctgtcaccaaaacctttgaacaaggtagagcctcccaagaggacgatgttggagaaaagtgtgaactgcaggtccatgtctgacttctggatggcgaacaccaggaccttgtggatgccttcactctcctccctgatcaagtctggcctgaagagcagctcaggggcccggaattgggaaggaccaatctcaatggtgctgccatcaggcaggtagtactgagccttctctgtctctagtgtctcttccttctgggggtttatggataggtaggagggtctttcttttatggccttgacaatctcaaactcaaaggatgagtggaaatctcaaacgatgagtggaaatcatagccctccttatgcaggtagaggtgcaggaagcgagagatgttccagcttgcgatgtcaattcgcatgatggagtggggcatggcaaagccctgatagatgggcacagcatgggtgatgccatccccagaatccagcaccacccccgtggtcctgcctgtggcataaaggctgagcacagcttacatggagatgaaaatagcaggcacattgaagctcttgaagaaaacgttggcagctcattcctggtgtctttgtgggtttaaaggtgcctcagtgaggagcacgagatgctcctctgagaaagtctgcagctggtccttagaatagacatattgccagatgtgttccatgtcgttccagtccttgacaatgccatgctccgtgagatagcagattgagagcagcccttggtgctccttggctttgaagccaatgaagatgtcaccttcaagggctcctgccatgatacgaatatgcatgggtaggcccacatactttggaaagcagtatttgtggatctgatcaccagcaaaaccagctttaatcacaccagattcattgtcgatcatgacaggctggttggtgattgtatcgtaagactccacggcagaggaatctctcctggggaaggaactaccagttgggtctgccgctagtgccattcatgaatttcttaatcttgagttctaatttgattgcattttggtctgtttgttataatttcagttctttttcatttgctgaggaatattttatttccgattacttgatcaattttagagtaagtgccttgtggtgatgagtagaatgcatattttgttgtttttgggtggagagttctgtagatatctattaggttcacttgatccagagctgagttcaggtcctgaatatctttatcaattttctgtgtggatgacctgcctaatattgtcagtggggtattaaagtctcccactattattgtatgggagtccaagtcactttgaaaatcataagaacttgctgtatgaatctgggttgccgagaccagctcggtcatggagaccctaacccagcggcgctagaggaattaaagacacacacacagaaatatagtgtgtggagtgggaaatcaggggtctcacagctttcagagctgagagcattgaacagagatttacccacatatttattgacagcaagccagtgataagtattgtttctatagattatagatttactaaaagtattccttacgggaaataaagggatgggccgaaataaaggggaggttctggctagttatctgcaacaggaacatgtccttaaggcacagatcgctcatgctattgtttgtggttcaggaatgcctttaagcagttttccgccctgggtgggccaggtgttcctttccctcattctggtaaacccacaaccttcaccatgggcatcatggccatcatgaacatgtcacagtgctgcagagattttgtttatggccagttttggggccagtttatggccagatttcggggtctcttcccaacatgggtgctctttttttgggtgcatatgtatttaggatagctcttcttgttgaattgaaccttttaccattgtgtaatgcccttctttgtcttttttttatctttattggcttaaagtctgttttgtcagaagctagaattgcaacccctgcttttttctgttttccatttgcttggtaaattttcctccatccctttattttgaacctatgtgtgtctttgcaaatgacgtggatctcttgaagacagcataccgatggatcttgactctttatccagcttgccattctgtgtctttttaattggggcatttaacccacttacatttaaggttagtattgttttgtgtgagtttgatcctatcatcattattctagctggttattttgcagatttgtttatgtggttgcttcatagtgtcactggtctgtgtacttcagtgtgtttttatagtgggtggtatcaatttctcctttccgtatttagtccttccttcaggagctcttgcagggcaggcctggtggtgacaaattccctaagcatttgcttggtctgaaaaggatcttatttctccttcatgtatgaagcttagtttggccggatttgaaattctgggttggaaatttcttttctttaagaatgatgaatattggtccccagtctctgctggcttatagggtttgggtttccactgagaggtatgctgttagtctgatgagcttccttttgtaggtgagctggcctttctctctggctgcctttaacttttttttttttcattttgaccttgaagaatcatgattatgtgtgttggggttgatcttctcatggagtaccttactggggttctctggatttcctgaatttgaatgttggcttgtcttgctaggttgggggaattcttctgtatgatattctaaagtatgtttttcaacgtggttccatttttcctgtcttttttaggtaccccaataagtcacgggtttggtctgtatacataatcccatatttctctaaggttttgttcattcattttcattcttttttccctattcttgtccgcctgtcttaattcagaaacataatcttcaagctctgagattctttcctctgccttgtctattctgctattgatacttgtgattgcattataaagttcttgtgtttttcacctctatcaggtcagttatgttcctctcttaattggctgttctggctatcagctcctgtattggtttatcatgattcttagcttctttgcagtgggtttcaacatactcctttaactcaacaaagttttttattacccactttctgaagcctccttctgtaagttcagccatctcagcatcatcccacttctgtgcccttgctggagtggtgttgtggtcatttggagcagaagaggcactctggctttttgagttttcagcattttgtgtcaattatttctcatctttgtgggcttatttgcctttgatctttgaggttgctgacctttaaataggatttttgttgagtttttattgttgatgttgttgttgttgttttctgtttgtttttcttttaacagtcaggacactctactgtagtgttgctgtggtttgctgtaccccagaccctaattgcctcagtttttcccatacctggaagtatcaccagtgaaggctgcaaaacagcaaatatggcagccagctccttcctctggaagctctgtcccaggagagtactgatttgttgccagcccaaacgcactttgtaggaggtggctggaaaccccttttgggaggtctcacccagtcaggtggaatgggattacagacccacttaaagaagcagtctggctgctttttggtagagcacatatgatacattaggaggggactctttcttctggaccatttgtattctccaaagccagcaggctagaatggctaagtctactgaaccccagagatagcagccacccctgccccggtaacttggaactgcctcagaaagattccagactgctttggttggctggctggaattccaagccagtgggtcttaacttgtgagttgccatggaagtgggggccatggaagtggggcccacggaacaatgctgcttggctccctggattcagctccctttctagggatatatacagatggatatccccccttgctggggatcttggggccagagtatataaaattcctgggtcactgtatgtgcctgagcagctgctctgctgagacaccacacagttctgtgtattggacccaaggccctggtggcatgaactcaggagatctcctgatctgtgggttgcagagatccgtgggagaaacatggttttctgggcagggttgcatggtcactcaccacttctcttggttggggatgggggttcctttggctgcatgccactcccaggttggctcttgttccccttgttccctggcttttctacattctcatgggtcaaggtgtttgccttgtcagtctcaatgtgagaacctggatatttcagtttaaagtgctgaattcacttgcccttcttcattcctctcagtgagtgccatagaccacagctgcttctaattggccatcttggatcaacgttgttattccctttttcactgcttatttcatttcactcacatctataagcaaaaaaaaaaaaaaaaaaaaaaagactcaaacggcataaaaaagtgacttttgtaggttattgtttagtaaagcatttgaattaaaaaaatctcatcatgagctatagctcatatttggtcattttttgtacttctcatttgggtatctaagacttaatgctgaattgaggcatctgtggaataaataaaactctggacctgtctggacaagcaagctcaaagcaggagtgtgctgtggtgggaataggccaactgtggaatcctaaactgccttcatattgttgctgtaccattgagcagctatgtggacttggtacacatagcttgagaagctatgtagaacttctctttctttaagtggagtgagggttgttatgaggcttaaatgaggtaatgtttgtaaactgcttaacatggttggcacacagtaaactttaggtactattatcagttttgtctctgaggctagttcctaggtttatggagttgtagagctggagaagcattttaaagtccagcgttcttccttattttagagagaggaaactgatgcccagagacactgaaggtttctgaggcttggttatcatgtctatgtgttttacagcttggctatgaggatcatctgagctaataggtggaaaagcatttatatgtcagttttttagtattgttcatacagtggctaattgccttgcctgctcaacgactgaatgattttataaaatagctttctggttctgataatagaaaaatcaatatattttcttttttttcttaatttagatgtatccagttaaagcaggcaatagatgaaaataaaaatgctcttcaaaaattaagcaaagtaagtattgaggttaatcacattattaaaacatctcttcctatacaagtatttttattaagtggaagttaattcaagttggtaagttcctgggtttacgttagtgatatagtctaactgcagccagtgctggcttgccgaacaggcttgctaagtctgtgcttgggagcaaagcaaaatccagggctccaactaccgaaaaatgttcagctttgatgaactcacctgctattaaggattcagacaatcctggaaggagctatttttatttttgcattttgtgagttgttttacagtttagaattatttttattttaatttctttgtggggaaataatgcataatctggccctgagggtaagtggtaaagaagcttcttgtatcaaatggcagctctgatatcaatgtctctgcagaaacaagaggaacaggaatttaaccttgacaatcccttcaggatttttttttttttttcacatgagccttggctacagctagatgtccaggtccagagactcatggagtctttaaagtggaaggcacctgaaagtcagctctccagctgtatattactcccctttactgcatctgagatatgtggtcactgaagagctcctccaaatttctccagtgacacaaaacttttcaacttagactgtttgaaaacctaattatttctgtttcacaggtgaggaaattgaagctctcagtggtgaagcatccatgcctcttctgtcaataagtggcagaacttgggattggtgcctgtctcattgactttaaagccgatcttctgtcagaacatatctcttactgactatggaaggtctataatacttagcaagaaaataaaagagaaacctaaaacaagtggtataattttattttttcatttggtttgcattccaacacaattgcctgtttcttttaaatctaatttatttccctaagataggtgtaatgtcacactgatatttactttgttatatagcacttattggaattttttgttgttcttttgaaattaggaaactgaaattaattttttagtgaaatagacctatattctctcataggctgatgaatctgcacctgttgcaaactataatcagagaaaagaagaggagcatactcttttggacaagcttacccaacaactgcagggccttgctgtgacaataagcagagaaaatataactgagtatgcttcctttctacctttcttttttcttttttaaagatatatcaccaatagctttaatgtttaactcaaagacatatagcagtatagatataaacaaatgacactaacaatagaatcagtcaacatttatttattgtgtataatagaaggtgttagatcccatgagagatggaaagaagtgtaagtcatagtctctgccctcaggcaatttataatttagttgaaacaaaacagagatctgaaaagctaaatgaacaaatgttagaaaataaagatgatatatttaatgtcaatgttgatgtgtaaaagggaaatgatttggaatgtctacttgcattgttctccctttcataaacattctttaaaaatttgaagcaaagactgagtgtggtgactcatacctgtaatcccagcattttggaaggctgaggcaggaggatcacttgaggccaggagttcaagaccagcctgggcaatacagtggaccccatctctacaaaaaaacccaaactagtcaggcttggtggcacgtacctgtagtcccagctacttgggaggctgaggcaaggaggattgcttgagcccagaagttccaggctgcagtgagctataatcacctcagtgcacagcctgggcaacggagtgagacactgtctctattaaaaaaaaaaaaaattgaagtagggacatgcattgtttgtctgccagagtgtatgttaataatagcttctgaaagttgtaaagaagacttacatatacaagttgagtattccttatctgaaatgcttgggatcagaagtatcttcagttttggattgttttggattttggaatatttgcattgtacttacttgttgagcatccctaatctggaaatctacattttgaaagactccaatgagcatttccttggagtgttattttgatgctccaaaagtttcagatttaggagtatttcggattttggattttctgattagggatacccaacctgtacgaacaaacccaatttgtgggaagcaaaagaaaaaaatcagttattcagactatttcagtgttgttctccaacctttatactgtatcctgggaaaaaatgctgaaggtggtagatgcaaggatctagaatttccaccgattcttagtactgagaatggcagagtagttggtattggactaaccttcccaccataaatgactataaagtctggacaaaatatacaaagcatctgtttgaagccactgagcatctaccaagcagggttgatattcttgatatagggagacacatgaagcaaatcctacattcacctagaccttttccctgggaataatttatgagctgtggtggaggaaggtagattccaagcagggaatagtagtcttactcgactgaggagacagagatcacactttggagctgctcagttcactgagagttgtggagcaaggtgccatagagagaagggagctgcacagaaacaactccagcaatctgaaaggtctcctgggctgtatagggcatgatgcctgcaaggcctggcagaaagtacctgctgggagactaagagcttaatggattctggtaatcatatagtcctggaaaaacactggagtttgtacctagttctagtaaagagacttgggaaatgtttcaggcatttagtagaggacacagaaggcccaggccctaggagtaaagaaaacaccctgagagtaacaaccatgatctaggaataaagacaaagctgaggtaggtcttctctaaaagagcctaaaagcagaccttatcaggaacaagataatttaactgtgtaacattaaaataatttaaaatttcttagaggaatataacataatccaaagtctgtaagtgagtcatgtaatgtgtccatcacagcaaccagtataaaaaaaatcagaaatgcaaaaaagcaggggaaaatacatgatcaataagtgacaagatggtcactaaaaacagacccagatatgatccagatatagagttagctgacaaggacttctaaataaaatgattaatacagtaaagaaaatagaagaaaagatgaatgaaatgggaaatgggtgtatttaattcaaatatagaaaaatcaaatgaacattctataactaaaaaatacaatatttgataaagtaatgactgagaacttccaaaatctgattcaacatatagactcaaaaatctgggaaatatattaaaatcaagagaataaataatcagtagctcggagatgtgagaattagcaaataaccataaaacaacaatttttaatatgttaaataatttataggaaaagattgataagatgaatagagcgaaatcttaagcagagaaatgggaactaataaagaccaaaatgaaaattctggaactaaaaaaatacaatatgtgaaataaaattgctgagtggtttaatagaagattggatacaacagaagaagggatcagtgaacccaaagacagcttaaaagtttttcaaattgatacacaaaaataaaaaaatgcaaagaacaaaacagaatgtaagagagaggtgggacactgttaaaagttgtaacagatttgtaattgaagtctcagaataagagagagaatgaagcacaagaaatatttaaagagatagtgactgaaaatatttaaaaattatgatctaagagagatatcaatccactgatccaagaatctcagggaaccccaaacagaatcaatataaagaaacccacacacaggtacctcaaactaccgaaaaccaaagataaataggagatcttaaaagctgccaagggaaaaaaggaaacatgtagagacaaatgacagaattacagttgacatcttatgagaaaaaatacaggtcagaagacaatgcagtaacagtaacatcttgaaaacgttgaaagaagaaaccatcaactcagaattctgtatccagcaaaagtataaaaaattaaagtgaaataaagacattttcaggcaaacaaaagctgagaaaatttgtcaactgatctgcagtataagaaatgttaaaggaagttcttcaggctagcagacaatgatcccacattgaaatttggaccttcaaaaaggattgaagaagatgggtacgtgggtacatataaaagcctattttttcttttctatatgcctttgaaagacactcaattatgtaaagcaaaatatatatttggggatttataatatccagttgattctcattatttacagtagttatgttctataaagttgccaggaatactcgattagtaaatgctaaaccattgctcctggggaaatgcagacttaagactcctgtgagcctctggtcacaatgtttttgtcaactgagtaacatacaaccttgtgttactgtttaaagacactttatttcatatattttattgattcattaacattgaattcacactaacagcactatcactcatgcatgaacaagtcttatctaacacacttattttctccagaggtacattatagccttcttgtgcttaggaataccacatggctcttcagcgctatgtttgggagccattttaaacaacaaaatcaccaaaaaaaaaaaaaagcacaaaaatgcaaaaactgtggcactaaatagactgcaaaaaagggacactttcctgtatgagagctgaaaaaaaaaggcaggtgtcaccatgttcagcttcagttgggaatgtgtacgccagacaactcaaattttttgctgctttgtgtatgtccacaaatgaccacaaaagcactgtgagtattaattaggaggttacaaataaagtttagtgagccaatgaattcataaatacagaatctgcatgttacaaggactgactatatgtagaaggaaaatgtgacaatagcacagcatagcacaaaggctggcaggtaaatggaattatttatcttaaagttattttatctttggtgaaatgtgatatttaaattagactatgataagttagggatgcatattgtaatacctaaaacaatcactaacaaaataatacaaagaagtgtagcttgtgaaacaacacaataaaatggaatactaaacgtgatttgattaacccaaaaaaggcaagaaaggagaaataaacagatgagacaaatagaaaccaaatagtaatatggtttcaatgcagccatttggatagttacattaaatgtaaatggagtaacactccaattacaacaaagattgtcagattgaatttttttaacccaaatatatactatttagaagagatagactttagtatgcagttatagagagagtgaaagtaaagaactggaaaaaggtattccatgttctacaacaaagatattatttgttttataaccaaaacaaaggtgatacggttacaataatatcagatatttaaggctaaaagtaatttactatttaagaaaggacatttcataatgataaaagaaagggtcgattcagtaggaaaaaaaatcttcctaaatgagtatacatttaataatatgggttcaaatgtataaagcaaaagttgccagaactaaaacagagctagataattcacaatccttaaccaccgtgatctaattacatgtatagtcaagcctttcttagtgatagggatatgttctgagaaatgagtcattaagtgatttcatcattgtacaaacatcatagaatgtacttgcacaaacctagaaggtgtaggttaccatacacttgggttatatagttatagtatagcatgttgctcctaggctacaaacctgtacagcatgttactgtgctgaatactgtacacaattgtaacacaatggtgtatttgtgtatctaaacatatccaaaaataggaaatgtacagtaaaaatatggtattatatgtatggggccatcattgtatatgtggcccattgttgactgaaacattgttgtgcagcacatgactatatatgtgtagaacacagcacctaagtatgtattatgtaaatacatattcttttcagtgcatctgtaacattaaccaaaatgaaccatattggaccataaagtaattgtcaccaaatttcaagagtttgaaattatgtagaatatatatatattttctttgatgacttggaatgacattaaaacccaatgacagaaaaataattagaaatcactgcatgtggccaggtgcggtggctcacgcctgtgctgaggcgggcgaatcacgaggtcaagagatagagaccatctggccaacatggtgaaaccccatctctactaaaaatacaaaaatgagctgggcatggtggtgcatgcctgtagtcccagctactcgggagtcggaggcaggagaatcgcttgaacccgggaggtggagattgcagtgagccaagatcataccactgcactccagcctggtgacagaatgagacaccgtctcaaaaaaaaaaaaaaagaaaaagaaaaagaaaagaaattactacatgtttgcaaattgtcacacacttctatataaactgtgagtcaaagaaaatataacagtggcaattagaaaatatttggaatgataataaaatgactgggttgcaaccagcatagtgcttaaagggaaaatttctatcttttgtttgtttgttttggagacagggtctccgttacccagactgggtatagtggtgcaatcttggctcactgcaacgtccacctcccaggctctagtgatcctctccacctccgcctccctgagtagctgagactacaggcgtgtgccactacgcttggcaaattttttaaattttttgtagaggcagggtctcactatattgctcaggctggtcttgaactcatgggcttatgcaatcctcccacctcagcctcccaaagttctgggattacaggtgtgagccgccacacctggccagaaatttatatctttaaatgtatagtttgaaaaaaaagttgaaaatcaattactaaaacatccaactttaggggccagaaaaaggacaacaaacccaaggagagcaggaaagaaataataaaaataaaagcagaaaacagtgaacaataaacagacatacagtaggcaatatcaacaaagccaaactggtttttggaaaattaattaaatggataagctgctagcattactgatcaagaaaagagagagagaaaaaaaatcaatacagattccacaagcattaaaaagatactatgaaaagactatgaacaacttgtgtgaataagtttgaaatttagataaaattagtttctttaaaaagaaaatgtactaaaattgacacaagatgaacagaaaatcttaaaagttctactaaaatatttactaaagaagttgaatctgtaattaaaagcctttccacagattaaactctcaggtggctttactggtgaatttattgtaaacatttaagaaagaaatagtgccaatattaaaaaatcattccagagaacaaagaagaaacactttcaaatcattttataagctttcaataacactgatatcaaaacatgacaagaacactagaagaaaattgcaaggccctcatgaacacatgcacaaactcagtataaaatattagcaagtaaaatctagaggcatttcaaaagggtaatacatcatgaccaagtggaatttgttccagagtgtgaggttggcttaacattaaaaaatcaatcattgaaattcactacattaatgaaggggaaaaaccgttatcaagttcacattattttcggcaacattttagaataattgacccatataaaatatgtgcaaaatatctcctaaagaaggaaagagacgcgttgaaaatcaatatgacattttatggattttttagtcttgtggtataaaaatggttgttacatccctgtttatgttttagatcattgtggtataagagtgtcctaccattattttaaacaaagttcagctaatattcctttttattccagagaaaatcttgtagttgactagttttatagttaatgatgttcatttgcattagtctaagtattgttttcccattttaaagataagcttctctcatgtaagctttaggagggcaaagatcttggttttgttcattgttatagcccaagcacatagtgtctgtcacacagtaggtgctccccaaaatttaaactttgctgaatgttgaatgagtaaataaaattcagaaagatttagtgacgtgcccaagctaacattattttggcatttctctcttcctcaccctcagattcacctcctttctcttcatccctatgctgttttcttagttcatagtgttgtcacttctcactttcaacagccaccctcacctttagcctttcttctaatctgttccccacattatacctttgtctcctttctaaagtgggaatcatatcatgtccttcccctactcatttttaggggcgactttaaaggtaaagctcacctgggctacattccgcgtacctcttttcagcctcaactctcactcattttccttaagccttgccctaccattcatgagctacttgatgtttcctaatcttaaatctcctttctcctctccctgcccttcctttctactcccattttacctgattaattccatatcatctctcaagacctaattatagccttttatgattcccattcgtgcaacctgggttaggtgtccctcttgtgtgattgatttcttagtatcctgtgtatacctctactctagtacctattgcactattttataattctccattttctagattgtctcactgcaagctccttgaggatggggaatcatgtctggtttacctttgtgtccactgtgtatctctctgacacggaacttgacctacagcatcagtgtcatcatcataactgacttttatggaaagcttgctatgggcaagcactgttctaaacactttgcaagtagtaactcatcttaatcctcatgacaatcttagaaggcaggttctattattatctccactttaccaatgagaaatggagagcttaaaagaagcctactcaaggtcacccagcaaagagggaatagagccagaatttaaatttagcagagcctatgctctaagtacttcataataatgcttcaacagcattttctgaatggatgaatccaagacttgaattcggagtctcctggcctcaagtccagtgatgctctgccatctcacatacatgactcagctccctctccgcctcagtctctccaggcacacggtcttagctagatggtagaaactgttctttgtattttcccttatttcttttatttgccagctccaaatatgggatattcatgtatatgtagaagttacactcatagctggtctgttcttgtatattatttcaagtagtcctactcagaaacactttttgtagagttggggcacctactgaagaagaggaagaaagtgaaagtgaagatagtgaagacagtggtggggaggaagaagatgcagaggaggaagaggaagagaaagaggaaaatgaatctcacaaatggtcaaccggtgaagaatacatcgctgttggagattttactgctcagcaagttggagatcttacatttaaggtaggtagaataagactgaaacctaacctaagggtcgatgtccatacctaacagaataagaaaactctgcctgtacacctgtattacagattcttaaaatgcagttttataacaatctatttaaataagtaataattacaatttacaagcagtagtaatatgagattgtgttactaaagttacctcttctaaagatttttgaaagtagctttaatgttgagaattcctaatttaggggtaaaattttataatttgttattgaatgtcatgtataaattcattcaagtgagttaggcaatgtccataggtggaggtagaagggagcacttcctgccattttgtagcagtctttcctgttagcttagatatgagaggggcttacatccatgcttggttggcctgggcataaataagtggcaggtgggacagaacaataaagttgtgatttttaaagttgtgattttgagcctgtgttttctgctagagaaatgagccaaagaaatttaagtgaatatatgaattttagttcttatattaaacttcaaagtttagtaactgattaataataaaatacataagaatattatgcaaataattatatggtttgatttatagatttttttttcaaattctcctggaaaatggtatcaatattagacaataatgtatattttaattaagtgtttgcttttgtagtgtccttagtggtggaaatgcttttgtcttcaaagatgaattttatttttataaatgagtgagtgttattcaaaacatatctggtgaattaagtgggtaattatattcagtaaatactatttttgctcaaaaatagggtttaactttaatggaattgatattctttgggaatttatatgctgcttctgaaagacacttttccagagatattaaaacattcaaaaatattttacgcagtaattgaatttttggaataagtatggggccttaaaaatgattgtgaaaaatggttcccatttgcataaatggctcaagtgtatgttaggtaaccaaaaggaatgattcattaaactatgtcacatttatggttttaggtgagttaggcagaatacataggggtcgggtgatagggaagcttttgataaaccttaggataaatattggattaaaaaaagattttgcctttttttcagcacatattttgaatcattggtattgacatatactcatgattattgaattttatttaaaatggtttactttgttttgctttaagaaaggggaaattctccttgtaattgaaaaaaaacctgatggttggtggatagctaaggatgccaaaggaaatgaaggtcttgttcccagaacctacctagaggttagtcttggtttatgccttccttttctaagacttttttttttttcgcttttaataaaacatttagctgtgttcttttgtcagttgactagtgaatgacttgagatatagaatttgctttaattttggagggacaggacctgggaaaaacattgtgtattaatggtcctggggacctgtgaagtgctcttacgcatgtgagccctggaacgtgatctcacaatgaggggatgctttgtggattaatgctgatcataacaaataataggtgtctattgtttattgtaaaacataactgcagttaactttgtgttaacttccacaaatatgtgatccccttactaaaatgtgaacatactatacatgtgtgtttgtagcttgtattttcttatttcataaaataacatggtcattttctgtgccaagatatatagatttctgtctggatcagcactgtccagtagaactatgatgcaaaccacacatgtaatttaaatttttcagtagccacactgagatatctttttgctgatgccacttctgacaccaagtatgtggtttttctctgacaccaaatatgtgttattacatcagttcttctacaccaaccggtgtcagcaattcaattcgattctgatgctaatgcctggagctagcacagacccccacaggttaaaggctcagtcccacaagattgctgctcacttccgttgccagtcacaagtcccaagagccacccatacttctgactgactggctatacattcacgagttcccataccatcacctcaggggttcagtaatttactagaatgattcacagaactcaggaaaacactttccttgcatttaccagtttattataaaggatgcaactcaggaacagccatagagtgaggtattggttgggggtggctggcatgcactctctgggccttccaccttcccagcacttcgctgtgttcaccatcctggaagttcctggaaccccatcatttaggggtttttctgaaggtttcattagccatgtttaactaaatcattagcaattggtgattaactcagtctccagctcctctcccctctttgaaggttggagggtggggctgaaagttctaacctctaatacctgggttggtttttctggtaacctgtccccttcctgaagctgtttaggtgcccacctagaattacctcattaacataaactcaggagtgactgaaggggactcttgatgagtaagaaaacatactcctatcattcaggaaattccaagggtttcaggagctctgtgccaggaatcagtgacaaagaacaaatacatgtttttcattacacacatttttaaaaagtaaaaagaaacaggtagaattatttttaataatatattttatattatccagtatatcaaaaatactattttgacatatcaatatttaaaaatattgagttgttttgcttttttaacattaagttcaaaatccaatgtgtgttttacatttacagcacttctcagtttggattaatttcaagagctcactagctacatgtggccaaagggctattgtattacatagggcaggtctagatcatctttttcaatggcagcaagtcttctaatctcatttagatggtcattgaagttgtttccaacctataatcactatcgattatgttgcaaagaacatgggattagcatccactgtcagttgcaaaaagatccccccaaaaagtagcttaaataaggtagaagcctatttctctcaagcataaaagtgtggagaaaagcaatcaataattggttaagatcctatccagtattttatcctgtttctgatgtgaggctgctctgcctagagttatctctttagttttaagtcagctgctggatcttttaaggattccaaggagcaaaaggggaaagaattcaaaaggcataagctgctgcctttttaagaaggtttcttggaagttacacaaaaaaactttcaactgttgctcattgaccagcatttagttctctggcaacagttagctgcaaggaagtcttgggaaatgtagtcttttaactggatcattgttaaatcagggattttgtttgaaaaaggaggtggggaataggtggtagccagccagcaacttgtgttgtcatcaagcctgcgtgcatctttgcacacttgcccgattatccccttagataaattcctagatgttcatcactggttcaaagggtttatagctttatattttgatttatttttccaatttgccttttagaaaagttatgccaatttgtactcccacctctaacaatcagtgagtgctgtttcctcacacaattgccagtgatggctgttagcaatctttaaaatttttgccaatatgaccagcaaaaaaagtgtcattagtggtttaatgtgcatttactgtactcctaatgaggttaagcatcatctcatatgctttatgaccatttgtatatcttctttgcgaatggcactttcggttttctttattgatacataatattttatgtatttgtgtgagtgctttttacttgtatggattgtgtaataatcaagtcagggtatttgagatttccatcaccttgagtgcttatcatttttatgtgttggtaccttttcagttcttttggatatttttttctaagggatttaaaaaactctttcattgatttctaagagcttttataatattttaataatcaggatattaatccttagatatttgtgtgagctattttctttttttcccctcaggatatgcttaagttatgtgttagatattttctttgttgactttaggtcatgtttatttattatgtagctaaatctgtcagtgtttccacttatgatttttgattttgtatcatgattggaaagggcttccccatctctagattattttcttctaatgcttttatgtttcttttatttttatctttacgtcttttcttttttatttaagtaaattccatctggaatttattttgattaaacttgctgtctatctcagttcttattttttcaaatagcaaagttattaaccatgtgttgaaaatttatttcccactgagttttatatgctcatcatatatactaaattcccatctatgctcaagattttctgaaagtactgatgcttttgtttttttgtttttaaacagaaaagcttgtttttgtttttactggagggttaggtggcagtactggtatttttattggttgttttttgcattagttaaaaagcacttcacatttcaatggttttttagccttatagtgaagaagaagaaggccaagagtcaagtgaagagggcagtgaagaagatgtagaggcggtggatgaaacagcagatggagcagaagttaagcaaaggtacaaaagtgggaaaggatatcaaagtaggtttaggaaacattttatttgtttatttttattattataactaattcaatactttcttgaaatggagacaacttgtacctggagagcttttcatactattgtctgcttaaagatcattactgttttagttttgtaattatttttaatacatttagctctacctcgttttcatctggaaactgttagattttcaaaacttactgatgattatcaactgtgattaaagaagttccctaattgagtgaataggcataacctgacctgactcactttgctattttgtctccccagaactgatccccactggagtgctgttcagaaagcgatttcagaggcgggcatcttctgtcttgttaatcatgtctcgttttgctacctaatagttctgatgcgaaataggatggagactgtggaagacaccaatggatctgaaacagggttcagggcatggaatgtacagagcagaggacgtatatttctggtttctaagcctgtgctccaagtaacatttctcattagtttttttttttttttgtacaaaaagaatagataattcatggtgtcacttgaggacttggaaacattctcattgatcctgctttcctatcatttgagtggaaacagatgttaaattttatttactattcgaaaaatcctgaaagcctttaataaaaagtaagaaattggccaggcatggtgattcacactggtaatcccaacattttgggaagctgaagcaggaggatcacttgaggccaggaattcaagaccagcttgagcaacatagtgagaccctatcctacaaaaaataagaaaaattagccaggtgtggtggctcatgcctgtagtcccagctactcgggaggctgaggtgggaggattgcatgagtttgggaagtcaaggctgtagtgagctgtgattgtgccactgcactccagagcatgagtgacagggcaagaccctgtcttaaaaaaaaaaaagtaattaattacatttttttaaaggagaaatgatccataattctgtcattaaaaaaaaattacaggccgggcacagtggctcatgggcacagtggctcacacctgtaatcccagcactttgggaggccaaggcgggtggatcacctggggtcaagagttcaagaccagcctagtcaacacagcgaaacctcacctcgactaaaaatagaaaaattagctgggcgtggtagcgcatgtctgtagtcccagctcctggggaggctgaggcaggagaattgcttgaacctgggaggcggaggttgcagtgagccgagaatactccactgtactccagcctgggcgacagagtgagactccgtctcaaaaaacaaaaaaataattacatagccaaatgaaaattctcttcctcaaactcataagtaatcaccattaacaatttagtacgtgtccttcctgacctttttcgttatttattacttataagtacatccttgtatgtgtgagggtgtgtgtctatgagtagtgtgtatgtgtatacaaaaaaaatccattaattcttcagtgcatgtgatttgccaatagacattaacttacctgtgaaatggaagcgcagggtggagcaggacaggagcagggacattttgataagggtatacttgaagcagctgctccggaacacacagctctgcacgctgggcactgtatggggcttaggtccttaggagaggccagggtgctgtgatggcatcctctcaggaatttggggccaaatcgtattattcttccactaaagtctgtatgtttatatttttcttttttgggttatagttactctagtgataaagtattatagagatgcagaaacatgactgaaaacaaatccattttgatgttactgtcttcagcagataaacactgttgatgtgttaactacgatgggagctattcctgcagggttcaggccttccacgctctcacagcttctggaggaaggtaatgcgtgcctatcagccactgcactctttcagcaaagcagtcaagatccacgtctaatttttctgtcacaggcaaaacacattgttgaagaagatgttgaatctcacatctctttggtgctcatcttttcctcatccttcctatgacagtgaggaaagatccctgatcctatcagaggccagcctgtttaccagtgctccgggttccagcccctttctttttttcaaaaatgtgactcctttaattttcagccctttcctgtgtctttagctggcccaccttccccacactggttcattccctcatctgtgctatcagcacacctaattctccccaccttaaaggatcagccccttgaatcctatcccattctagccaaaacctccttttctctgatcttcttccaagcaagacttttccaaagaattatctccatttggaattttcattttccttactcattcttggctttccctgtatttggcaacttttgtctataagctcattttaaagaggattcatgctgggggacaaggggtgtcctgtataccctgagttgttgagttgtcatggaagggctgctttgaggatgcctttgctgggaaggttcttcccagtactccctaaattcccatcttttcatccttcaggtctcgcggtaaattctgccttcccagagatgccttccttgagtaatgtgggtttcccttactcccattcatgtgaacaccctttatagctctatgtcccctaataattattttatttatttgcttgtctacttattttctaagaaaattttcctcccattcaactgtaaactatggagggcaggggacatatctctgatttatctttgtatttctagaacctggtgtagcatctggcaagagtagaagctcaaaaattatttctcgaatggataaatgatgttattaaaagtattattcatgactaaagcatggaggaagagcataaaatgcttttgtgttaagaagtaaaactaacgactttgttttttctgaagtctccaaaaagtgctcatagatttctgcattttacaaaaatatttgaatgaatccttgtcatcatggggcatattattggcctaaaagtctttcttaaaggtgctttaagatgatcttttatgtgtttgtatctgtaagttttgtactgctgtttttatccataaatctatattggcgcttctattttggaaagcaagttcttagtaagcagcgtggcattttggaagtgcctgtactctagttcatagcataacattatggatttttgatttggagtttctttctttgtaagaaaatgaagaaaaaatgattttttcagggaatcaatttcgagcaaattacttcttacaaccagagctcatgccttcacaactggccttcagagatctgatgtgggatgctacagaaggcactgtaagtatagttactatcagtaaaagtgtaactcttccagattttgtcatagttgcaattagacaaacaacatgttaattgactaatgaattataaaaaacaaaaaaattgtttatgataattttgaaaatagcgatatttttataactaaggcagaatttggacttgctaccttgactttatcttgtttctcttctccattgcactcttctctcattgttagaaaggaaataatactaggtttctatcttaatcattctttgcctcaatttcttcatctgtaaagatggagtaatagtaatgcttccaacataaagttattttgataattatgtgtgtgaagggttttgaataatgcctggcatatgaaaagaactcaatagatgttagccattattatcatttatagtagtagtagcagtagtagtagtatttttgagacagggtctccctctgtcacccaggctagagggcagtggtgtgatcatggctcactgtaacctcaaattcctgggctcaagcgaccctcccacttcagcttcctgagtagctggggccacaggcctacaccaccatgcccaggtaatttttgtattttttgtaaagatggggttttgccacgttgccaggctggtctcaaactcctgagctcaagcaatctgccctcctatccctcccaaagtgctaggattacaagtgtgagccaccagtcccagtctaatataagttatttaaatgaaaaggcttatgaccgtaaagcagaatgtaaagtttaatgaattgaagctgttcttaaaaaataaaaaatcagaatgccaatttatttactcacaatctgaattatacctatgaagcagatctgaataaatatatcagatagtgcattctctctgttaaaacacctattaagaaactaaggaactatgcagataattgcttggaataaaaaatagtggggataatcttaatgccaggtggcattggttttatgctgcgttagccttctgcacttacccacattctgtaggagtgaaccgggactggaatacagtgattctatagtcatagatcatatacattttgcctgccaatatttattgttcctttcatcacagcttttaagtatttaagaaaaatgcaatatttcaaatgtaactctatgaaaaatttacctaaaatgactgatttaattttcaatgaacagagtattgaaacttttattgtatatgtgtaaattttttcttttttaaaaattctgtatacattttcataagccgaattcacaaaagacagatttgtgttagaaatcataaaaataaacttttttataactaatttttctttcagattaggtcgagaccaagtcgtatttcattgattctgacattatggagctgtaaaatgattcctcttccaggaatgagcatacaggttctcagcagacatgtacgcctctgtctatttgatggtaataaggtaaggttactgagaagtaaatcaattcatactaggattatggagaaacattcccttagattcttttccattcaactcctccccaattcccaagagagtattttttacctagtaccaaagaaaaatttgaatgactctttgaaaaattcattttttaaatgagatacaggttaaacagtacttagatggaaatttatagttttaattgtgtatattaaaaaaaagataaaagatttaaagtcagtgatctaagctagcaaatcaagaggctagaaaaagaagagtgagttaaacctgaagaaagtagaaagtgggaaataatacagataagagtagaaattaatgaaatagaaaacagatggaccaaagagaaaattttaaaaaagacaaaagttgattctttgaaaacattaataaaactgaaagatgcatagtgagactattaagacttttttaaaaagtaaaagaaaacaaactattaacatctgacatggaaatagagacattatcacagatccttcagacattaagaggccaataaggagatattataaacagctttataccagtaaatttgacaacattgatgaaatagataaattcctggagaaccataatttactgaaactggcataagaagaaatagaaaatgtgaataacctctggtaaagatattaaacctataattaaaaaaaaatcttgccacaaagaaaacttcaggcctaggtggcttcacctgtgaatttcttcaaacatttaaagaagaaataataccaatcttatacaaattcttccaaggaacagatgaaggagaaatgtttcccaacttatttcataaggccagaaaaaacatgaccccagaatatgacaagacattacaagaaaggaaaattaccagacagtatccttcatagatatagaaagtaaaattctaaacaaaatattattaaattgaatctagcaatatataaaaaggacattatgtcataaccaattggggtttatttcaggaattcaaatgtacattcctgggtaatcacatttaacatttgaaaatcaatcattataatttgccataagaaaaatcatatgatcatcttaagaggtaaggaaaaaacatttgacaaatttcaacacccatttatgatttttaaaaaattatctacaaactaggaatagaagggagagtcctcaaattgcaaaatgcaacaagaaaaaacctaaaactagcattatcttacttaacagtgaaatactgaacacttttttcctaagaccaggaacaagtcaaagatatccaagaaataaaaagataactcagttttctaaagggacaaaagacttgaatagcctcttcaaaaaagaagtatcaaaaaccactagaagtataaaaagatagtcaacatgtaagaagtcatcagggaaatgcaaatgaaaaccacagtgagagagactgacctatatgttatatataagaagcccaccttaaatattatgctataggtagcttaagagaaaaaaaggatgagaaaagatataccattcaaagtagacttcaggcactacatagtgataaaagagatcgttcaccaagaagacatagtaatcctaagtgggtacatacctaacatctgaaatttaacacacaagaaataaaaatggttagaactgaaaagagaaaccgacaaagtcacaattatagttggggcctctattatagttggggagtttaacacttctctctcagtaatataggacaagcagacagaaaattagtaaggatgtaagagaactgtataacatatcaacaaactggattagattgatattcacataacacttcacctcaaaatagtaaaatacactttctcttaagtacatatggaatagtcaccaatatagacggtcctgggtcagaaaacaaacctagacaaattgaaaagaattggaatcatataatatatggtccttgattacatggaattaaatttgaaatcagtaacaggaagataaatggaaaaatacttaaatacttgtaaatttaaaaactacttctaaataatcaaagggttaaaaggaaatttcatgggaaattagaaaatattttgaactgaacaaaaaatgaaaatgcaacatatcataatttgtggaatgttagctaaagcattgcttagagggacatttatagcactagatgcttatgttagaaaagaattctcaaatctacagtcaaagctccttcctgagaagacagtgctgcttgagctgataacggtcaatgtgaaattaaatgagttaatgtaagggaagttatcagagtgatgttatacatggaaagaacatagttctttcaaagagtgtctggatgagaggtggtgatgataacttagagaggtggaggtggagatgagagatgtggatagagatatctgggagtaaaaatcaacgaagcttggtgatggactggatatggaggagagaggaggagtggggtataggcatgacacctagtctctgacttccgcatctggatggatggtggcaacattcaatgagatggggaacactggaagaggaccacgtttggaggagttgacatgggcttggttttgcacatgctgagtatactgctaacccccagcatgaagaaaatgcctttatttcatctgaacttggggtaaagaaatgaacttatgttatgacggtaatcctccctcacttccataatacattctgcacaaaatcactgccacaaatgagccagtaggtgtcctcagtgaccaagagctgaattggtttctgtttcatacatctggtttgatactttttcctgtacctctctgtgttctcatatataagaacataaaaaggaatggaattttattttcaataatatatcaaaataatgaaatttactttatgaaagaaatttatgtgagatttccaaattgagagttatggaacatatttaatagctgcacagatactcgtgctgtttatgtaagagtgcttctttaataaatctaagcctagttatgaataaaaagcattgggctgggcgcagtggctcacgcctgtaatccccgcactttgggaggccgaggcgggcagagcacatggtcaagagatctagaccatcctggccaacatgatgaaaccgcgtctctactaaaaatacaaaaattagctggacgtggtggcgtgtgcctgtagtcccagctacttgggaggctgaggcaggagaatcacttgaacccaggaggcagaggttgcagtgagccaagattgcgccactgcactccagcctggtgacagagagaaactctgtctcaaaaaaaaaaaaaaacagaaaccaaaacacatacacacacacaaaaccaaaggcattgttgccaaaactaactaatgagacacaacttccagtaatgtttgagtcagctcctcttggaccaccccacccagagagggtaattgtaaactctgggcaaagtaaaaagcaactacctgaaggcactgcagagcattcagaagcaggcagacactggagaggagcctcaagcctttagtccactgatttattttttttctctttgttttctctcttttttgtttgtctcttttctttttcctatcttcctgtattagtttgttctcacgctgctgataaagacatacccaagaaagggcaaattacaaaagaaaggtttattggacttacagttccgcatggctgaggaggcctcacaatcatggcagaaggtgaaaggcacatctcacatggtggcagacaagagaacagagattgtgcagggaaaactcccatttttaaaaccatcagatctcatgagaatcattcaccatcatgagaacagtgcaagaaagacctgcccccatggtggcatgtgcctgtaatcccagctactcaggaggctgaggcaggagaattgcttgaaccgggacctgggaggtggaggttgcagtgagccgagatcatgtcactacactccagcctggactacagactgagactcttgtctcaaaaaaaaaaaaaaagaaagacctgcctccataattcaatcacttcctactggtttcctcccacgacatgtgagaattgagggagttacaagtcaagatgagatctgggtgaggacacagccaaaccatatcattcctcccctagtcccttccaaatctcatgtcctcacatttccaaacctatcatgccttctcaacagtcccccaaagtcttaactcatttcagcattaactcaaagttcacagtcccaacatctcatctaagataaggcaagtctcttctgcctatgagcctgtaaaatcaaaagcaagctagttattttccagatacaatggaggtacaggcattgggtaaatgcagccattccaaatgggataaactggccaaaacaaagaggctacaggccccatgcaagtccaaaatccagctggacagtcaaattttaaagctccaaaatgatctcctttgactccatgtctcacatccaggtcacgctgatgtaagaggtgggttcacatggtcttgggcagctcagcccctgttgttttgcagggtataaccccactcctggctgctttcatgggctggcactgagtgtctgcagcttttccagcagcacggtgcaagctgttggtggagctactgttctggggtctggaagatggtggccctcttctcacagctccactaggtggtgccccaggagggactctgtgtgagggggctccaaccccacatttccctttcgcacttccctagcagagattctccatgagagccccgcccctgcagcaaacttatgactggacattcagacatatcatacatcctcttgaaatctaggcagaggttcccaaacctcaattcttgacttctgggcacctgcaggctcaataccacatggaagctgccaagagtttgggcttgcaccctctgaagccacagcctgagcttatcttggccccttttagtcacagctggagtggctgggacacagggcaccaagtccctagactacacacagcatggggaccctcggcctggcccatgaaaccattttttcctcctaggcctcctggcctgtgatgggaggggctgctgtgaagacctctgacatcctctggagacatttttcacattgtcttggggagtaacatttggctccttgttacctatgcgaatttctgcagccggcttgaatttctcctcagaaaatgtgattttcttttctatcgcattgtcaggttgcaaactttccaaacctttatgctccacttcccttatgaaacaatgcctttaacagcacccaagtcatgtcttgagtgctttgctacttagaaatttcttccaacagataccctaaatcatctctctgaagttcagagttccacaaatctctagggcaggggcaaaatgccaccagtctcttcactaaaacataacaagagtcaccttttctccagtgcccaacaagttcctcatctccatcagagactacctcagcctggaccttattgttcatatcactatcagcatttttgtcaaaaagccattcagcaagtttctaggagattccaaactttcccacattttcctatcttcttctgagccctccaaactgttccaacctctgcctgttacccagttccaaagttgcttccatatttttggatatcttttcagcaacaccctactcctggtcccaatttactgtattagttcattctcatgctgctgataaagacatacctgagactgggcaatttacaaaagaaagaggtttactggacttacagttccacgtgtctgaggaggcctcacaatcatggcagaaggtgaatggcacctctcaaatggtggcagacaagagaagagcgcttgtgcagggaaaactcccatttttaaaatcatcagatctcatgagactcattcactatcacaagaacagcgcaggaaagacccatccccataattcaatcaccacccactggattctcccatgacatgtgagaattgtgggagttacaattcaagatgagatttgggtggggatacagtgaaacctatcacttcctgtgtgtcacttgagcatttttttttttttgagatggagttttgcttttgtcacccaggctggagtgcaatggcgcaatctcagttcactgcaacctctgcctcctgtgtttaagcacttctcctgcctcaccctctctagtagctgagattacaggtgctcactaccacacccagctaattttttgtatttttagtagagatggggtttcaccatgttggccaggctagtcttgaactactgacctcaggtgatccacctgccttggcctcccaaagtgctgagattacagttgtgagctaccgcacccgccccacttgaacattttttagaactccattctgagttatctgtagtgttgatgagtgtatctttttggctagtttccttagtggttgcttctaggtattaagtttatacatgcatagcttaccacagtctactagtgttaacattccagttggagtgatgtataaaaccttaccttcctttagttctttactttccctagcttgtaatatagttgtcttaaatatttcctctacatacattaagaatcttatcacacagcaccaaacataatttggaaaacctgaaagaagatccatagtatttacctatatttttactatttccattgtttattctttcttcctgatgctctaagagtcttctttttatcatgtcctatttagagaatctcctttaaccattcttttagggtaggtctgctggtgacagatttttagactttatctgagattgtccctgtttcctcttcattccaaaaggatattttaattagatagagaattctgagttgacagttatttttgtttgacacttgaaaactattgtgtcatttccttctgttctccgtggcttctaatgagaaattcatcatcattcaaattgtttttttcctgttggctaacctaaatgctgtttcttactgttttcaaggtattttcgttgtgtttcagttttcagaagtttacggtgtatctggcatgaatttctttggtttaccctgcttggggtttgctcagcttcttcaatctataggtttatgtcttttgtcaaatttggggatttttttcagccattattttctcaaatacctttgcaactccaattatttcttccagtgccgtttccctctatctagtagtgttgtggtttttattaacagtacatcaccctcctctcccaaccccagttcagaaccagatcttgacgtagagtttagagttcttgatctaagatgatgtcagatatgtcactgatccattaaaaggcccacttgttgacatggttctgcttctggtgtcatggctatgtctttgtcctcctacttgcttaggctcactactttttatgagaagcaggggcaaccttttttttttttttttttaaccctactggcttccagcaacaataaagcaatatctatttctctatcatggggtgatatatagcatacaaatccagccccttgctaccccatgctccttctggactcagagcccaggaaacctctagtttttgtctcactttactcttctatcttctatttgtggtccattgacatatttatcttacttttgggtattactctgtctttttaactatcactgcttcattgcttcatatgtggagcagaatggttgtgttgaagcataaactggttgagaagttcttgtacattcttagaaaaaaaaaaatagagccaaggtttcactatgctgcccaagctggtcccgaactcctgagctcaagcaatctccctgccgtagcctcccaagtagttagactacaggcacgagccactgcacccagcccctcttgcgtttttaatgcagtttgctgaacgaaatctctgtaaattattttgactcttcagttcttcattctttgggtctggttttgcacagaaagcagtgtgattctaagccagtcattcaccctctgtggctgcagttttctgaaatgcatagtgagatggttggactaagtcctttttagttcttagagtcaatatgtcaagaaagatataaaattatcaaacagaagaagttactcttgattccaaacttcaaaattaggattctccaaattgaaaagataaaagcagaggtagtataggatttcaattttgattatagcaaaggacttcttggccattagaagtagaaaacatttcttgaaaaacgaagaagaaccttagaataacatgcagtcttacagtaatcacaaggtagtaattataaggagtttgtattccaagagtccaggtggtaaatatacataatttcaggaaaagtttaaacatatatatattagcaatcgaaggaagtgggattttgttaatgtggaaaacaatccagctgcccataaaatactcctatattcctactactagggatgtggaatacagtgagtggaatttgacctaatataacacatttgggattattttaaattatcattttaaagctttgttttggaagtgttataataaaatattttcatctaaaataaaaattaactattatccattcctttggaagatgtcaattttggccataacattttagaatttgaattcttcattccataaatccctttgtgtttcattgttttatgtaagttttatgatgaacttcttgcatagagcattttataagagattgaatttcaataaaaatataatttatgggcctagagatcttgaggaaaaatataactgtatctgaactattaggactgtctgtcttagtgacagagtaatgaactgcatgtgaaatgcttgtatgggtcacatcttttttttttttttttttttcttgagactgaatcttgctccatcgctcaggctggagtgcagtggtgtggtatcagctcactgcaacctctgtctcccaggttccagcgattctcctgcctcagcctcctgagtagctggaattacaggcacacaccaccacacccagctgatttttgtgtttttagtagagacagggtttcatcatgttggccaggctggtctcaaactcccaaattcatgtaatccacctgcctcaacctcccaaagtgctgggattacagtcgtgagccactgtgctcaactgggtcacatcttttcttttaaaagaccatttttttgctgggtgcaatggctcacacctgtaatcccagcactttgggaggccgaggcaggcagatcacctcaggtcaggagttcgagaccagcctggccaacatggtgaaaccccgtctctactaaaaatacaaaaattagctgggcgtggtgacagggacctgtaatctcagctacttgggaggctgaggcaggagaatcacttgtacctgggaggcggaggttgcagtgagcctagatcatgccactgcattccagcctgggcgacagagcgagactccttctctaaacaaataaataaataaaaggccatttttacctaaaatttcaattacttttctggcaaacctatctcagatattaaggaattcacttaatataatttattactagcataggagtccaactctgaattcatttatgtcatacctgatataaaaagaaaaacattacagaattacatgaagtaaaaagtgaaagttctccccttgccatcttcctcacttagtgtagccactgttaactctttgggacatggaaatggtgacatttcaaagagctttttacatgatttcaaaagggaaaatctcatttcaggttctgagcaacattcatacagtcagagccacatggcaacctaaaaagcccaaaacatggaccttttctccccaggtaagtaatctgctgaatgagtggagtgagtgaatttcaaagtagaacatattcatatttctataaatagcacagagtatgtgggaacagatataaatctttagattctttggtgttctttgaggacattgataaaaattactcatgtttctgactcaccaatgttagtaattcctatgaatcatcccattcaatcagtttcagggttcatttttagaaaattctcatttgatgaaaaatgaaaacataaagataacatttaggaagtggggtgtttttcaaagatgaaatcttccaactgtgctaataaaagctgtgctttcttcagataaagtcagggatgacgcctgagggactgctacattacacccacacactgtcaagactggaatggcattaggtgggtttaaaccactgagtcagcattgcatagacgtagggaggacaaagatgtcttcgtgttgtttttatagtatcaattgtccatattttattttacattactttcgtctacctccaaggtctcattaatttagtatttacttccttcccacagctaactcccttgtataactgcatcctgaaaacccttagttacctttcctcttattgcatcaaaagatcttaaggcaagatggaggttcagtgagagggctcagggtgtggatgaggccagccacctcaactgtgtgctgtgcctgtccagacttgtcgagagcacacctcctaaaagtccatcttgatcttcttagcacccttcctctggtgagaagcatggcctctcttttggcacagtacttcacaattctgttattgcgtctctgtgtatgtgaagagtttagggtagaattttttaatgtttttcctggggtagaaggaagaactgttgggagtatgtgttattctgttgaatgaaattaaacatcagttatgtgcaagcattttttcctaggcacgtggaaactttttcatgccagtgaagttcctattccagcaaaattagtaggggaaaatacatacatgaagaataacaatatcatctacttatggaaccctaactgtgtgctaggccctgtgccaggctcttacgtacattaccttatttaatcagagtagccatgtggggcaagtactgttggtaactaccactcaggcagattgtaatggctttggagctccaagtgctttggaagcacacaggagggtaaagttaattctagtcctttggctcagggaaagttttctagaagagaaactagatcttgaaggttggatagattttacagtcaagaagggagggatacagttgtcgagggagagtgaattgaatgagcaaaagagaaaataaatgaaaattcacaaggcacacattaggaaagttgagcaaatatgtgtattcagtctttaatttttgttctgtttatgaagaacagtggttaatataaatatcttataatgtctataaactattatttgtaacacctctggagacctaggcacagtactattagcctctactctaagcaaaaaataagcaaaggtaaaggtattttccctttaaaagtgaagttaaatttttaaaatttgtaatcattggcattgatgaattcagtccatctgctttttgtttttcttaaaaggcttttattataatgcaaaggcataaactatttactaacaaatagggctgaaaccctgtgtgaggccgttcttgcattgctataaagaaatgcatgaggctggttaatttataaagaaaagaggtttaattggcccctggttctgcagactgtacaggaagcatggcacaggcatctgctcagcttctagggaggcctcaggaagcttccagtcatggcagaaggtgaagggagagcaggcatctcacgtgacagtgcaggagcaagaaggaggaaggaggtgccacacacttttaaaaaaactgatctcctgagaacgaactctctgtggtgaggacagtaccaaaccatgagggatctgccctcatgacccaaacacctcccaccaggcctcaccttcaacattgggattacaattcaacatgaaatttggtggggacatttattcaaaccacatcaaacccccttcccattttttatttttatcaataactttaatttctttatcatttcaggttactcgcatcttaccatgtttgcttgatggtgattgctttatcaggtctaattctgcatctccagatcttggaatattatttgaacttggaatttcttatattcgcaatgtatgtccgttgaaagataaggctttctaatgtatcagttaaaagggaaggttaaaaaatgtgtctattgacaaggaaatccttgaagtctttatgtgtaattgaattttaatcccttgaggaatgagaatgccagtgattctaattttatgtgtgctgatttgttttcgtagcatttaaaataatagtacttattcacatttatagcttgagtgaactccagtgcttttaaagaataaaaattcaaaaaggatgggactttgcagaaagtgagaaaagatgctcactggcatcccagcgccatggttcacctctgtcttccaggggcagagtatacttagccttgtaactgaggtttctaattaagggacttagcagagtagtgacttttataaagtgagtttaacttatgtcatataaactactgaaccagtgggtggggctctgtgctagtaattaaatgtttccacatactaataatagcttgataggtatagtatatatagttgacctcatggtaacccagagagcgttacagagatgttacattaatggtattacactgtccattcatttgtttaaggcaaattcatccatatgtattgtggagggggtaggactggggaaaggagcaggccccccaaaggaagccttaggggcctctagcaactgacagtgggggtaaaattccaagcagaaaagcccttgaatgattaatatctgcattctatctgtcagtgaaacaaaggttcatcatcccatgtagtactgatatgatttgagatcactccacagaatgcttatatcagtcaagagacaatggcagcagttgccacatcattggtttaagggattttcgagagcaattttgacaaaatatgattatcacttgatatactacctttaatatctgacccgcaggcaaaatgagattctactgtgtttcattttattttcttgtgaagaactttttagttctaaaggtgaatactaattttgttcctttaaaaggacttggtatgtgcttataaatttgactagttcagaccttaagtttcatatacttgtcttatttcctagtcaactggtgaaagaggagagttaagctgtggctgggtgtttcttaaactttttgatgccagtggagttcctattccagcaaagtaagttggctatatattcctaacgaatgaatacttctgtaaaaattcattttttagactcttgatacctcaggtttgttctatgagcatgccaataacttttggggagaggactttttatgttgactttagtgttgtttaggcagtgtatgaaaacagcatgcacagtctcatcctaaggaggaagaaatgactcctagagaagaggtattttaaaagatgtttgcactagccatctgctgagaatattctttcagtaatttcctatggtattaacacatttcaccatgctgaaaacagagcctagttgtcttcaaagagtgggaaagttaagtccagagtccagaggtcctctgtgagtctctacccttcctctgtaggtgggacattgaaatcacagtggcaaccacggtaaatgatttaaactttaagatcaaaaggcagactggaagcaaatactgcaatatgtacagaagagttagaagatcattatccctaatataaaaggaactctcaaaaattaataagaaaaagatcatctaaattttaaaatggaggaaaagaaagatctaaatctaggatataaacaagaaattcaagaagggacacaaatgggcaggcagtaggatggtgattaagatcccaaatttggattataaaattttgggctccagtcccagctctacccatgtaactgtaggtggatttcttaacatctccaagtctgaatttcacctatctttaatctggaagattgtaataattcctactccaaaggcttgttgtgaggattaatttagataatgcgccttatgtggcctcctgccacattggcagaggtagaagtcctgactgtacaagtcctttgacatcatcctagagggtgcattacctggggtgccaggtttcttgtgattgttatttgcttttttgtttttgtcttttaatatgctcagggtttttagttgtgcttagtggaagaaataaggaattgtatatctattccatctttctgaaagtgaagtcacagctatttttttaaatgaggtagagctctgtgtattaatatagacacattttcagtgtattagtatatggaaaaagttgcagaatattttgaatactgtgactccacttttgttcattaaaaactatttgtgggccaggtgaggtggctcacaatgcctgtaatctcagcactttgggaggccttggcgggaggatcacctgagcctgggagttatagaccagcctgggcaacatggtgagaccctgtctctacaaaaataaaaaaattagccaagcatggtggcacacgcctgtaatcccagctactcaggaggctgagctgggaggattgcttgaggctgagaggtcgagactgcagtgagcagttttcatgccactgcgctctagcctgggtgacagagcgagattctgcctccaaaaagcaaaaacaaaacaaagcaaaactgttcccagaagttgcctctgaggagcagaattgaggaggtggtgcattacaattaaagggctcttttaccttcttctttctacacttagtatgtgacttcaaaagaaaagcatgtagagtgttagttttgaagcatgtgttagttttgaaattcaccgtgtttatacatttgtttgcatttgcatagaaaagatagggcaggagattaaccacactagagaaggcggcatggggagggatttttcactttttacttatcattcctctgccattcaaactttttataataatctacacgttacttttatattttaaaaataatataagttcatagtggcctcatttcaaataatgatttaacacatttgaaaaatacattaaaaaaaatcacttgtcattaatgtaagtcattaaggtctgaacacgttaatgacttgaattaatttttctcattttcaaggaaaaatgtattttctacagtgtatagttaggaaagataattttctgcagcttataattaggaaagaaagactgtttatttgcccagatagtacctcatggagggatcaacaattattcttttcatttaccaacgaggcataaatgaaatgtctgagtatattagtgctaaaaaatatttaactactgactccagtgttttctacatgcccacagcttatatctgtcattgtatgttattcttttatagaacttatgagcttttcttgaatggtggtactccttatgaaaaaggtattgaagtggacccttcaatatccagaagaggtatggctctcatgtgttgtcttcctttccttaaagattaaacaaatagaagcatctgagaggtagctacattctaataagcatagcgttttttacttgaattcacacttttaaaaatatgtcatttgatataaaaattttaatcatttttaagtacttattttcttggtaacacatatgagactctaagacatcatgaagaatgaaatcatgaagaatgagaactaatgcattagttccttttcattgaccactgaactgatacttgtgactaatacagagactgcctattgctgggtcaaaggatgcagacatttgaaacagtaatatgcatgccaaattgccctctagaaatattgagcatcttttactatgttcattaaccaggcactgtgctagataatgggagaatgaagagcaagacagatatggtcattgcctcatggggctcagagcctgacagatttggaattccatttccactcctcagccacccctctatttgtttggtgattcaagacatgccacctctgctgaccccacaacgccagtcctgccttcttggaacagaaaggagtttggggtctgggatgcagttggttctacctggagtcagacatgctgttttcctttgtaatctggcagcaataatgctgtaactcatgtgatttagcaaacaatcctgtgcccttagggaggtctctcagctcatttagggtatatggatgactcttgcctttcattcaattcagcactactgggtggtatattttcatgaaatacttgttttattatactcactgtctcaagtacttaaagtttcgtgagttacttttgatttttcttaaaagcacacggcagtgttttctaccagattatgacaatgagaaggcagcctcaacttctagtgaaactgagatccttgaacagaagatcaagaaatgtactaaggtgggtacctgcttttacctgtccagtgaatttgggatcattcagcacttggagaccatctctgcttttggcttttcctcatatttagtcatcttttgttataatatttttgtcctctttaattcttcccccaaaggtcagtagggaaatgggtaacaaagctgaaattagcttactcttctatttactagttagctcttctaaccaaatctgttatttgagccatctagtaaatagaagacttgactaaatggggcttaccaatgcatgattctaccctcagggaacttttttaaatgtcaagtttattgagatataatttacatgcagtaaaatttactctttttagtttataattctttgtgttttgacaaatgtatactgtcatgtaattaccactacaatcaagatagagaactttccctcactctaaaaagttatctcatgcccctttgtagtcagctctgtatccccagcctcaggcaggcacacctattttctttctcagcagttttgctttgtccaaaatgtcatacaaatggaatcataacactcaggagccttttgagtctggcttctttcacttagcctagtgcatttgagacttacccatgccattgcatgtgccagtaatttgttcctttttgttctaaatagtacagactgtccctgacttactcaagatttttcaactttaccatggtgcaaaagcaaaacctgttcagtagacactatacttcagtacagattcaatgaattacatgagatatttatactttattacaaaataggctttgtattagatgattttgcccaactgtaggttaatgtgttatgagcatgtttaaggtaggcctgtctaagctctgatgttcagtagactagttgtaggctgggcatggtggctcacacctataattgcagcactttgggaggtggaggtggtagaatcgcttgaggccaggagttcaagaccagcctgggcaacatggcaagaccccatctctaccaaaaaaaaaaaattagctgggtatggtgatgcacacctgtagtcccagctacttgggaggcttaggtgggaggattgcttgaggattgcttgagcccaagaggttgaggctgcagtgagctgtgatggtgccactgcaccccagcctgggcagcagagtgagaccctgattaaaaaaaaaaaaagtctaagtgtattaaatgcattttcaacttatgatattatcttcaacttatgatattttcaatttatgatgggtttctggggctataacccaccataagttgaggagcatctgaattccctttgatagatatactacaatgtgtttattcattcacaaattgaagggcatttgggttgtttctaggtttgggcaattataaataaagctgctttaaacatttgtgtacaaattttctgcatgtggatatatgtcttcatctctcatgggtataaatacctaggagtgagattactgggacatatggagtttaactttataagaaactgccaaactgttttcatttttctttttctttctttttttttttttttttgagacagagtctggctctgtcccccaggctggagtgcagtggcaccatctcggctcactgcaagctccgcctcccgggttcacgccattttcctgcctcagcctaccgagtagctgggactacaggcgcccgccaccacgccctgctaatttttttgtatttttagtagagacagggtttcaccatgttggccaggatggtctcgaactcctgacctcgtgatccgcccacctcggcctcccaaagtgctaggattacaggcttgagccaccgcatccggccctaccaaactgttttcaaaatgactgtagcactttgcactctcattagcaatgtatgagagttccagttactctatattcttgacagcacttgatatgatcagtttttctgttttggccattctaataaatgagaatagtggtttctcatggtgttttaaatatacattttcctcagggagtttgtaaactaataaaatctcagatctatcagtttctcactcagtaccctcctagactagtcatttaacatctctatcagggtcttaatgtctacatctttaaaatggacataataataataatatcaaccccataaaggtgtaatgaggtttaatggaaagaaaatacataaaacagccagtatttacagtgtgtggcacatggtaactaacacaatagtgttagctataattatttactactataattatcttatatatagataaatgtaaacataaagccaggtagatggtgctatatcataaaatttgttcaaatgaagatgtgtagctggtaaaatcagggggcatttgaaatcacctttgaaggattgggaagatgcagaggaaaggagctccacagaggaggcacaaggccaagagggggaaggaagagcatggcatgggacagagactgttgcagctgaactgtcccaccatgacctgctcattgctcacagattattaagaagtagggaagtcagtgaagacttggcatgctcctgtgaatggtttttctcattccagatcatagtcttagcttaaatatcccttgttcttaccactactactgaaatttattttataattatagtgttaacagttcaatctttcaatagccattaataatgtgttcatgggtattatttactctcttagcttttttcccccttggatgttcatagagcctgtaaatcctcttttttggccagcctttccttggaaaattgttatttttcaagattagaaagaaagcagcacagtagtagtctttgtgaaagaaaacccaaatcttgtttggcctcattcttcctacatctttggcctccccactcctcatcttgttgataagcttccaagagtccggaagcactcccatgtgtatatttcaagtacagctcttaatagtgtttctttggcccccaaatactggttttcagacactttgtatgacctcaagatcaaattggactgtgtggtgcagaagttagcaaggcagccccttcttcttaagcagtgaatgctctactgtatgctgggttcttaaaggtcctgtgtccttgtgctccatacctcaggactgcgtcatttgtttcattacagtacagaataggcacccgaaaaatgtttgtgaaataatttcaaagcagagctctccctgctagtgtgaaaatatactcctcaggacttccgctcagcttccacctgtccctggcctccctctgccttgtcttggtgtgtgctcttccacagagagacttgagtgctggcttgaaattgcctctccactttgcatgaccccaaaatatacattcctgggaatttcaaacgtgagttgggacacactgctggtgcaactccaggctggctcgcacagaaaccagcttatgggcagtgaaacctgggccttgcagcagggctgggggctgtagtcagggggcggggtggggctgtgctgtgggttcaaggtaagagactaggcaccagcctgggcccttttggacatcactgagcctgtgcatcctggaggtggagactgaagcaggactgatccatttcaacatcctctctcctcccctgacccgaaaccttcggtaggtgggagaacaagacgggtaatgacaccaatagtccttctcctcctctccttcaaaggcacgccccgcctctatcctcaccctcccttctttacaaacttcacctttgtttatgcaaacttctctgctcaaaggagaaaggacaggggctctttccattatgccaaaggacatgagacagtggagacaaggccaagggcagaaagcctagttagagtttgcattagtgcccatttttacccagtgcccttgctgtttggctttacactgccctctctgactcagccagcagtcctacacatgtatatcttttggatatcaggaatcctgtgaaaatgtgaattattcggtgtagaccactggcaccagagtcctgctcacggggcttggcagtcttcttttgtggagtaggttgtgatcatggcgaccttgtcaacataagaaaaagagagcaaatagatgcttcagtttcaccaagatttgtcttttggagctatttttcaaaagggtttaacttgatgtgatttgaccaaaagcatgtgtataaacccctgaggagggaaagccctgaatttgacttcagattttcagtgcatgagttctaaatatcaagaaaccctgatctggagaagtaggttgcgtgtgtgtgtgtgtgtgtgtgtgtgtgtaaatttgctataaattcattatccttttttttgatgcattccatcttttttctcctttactttcattatatcgttgctaaaaataaataaggtaataatgttagttgcttgaatgcttgagacccattcattgtgttcattgccagagtttgctggtctacatgtgaattcaggaggaagtatatttttacttacttaattcagctaacctttagcagcccagaactttctattcgtcttaagtttgggaaaatcagatgctttctctaaagaatatctaataaagggcaagcagcattgcttcatgttgtgagaaagtgccagaaggaaaggagtgcccacactgggtggaccaatgcctgccaggcaaagcaggcaggtctacgagaaaaggagagggccaagcagaaggaaggaagttcccacccctttccctggcaaaaccttggctgttcttcatcatgagccctgagtttgggcatgcagctgaaacactgtgcaatgggaccgtggaccaaagggcagaacatgagcatgttgttcatgctcaggtcgttctgccccttgctcatgaacatgtccatggtcccagaacaacccagaatcagagcctgatccctgagaaagcatgtggtgacactgaggcagctgaaatggtcccctgcatcccgtctttaaaatgtaggtcaaatgtatacaagatcagaatttagccaggttgaaaaaagacagtttaaaaaagacagtttctgaccttatgtatcacatgctgtatatcaagataactgtgctaagagaacctgtattatatttttagatgtttctagaaattcaggatttaaagagtggtcaaggatacttctttaattccatgaaacttttttttttattataagttttagggtacatgtgcagaacgtgcaggttagttacatatgtatacatgtgccatgttggtgtgctgcacccattaactcatcatttaacattaggtatatctcctaatgctatccctcccccaccccaccccacaacaggccccggtgtatgatgttccccttcctgtgtccgtgtgttctcattgttcaattcccacctataagtgagaacatgcggtgtttggttttttgtcttgcgatagtttgctgagaatgatggtttccagcttcatccatgtccctacaaaggacatgaactcatcattttttatggctgcatagtattccatggtgtatatgtgccacattttcttaatccagtctatcattgttggacatttgggttggttccaagtctttgctattgtgaatagtgccgcaataaacatacgtgtgcatgtgtctttatagcagcatgatttataatcctttgggtatatacccagtaatgggatggctgggtcaaatggtatttctagttctagatccctgaggaatcaccacactgacttccacaatggttgaactagtttacagtcccaccaacagtgtaaaagtgttcctatttctccacatcctctccagcacctgttgtttcctgactttttaatgatgactgttctacctggtgtgagatggtatctcattgtggttttgatttgcatttctctgatggccagtgatcatgagcattttttcatgtgttttttggctgcataaatgtcttcttttgagaagtgtctgttcatatccttcgcccactttttgatggggttgtttgtttttttcttgtaaatttgtctgagttcactgtagattctgtatattagccctttgtcagatgagtagattgcaacaattttctcccattctgtaggttgcctgttcactctgatggtagtttcttttgctgtgcaggagctctttagtttaattagatcccatttgttaattttggctttggttgccattgcttttggtgttttagacatgaagtccttgcccatgcctatgtcctgaatgagattgcctaggttttcttctagggtttttatggttttaggtctaacatttaagtctttaatccatcttgaattaatttttgtataaggtgtaaggaagggatccagtttcagctttctacatatggctagccagttttcccagcaccatttattaaatagggaatcctttccccattgcttgtttttgtcaggtttgtcaaagatcagatggttgtagatatgcggcattatttctgagggctctgttctgttccataggtctatatctctgttttggtaccagtactgtgctgttttggttactgtagccttgtagtatagtttgaagtcaggtagcgtgatgcctccagctttgttcttttggcttaggattgacttggcaatgcgggctcttttttggttccatgtgaactttaaagtagttttttctaattctgtgaagaaagtcattggtagcttgatggggatggcattgaatctataaattaccttgggcggtatagccattttcacaatattgattcttcctgtccatgagcatggaatgttcttccatttgtttgtatcctcttttatttcattgagcagtggtttgtatttctccttgaagaggtccttcacatcccttgtaagttggattcctaggtattttattctctttgtagcaattgtgaatgggagttcactcatgatttggctctctgtttgtctgttattggtgtataagaatgcttgtgatttttgcacgtggattttgtaccctaagactttgctgaagttgcctatcagcttaaggagattttgggctgagacaatggggttttctagatatacaatcatgtcatctgcaaacagggacaatttgacttcctcttttcctaattgaataccctttatttccttctcctgcctgattgccctggtcggaacttccaacactatgttgaataggagtggtgagagaggacatccctgtcttgtgccagttttcaaagggaatgcttccagtttttgtccattcattatgatattggctgtgcgtttgtcatagatagctcttattattttgagatacgtcccatcaatacctaatttattgagagtttttagcatgaagggatgttgaattttgtcaaaggccttttctgcatctattgagataatcatgtggtttttgtcattggttctgtttatatgctggattacatttattgatttgcatatgttgaaccagtcttgcatcccagggatgaagcccacttgatcatggtggataagctttttgatgcattccatgaagcttaattactcgtggaatccattgctgtcacctcatcacagtggtcacattcatcctgttctcttccaacaggctggaagcctgaatattacctctgtgataattttcccttctaaaaatctaatcttaggaattaagataaaggattaatttacaaaaagtaagatctctttttaaatctttggtgatttttctcagcccaaagacatcttccttttgatagaagacaacatatcatttgtaaggtttttgagattttctatatggtccttcctcatgcttaatgacagagtttatatatttctaaaaatagtattagaaatatatattagaatgatctaagatattttcttgagtactttcaaaggttaaatcttgtgcatgatacattcccagtatttactatacatcatgtgtgagggtcttaaagaactcacttttttttttttttttttttttttttttgagacggggtctcgctgtgtctcccaggttggagtgcggtggcgcaatctcggctcactgcaagctccgcctcccgggttcacgccattctcctgcctcagcctcccaagtagctgggactacaggcgcctgccaacacgcccagctaattttttgtatttttagtagaaacggggtttcaccgtgttagccaagatggaagaactcacttttcatgtttccagattattattttgaaatctaaatattgaaattttttatatttttaaatttctgactattttttgatgctattgtaaattgttttgttggtttccttctcaaattgtgcattgttagtgtataaagtacgatttttacgtgttgattttgtattctgcaactttgctagtcatttattctgaaggtatttttcatggagtatttagggttttctacatatattctacatatttctacatcattttgtctgcaaacaaagacacttttctttttttagaaaaatatttccattattgtgttgagtaaaagtggcaggagcaggatccttgtcttgttccttatcttagaggaaaagctttcagtgtttcaccactgagtatgatgttagctgtgggcttttcatatatggcctttattatgttgcagtagtttctttctattcctagtttgttgagtgtttttatcatgaaagggtgtcaaattttaggctttctcagcatcaattgagaaaataatgtgggtttttccccttaattctgttaatgtagcacattatgttgattgatttttggatgttgagccatccttgaatttcattaataaatttgacttggtcatggtgtacaagctttttaatgtgctgttgaattcactttgctagtattttgttgaggattttgcatcaatattcaggaatattggcctgtagtttttttttttttttcttgtagtattgttggcttttttactagggtaattctgacctcataatgagtttgatagtgttttttcctcttcattttttggaaaagtttgaggaaaattggtgttaattcttctttaaaggtttggtagaattctccagtgaagccatctgatgctgggcttttctttatcaggagattttttaaattactgattcaatctccttacttgttattgagattttctatttctttgtgattcagccttagtaggttgtgtatttctagaaatgtgcctgtttcatttaggtcatccaacttgttggcatacaactatttatagtactctcttacacattttttatttctgtaaaatcaatagtaatatcccctctttcatttctgattttagttgagtgttccttagtcattctcactaaaggtttgtcaattttgttcatcttttcaaagaacagagtcttgctttcattgattttctctattgtttttctattctttattttgtctatatctgacctaatctttattatttcttccttctgctagttttgttcttctagttccttagggcataaagttaggttgttgacttgagctcttccttcttttttaatgttaagtatttatagctataaatttccctcttaggactgttttcactgtatcttgtaaattttggtatgttgtgttttcatttcatttctcaagatattttctagtttctcttgagatttcttctttgagccattgttgtttaagtatgttgtttaatttccacatatttatgtgttttccagttttccttctgcttttgatttctagtttcatttcattatgattgaaaaaagatattttgtatgatttcaatatttttaaatttattaagacttactttgtgactcaacatatggtctttcctggagaatatgtcatgtgcacttgagaaaaatgtgtattctgctgttgccgggtagagtgttttgtaaatgtcagctagatccaattagtctacagtgttattgatcttctgtttcattgttctataccttatcgaaagtaggatattgaaatcttctctattattatagatctatgtattgctcccttcaattctgtcagtgtttgcttcatatatttaggagcactgatgtttggtgcatatatgtttataattgttatatattctgaattgactgttttatgattgtacaatatcctttgtctcttgtaacttttggggggcttgaagtctattttgtctgatattaatatggctaaacatgttctcttttagttgctatttgcatgaaattttttttctgttctttcactttctacccatgagtgtcctaagtctaccgtgagtctcttatagataacatataattaaatcgtgtttttttagtgcatcctgccaatctgtatcttttgattgaggagtctaatttatttacatttaaagtgattactaatagagaaggacttacttttgccattttattactcatttgctgcttatcttatagctttttttgttcttaatttcctccctcactgattttctttgtgtttgatttttcatagtgacaaattttgattcccttttactttccatttgaaaatattctatagttattttctttgtggttaccatggtattacatataacatcctaaagttataacaatctattttaaactaataccaacttaacttggtattgcatacaacatccttaggttatagcagtctatcttaaactgataccaatttaacttcgatgttgaattattttctattttttagcccttactgtataccagacactacattaagcactccatacttatttcatttgttgttgttgttttgttttgagacagagtcttgctgtgtcacccaggttggagtgcagtggcacaatcttggctcatggcaacatccaccgcccaggctcaagggattcttctgccttggcctctgagtagctgggattacaggtgcccgccaccaaacctggctaatttttgtattttcagcagagatatggtttcaccatgttggccaggctggtctcaaactcctgacctcaagtgattcacctgtctcggcctcccaaagtgttaggattacaggtgtgagccaccatgcccagcccacacttacttcattttaatccttttagtaaccttctgaaatgcaagtattactattggtatccaataaatgaggaaaccaaagcacaaggagatgaattaattaatttaaagtcacatagctaagaagtgacaaagtcaggacttattccaggtctgtcacaccctcccatgttccacccagtactgtgaacagcctgaattatttcttctgcattcaccaaatcaggcatggcagccacatgcctttgttaaagcttgtagctgactagtccccttctttccaaaacataattagtggcttcccgtttttatttgacatttaacataggtatatatgctaacatggaagcacaaaaatggcaacacagggttgagactcgaaagtgtaaacaaatataaaaagttatctgaaatttaatgtggcctacttgtagtagaaatttttctttaaatagttaaaaatgtgttccagtaatgaagcaaaatttgggactgtttattaaagtaatatacatcaaaacattataagttggattgtaggggattgtctaatgaatacatttttttcttctttaatagtctactgccagaaacattaattggaaatatgtgttctattcacttgttgatattttatcgacaaattcttggagatgtgctcctgaaagacaggatgagcttgcaaagtactggtaagtgggctttgccacttccttatgtgcagtaatgcttcatactctgagtaaaggtaacctataccatcttgtatcttctgtttctggttgtgacttttggaataaaatatttagaacagcattgatgttaatacattacttatgggacatcttcagatccaaagcattgagctttgtgaactcgacacatattcagttctttcaaacatatgtattttcacatttcaaattctagagttttgagatcccaagagtcagatatagtcatattttcccttaatgtctctgagtaatctgttttttcccatgtgtttggtatgcacataatcattttgaagagaaaccaaaatcaaccaaaatagctggttcttagtgcatgaagtataagtatcaaatggattagtttaaattggtgaatccagatatggagtatttgggtgtcctatgtactgtctttattcttgcaacttttttgtacgtttgaaatttttaccaagtaaaatgttaaaaaataagtttaaaaatcaatgagtcaccatacatgattgaacctgcaaagataaatgcatgtgttatagtaattgccttcaaaaagaaaagcagtttaattgtattggctcttctttcagttcaataaatcagtaaccagatatgtactgagtacctggtatgtgccagatattatgctaggcccagtgatgaatgagacaggcataggcgtcccaggcctcaaacacataatttcatgaataatcctctccacccttttgaaataagtgctgtgaaggaaaatacacaacgagaacatgcactgggaagacttgattaatgtgtagggtaaggaaaggcttctttgagtgagtaatatttaacaaaagatgtgagagaggaattagacctatgagggaagtgtgtggggaaggattctttctgggtagaggggccagcatgtctgaagacccaaggaaagaagacatgcatgtgttggagggcttgaaattgaggcaggccagtatggatggagcagagtgagtgagaggcttagcacttgtggacaaataacattcataggcaggagtcctctcccagggacttatcacctggatagataggtagaagtggaactcaaaggcagagaagcgcagaaagttctcaaggaatcattataactctaagggggaggacgggtaagccttttaatcaccattgcctttgaattcattttcatgactcttgagaaacttcatgaatgatgtgacctcttaaagaggataaggcttgttagttttcccaataggtaagaagtttactcagaattgttgacttcatttgaatttaatcattagaataaaatatcctaataatatctaaagaatgaatttttctctactgaggacaccagattatagaataccttgcccttgccatttcaaaagtgtctgctatggtttcagtgtgtcccatctaaaattcatgttaccaatgtaatggtattgaaaagtggggcctttgagtggcgattaggccatgagggctgttgccttatgaatgggattagagacccttacagaagggcttgacaagggaattcgtctcacccttttgccttcagccacgtgatggcacagtgttcctcccctctggaggatgttgtaagaaggcccttaccagacaccaaatgccattaccttgatcttggatttcccagcctccagaacttggagaaataattttattttgtttatgttacccagtctcaggtattccactacagcagcgcaaacagactaagacatgtctttcctgatgtgcttctttgcacagatttttcatgtgctgttatctattgtgaaatgtcaatattctccctcactgtgtttggtcatatggccagaatcctcaattcctaattcttccagtttcacctaccactgtctgctggctccagacacaagtttgggtccttccctgagcgctggtggcctggaatcagacctgagcagcaggtcctctgtctcctttccccccaatgcttcctagtttctgctcagtctcccaagagcagggctacctctaaggggaagattccttttaccatgccacagccataaggaagaaagagaagttgaagaaaaacacagaacaaaattttctagtcttattctgttcagagcctccttgcccttactctaaaagctccattaatttggtacaggaactcaccaggatatgggtataggggcaaatgaaggttgaagggacagctttgagctctcctagaagtcaaagtgtgtagaatgtgttatcaacaaatcatttggcacaataattttcatctgaatatttttgtgtctattgcaataaaatccattgagtgaagtttgcataaaattctttctgttgttttgcatttcagatttaattagccatcccatgctggccaccttccccatgctcttggagcagcctgatgtgatggatgctctcagggtgggtagcatgcattgcaatggaaacctgctggcttatggaagcagttatacactctgtgttaatgagttctgtctaggcctttttttttgttactaggatgatgtctcccaatccctatccattgtctaggtaactcagtcctcatctttcccatcttagcataaattcccaagggctgccttccctgacccagggagcaggtggagtgcctgctatgtacactattgcaatctttgcccattttttccttgacttaggatggccactgattgtgtcctaagagcaaaaatccaaaatggtctgtaagataaatcaattgaatttgcaggggagaatcagggcatgcacatcatctttaattccatgtgtgctgtttgctgtctgaaataactgttgagtgttatgttaaatcgtatgaaatctccaattttcagccatttttggcctaagtggcagtttcatatggtttagcctaatacatcagggtcaataagtagaagagctgcatgcatgcaaggcagatacacaggtaacatcacaagtgccatgggggaggtataacccaggaccttgaagatttaaagaaggcagcaaagaaggatccaaattctgtttcactagagaggtcctgcatgagagagcctaataaaggccagggccaagaggattttgacctgctgagatgggggtgaagacgttgcaggtagaaggcttagcatgagcagacgtttgaggcaggaaggaatagagctgacagtccagcttggcatgtcagatgcaagtaagggagtggttggtagatgggcaaggtaagcctgagtctcggtgtggggctgagggcggtggtaggtggtgggtaacccaggaaggtttcttctttaggcaaactctgccaagtgcaaagaggcagaacatgtgcaggagggaggtgagcatattagggggtgactcctgctgataaaaactaggccatatgcacctgacagcagaaacagaaggaggactcagtcatctacaaagattcttattagactttgaaaccaattcatatgctagcttggctgggttggggggtgtcaatagtaataatgacattttcaacagagatgtttaagaaaatgttcatggtacatatgatctcctgtaattttagataagttcgtctggcactatagctagataatgcagaatttctctttcttctcctataaagtcactagtatcataataattattcattacacagaacatatatacactgattcttcaacaaagatttcacaagagcctactatgtattaatataaggcactgtgctggccacaggaatatttccctaggtgtgtaacaggaatctgcaccttgttcttaggaggaaacttaggatccctaatctagtctaaaatctgcatttccctgatgagcagacagcttggagatgtgcagtgacttggccggccatggagctcagccatgacccagccggggctgtccctgcgggtcagctctgggtgcacccagaatgtgccacgggctgcttgaaagcatgagggtaaagttgtgcacatatgttatttagcaaaaagaccccatttgagccataataagtataaatatatatacatttatatacctgcctgtgaaaagatctggaagaatatattccagagaggtattggtgaatatctctggatcttggattattttatctacattttcttaattttttcacattgaattatttgtgttatgataattttaaaaaagaaagtggtggttgtttctacacccatgagccttcttctctccgtggcatagtgtattacttaggagaagcttggctgtgctgtggtggttagcacaggtttatttcttacccatggtatgtatccagcatggatcagtggaagatgctgctccacagtcacccaagggtacaggctggtggagcctctactgtctcacagcaccatctggaacaagtagctgcctctgttgccagtttccctgcagaagagggagaatggagaattgttcttgggctttcactgcctttgcttcaaaggggcctgggccacttctgctcacattgcattggccaaaaccagtcacacggtccatttaacttcaaaggaggtatagtcttctttttgttccagaagaaaggaagtggatcttggtgaggtaatagtgacctttaacacgtttgctattcccaaatgagttactctaagtgaaacatcctactatttgctggtggctgaatgaaaaataaggtgggacattgacatgtaactaacaaaaatagacaaattttaccagacactaagtctacatttgctaagtgatactcacgttaaaccatattattaggttggtgcaagagaactgtggtttttgccataaaagtagtagcaaaaaccacaattacttttgcaccaactgaataaaatttaaaatgtacagcatgtgagcctcctagagtttacttacctagcacagttcagtttgtggatgacattttaataataagaagaatggcacttggcctgtttagtaaaacactctggttctgtaagggtcctcttcaaactcctaaggacccatagcacagcagttaatagggtggaggaccatagtcccctcacgtggtaataggtatgaacattccaaaatgttctcatgagtggcatagtctgttatctcctgctgagaaacgctctatcaatgcatcatttattttatggagaatctctttattggtgccatatgttatgttcatcccagggcctccctgctgagaaaggtctgatgctttcaggttactcatgatatcaggtgccaacaggaggatatctactgacatgcacagaacccagaccctggaacaggcagccgtgagactggtcatattccacccacgcattcagtttgccaggaaatggcacagtgaaagtcttaaattcatacttctgtgggactaattgaactctggggtttttatttatttgaggaaatttctgtgaagccctgtggacagattagaaatatttactcacaaaattgtacttcagtctgtctcattctgaccattgtcatcatcatgacagagagaattgtagaaaagtttggtatttggcagtgttttctattttcattactgtcttacttggaaagcttaatactattttattattcaggtgctgtggttgtatagttttcatggatgtgttagtgtttcgctgattctattcttaagttagttttgatttataattatcatgggcttctacggcatttttcacagatacatctgcctggtcattctggtgctgggtcatttgcaatagattcctaattacagattcacttcttgcttgtatagaatctgtacagcatttttaaccctgtccataagtttatttacagagtaaatttgcataagtgttgcaaggacttgttactacttggactaacataatatttctgtttgctctttagagttcgtgggctggaaaagaaagcacattaaaaagatcagagaaggtaaaatatgagtctccacactgaactccatatttgcagtacctggtgtttgcttgcctattctaatcatgtctcttttttagcaaaagtagccatagtcataatccctcttaaccagggaaactgtttcattatggctgcaaaaacacattccaagagggttacgcatgatcgttagctaatgtgagaaggaatacttgttcaagacagccatttcagattactgagttttatttaaataaaggggaagtttctaagccaaagtctctcagttgtgtatcaaatttcttttatttttaaaaaacttctctagctctcaaagcctgtatcaccaagagaagggaaaaaaaaatggcctgagctgtaccatatattgaaaacaatgcattgctcctgcttaccttgctataaaatcatggtaattaccaatccgaacttgctttaatcggtgagtcgtggtttgactgctctcatccaggatttggcaaatgggaagggctatagatggaaaatcttcttggcttttcaggtcttgtggtctctgtcacactactcagctctggtgttgtaacacaaaagcagccacagacaatatgtaaatgaccaaatgtgactgttttcctataaaactttatttatgaaaagaggtgagagtccacatttggcccacagtccatactttaccagtcctgatctaaagtattcattatctacaaggaaaatgaagtaacaaatgagctgaaaaccctaaaaattaggaaacaatttatacattgtatccttatttcagcctccatttgatcagtaccatctacatacatgtgactttgccaaaactgccaggcttagtgctattctagtacagcagccttgggcctgtagacattgcccttatgtggacatgtgtggtgggatgggtgatatctctgtgtagactctgctgcctgtggacagctctgccctcaacttgctgtgctctctgagattcccaccatggcctgtgggcatcggggcttgacatgggtacagctgatgctgcaccattcttatctgtgaagggtctgacatcctcatcaccaaaggacccctcgacctccatcccaggcattgctggaaataagccaacaactctggatcctatgcagaacacctgctacaattatcttagataacatgacagttacctctgatatgctgtcagtaagtaggttcagctgacttggcattgttttagttatatttacccctaaccacactggtgtcaccaaaattagactgcaataccttgacagaatgtgtgagacaccctccatggagcttaggagacaccctggtctcatggagccacgtagaggctctcagggagaactgctccactgtactctgtgtaactctgctcacttccacttctgaagtgccatgtcctgcctgagcagctggctcagagccgatacctgccaggcactaatggcaccctccatcctacctcttaggtggcttttagttaatagagttcacagaatttaacactttaaaaataacaatgttatttgtgggggtggtgttttcccagagagacaaagagttcctgaagtccacgtttctcctggtttaccatgactgcgtgctcccacttctccactccacacgcctacccccattcaggtgggcagaagaagagactgagactgcacggtggaaagttatcactgacttccttaagcaaaaccaagaaaaccagggcgccctccaagctctgctgtcaccagacggagttcatgaaccttttgacctttcagagcagacctatgacttcttgggtgaaatgagaaagaatgcagtgtgacagtggcagcctctagccctcagcttcccacggaatcagatggatcctccacgattacgtgaataaaatgatggaaccaaaaatcactgtcactttacaacttaggttttactcttttctttctacagaccatatttttaaagaaatgtttatacaataatttaaatattttttaaaaccataaaataaatttttataaggaatactgttatatctaaatttaaacagtatttattttttcaaaaacagctacttaagttaatggtatagatttctataaaagcaagattttgtcaaaaactaaatttatgattattcaagaaagtgaaaaaaacaacctacagaatgggaaaacatatttgcaaatcatctaactgataaaggtctagtatccaaaatatttaaatttatgagtgttaataaaatttatcttgttcaatgaa

SEQ ID NO: 15704 - DNA, 59398 bp, Homo sapiens; identical to SEQ ID NO: 1226

SEQ ID NO: 15705 - DNA, 91817 bp, Homo sapiens; identical to SEQ ID NO: 1230

SEQ ID NO: 15706 - DNA, 47191 bp, Homo sapiens; identical to SEQ ID NO: 1232

SEQ ID NO: 15707 - DNA, 47189 bp, Homo sapiens
gcactgcagcgccagcgtccgagcgggcggccgagctcccggagcggcctggccccgagccccgagcgggcgtcgctcagcagcaggtcgcggccgcagccccatccagccccgcgcccgccatgccgtccgcgggccccgcctgagctgcggcctccgcgcgcgggcgggcctggggacggcggggccatgcgcgcgctgccctaacgatgccgcccgccgcgcccgcccgcctggcgctggccctgggcctgggcctgtggctcggggcgctggcggggggccccgggcgcggctgcgggccctgcgagcccccctgcctctgcggcccagcgcccggcgccgcctgccgcgtcaactgctcgggccgcgggctgcggacgctcggtcccgcgctgcgcatccccgcggacgccacagcgctgtgagtagcgggcccagcggcacccgggagaggccgcgggacgggcgggcgtgggcgcgttccctggcccgggacgggaagcaggacgcgggccaggacgctcccagggcgaggctccggcgcggcacggcggccctgctaaataaggaacgcctggagccgcggttggcacggccccggggagccgaaaaaccccgggtctggagacagacgtcccacccgggggctctgcagacgccagcgggggcggggcgcggaggccgcgctcagctgggaggacaaacagtcgctaattggagaggaattgggatgcggcctggggctgcggggtacccggagaggtggggatggctgtagggggcggcagggaagagttccaggaggtgtctggaaaaggatttgatggatgtgcaagaattgggctgatgcttaggaaggggcgatgaggtgggtccagaagaaggggggtgaacggtgtgagcaaagaccgtgaggctggaggctggccacgggaggtgtgaggggtaggggcagggtgggaggtgggctcgcgggtgggctggggtcatgaagggcctcaggcgctctgctattgggttccaaggctatcctgagaacaggggtgaggggggattgccgtggggggttaaagccttgtcatgttcgctttcgggagataaaaacaacaggtggcctttatggagacgctgcccagagccaggtctgtgccaggctcctgttgggggtcgtcatgcggaatcctgactctgaccatccgaggcatagggaccgtggagatttgcatttcacagatgaggaaacaggtttggagaggtgacacgacctgtcccaggcatcacagccgggatgtgcatagcaggggtttggaactatgaggtgcccaggacccagggttggattgaaaagggcggaggggactaagataagcagacagttgtccccagcgctggggagagtcttgggaccagtctgatgccttgtatttcccaggctccaggctcctcgccgggacagtgtctccttgggtgcgtgctggatccctgggggacgtggcacatccccaggcttgctaaacattgggtgggttctggcatttggttttgtaacgtttctgggtcactcccgcctgtggccacccttccttaggggagccgtgtgtccttggggctttgctgggtggtctcgagggtgggagaagaatgggttctcctggaccaatggagcccgtgcccctcggggccacattgctcctgcgctccctgactgcggacgcgtgtgtctcgcggctgtctctgtggagatggcctcctcctgcctggcaacagcacccacagaattgcatcagacctaccccacccgttgtttgtgatgctgtagctgagggctcctctgtctgccaggccggtcactggggactctgtccagggcctggtggttcctgcttcccagcacctgatggtgtccatgagagcagcccctcaggagctgtccgggagagaagggcgctggtggctgctgagcggagagcaaggcccgtgttctccaggcccttggcacagcagtggagcccccgcccctgccttgtgttgtcctcttaggctctggtcctggggtttggaggagggggaccctgggagttggtggcctgtcccagcctgagctggcaagattccgaatgccaggccccccaagtgtgcaacagggcacagggtgacctcatgtgggcaggtgggtgctgttctgtacacacctggggccgccgctgggagagttctggaaggtggggtgaggggacccatggcaaactagggccttaggaaggatgtgaaggccctggctggccccccaggccaccctctgtgctgtggggcagcccagccattttgctgtctaccctgcaaactcctcctcggggagacggctgggttttccccagggaagaggggtcaagctgggagaggtgaaggacacagatcacagctgctggcaggtgttcaagggtccaagagcgttgctgtctgggtgtcaccagtagccttcctggggggctcacgcaggtgcctctccacttgtggctccctggctgctgaagctcagcagggacagctgtgtccagttccaggtggaggacagccggggcttctgaggccacagcctgccttgggttaatgatgctgccgagaggtggtggcttttggaaaagatggcgtactgcaaaacgtgctgctctgcgtggctcgaagcttcgtggggagacgtgggcagagccgtggctgactcacagaccccccaccccagagcctgccctgccctccctgccccgacccttctccctcctgacccatgtgttttttttttttttttttttttttgagacagagttcactcttgttgccaaggctggagtgcaatggcacgatctcggctcatggcaacctccgcctcctgggttcaagcgctttttcctgcctcagcctcccgagtagctgggattacaggcgtgcaccaccatgcctggctaattttgtatttttagtagagacagggtttctccatattggtcaggctggtcttgaactcctgacctcagatgatccgcccgcctcggcctcccaaagtgctgggattacaggcatgagccaccacgcccagccctgacccatgttttgaaccaaattccagccacccttttatctgcaagcattttggagggcatcgcaatactgcagacccacctaacacaacagacagttccttcatgccaccgaaggcctggtgtgttcacatttttggtttaatagtttgaattaagagccaaataaggtccacacactgcaattagttgatgtctttttttttttctttttttttttttttttgagacggagtcttgctcttgtctccaggccgcagtgcagtggcatgatctcagctcaccgcaacctccgactccctggttcaagcgattctcctgcctcagcctcccgagtacctggtagctgggtttacaggcatgcaccaccgtgcccagctaatttttgtatttttagtagagacggggttttactgtgttggccaggatggtctcgatctcctgacctcgtgatctgcccacctcggcctcccaaagtgctgggattacaggcgtgagccaccgcacccggccaatgtcttttaaaaatatatactttttttttttttttgagacggagtttcgctcttgttgcccaggctggagtgcagtggcgcgatctcacctcacggcaacctccgcctcccgggttcaagtgattctcctgcctcagcctctccagtagctgggattacaggcatgtgccaccatgcctggctaattttgtatttttaggagagacggggtttctccacgttggtcaggctggtctcaaactcctgacctcaggtgatccgcctgccttggcctcccaaagtgttgggattacaggtgtgagccaacgcgcccagacaaaaatatatgtgtgtctttaaggctggtcaagcaaagcagtaggactggagaaagaatgaagaattctacctggctgtgatcaattcgttgtgaacaccactgtgcttggaccagctagctgatgtcttttgttttgttttgtttgagacggagtctggctctgtcacccaggctggaggacaatggtgtgatctcggctcactgcagcctccatctcccgggttcaagcgattctcctgcctcagcctcctgagtagctgggattagaggcgcgcgccaccacgcccggctaatttttaaaaatatttttagtagagatggggtttcaccatgttggtcaggctggtcttgaactcttggccttaggtgatctgcttgcctcggcctcccaaagtgctgggattacaggtgtgagtgatgtattttatttatttatttatttatttatttttattatttgagatggagtctcactctgttgcccaggctggagtgcagcagtgccatctcagctcactgcaagctccgcctcctgggttcacgccattctcctgcctcagcctcctgagtagcctggactggtgcccgccaccatgcccagctaattttttgtatttttagtagagacggggtttcaccgtgttagccaggatggtctggatctcctgacctcgtgatcctcccgcctcagcctcccaaagtgctgggattacaggcttgagccaccgcctgtcttttaaatgtccgatgatgtctaggagcttcccttcctctctttttccttgtgcaatttgttgaagaaactggctcctgcagcctggatttctcgctgtgtcttgggggtgccacctccatggtgtcacctccgtggtgctgtgagtgtgtgctttgtgtttcttgtaaattggtcgttggagccgacatcccattgtcccagaggttgtcctggctggcactggcctaggtgtagatgtcatcagctcagggccccctgctctaaaggccacttctggtgctggttgccactcaccctggctgggggtcacctgggtctgctgctgtctcgcaaatgctggggtccaggactgggcacatcgagggacttggtaggtgcttggttcactgatgtaaaatataggagcacccggggccttgccctttcccacctgcatccctgaatgacaggagagtgtgggagagtgtagggacagcaggcgcagaccccggggcccctgcctgggattggcgtcggggaagacaggcattctggagcgacccctaggcctgatgccttagagcgcaactgccagagacacagcttccttggggggctggccaggccacggaggggcccctggctcccatttctggtccctggatcctgagagcgaggactagggattgtcaccaaggcctccatgagccctcagcagaaggagggccaccctcgagggctccgttatcactggagcccgcgttcaaccaacacgcagatgattctccaaggacagagatggatgatggggagggggctggcctggaaggacccccagtgcaggtgacattgaagccaggtttcaaagctcccacagggagctgcccagagagagtccccaaggggcaaggtgactcgggggcaggggtagggcctctgtcaggagagcctaggagaggcctgtgtcttctaggaagagccctggcagccgagcggaggcagtggtgaggacctgcatcctgcatgtccagctggcctcacccggggtccctgagccgggtcttacgtggctcccgcactcgggcgttcagaacgtgcctgcgtgagaaacggtagtttctttattagacgcggatgcaaactcgccaaacttgtggacaaaaatgtggacaagaagtcacacgctcactcctgtacgcgattgccggcaggggtgggggaagggatggggaggctttggttgtgtctgcagcagttgggaatgtggggcacccgagctcccactgcagaggcgactgtggagacagagagcacctgcaggtcatccatgcagtatcggcttgcatccagatcatacagggaacactatgattcaacaacagacagggaccccgtttaaacatggacaaggggtcactcacgcctggaatcccagcagtttgggaggccagggtgggtggatcgcttgagcccaggagtttgacaccagcctgggcaacagggtgagaccccggtctctaaaaaataaaagaacattggccgggcgtggtggtatgcatctgtggtcccagctattcaggagactgaggtgggacatcacttgagccgaggaggtcaaggctgcagtgagctgtgatcacaccactgcactccaggctgggtcacagagcaagaccctgtctcaaaaaaaaaaaaaaaaaaaaaaaaaaatcacaggatctgaacagagatttctccaaagaagacgcacagatggccaacagcgtgtgagaagatggtcggcctcattagtcatgagggaaacgtaaatcaaaaccactgtccagccgggcgcggtgcctcacgcctgtaatcccagcactttaggagagcagatggcttgaggccaggagtttgaggccagcctgggcaacatagcgagaccaataaatagatattagtggtggcgcctgtagtcccagctagttgggaggctgaggggggaggattccctgagtctatgaggttgagactgcagttagctgtgatggtgccactgcactccagcctgggcgactaggaaacggtctttaaaaaaaaaaaaaaaaaacagggtgggcgcggtggttcacgcctgtaatctcagcactttgggaggccaaggtggggggatcacaaggtcaggagtttgtgaccagcctgaccaacatggtgaaaccccgttctactaaaaatacaaaaattagcgaggtgtggtcgtgggcgcctgtaatcccagctaattaggaggctgaggcaggagaatcacttgaacccgggaggcggaggttgcagtgagccaatatcacaccactgcactctagcctggtcaacagagcgagactctgtctcaaaaaaaaaaaatgctgagcgtggtggcgcatgcctgtagtctcagctactttgggggctgaggcaggagaatcgcttgaacctgggaggcagaggtcgcagtgaggcaagattgcaccattgcactccagcctgggagacagagtgaaactctgtctcaaaaagaaaaggtctaggaagagtccgcaccctctccccgcggtggccacgccgggctccgcgctgagccctctgtgttcttgtctctccatacctcatcacggcaccgcagggttgcagccactcctggtctcattttacacaccaggaaattgaggctctttgagaagccgtggtgatgatttcatcagcatgctctggggcagacccctgcagccgcacagggtgcctggggcccacactagtgccctggtttatagacagacagaggtggcagtggcgcttccgagtcgggctgcgatgtgcttgcactccccgaggggctgaggggccctgcgcccaggtgcagctgcttgggtgctgccagcccctcccacctctccctccctgccagcccctcccacctctccctccctgccagcccctcccacctctccctccctgccagcccctcccacctctccctccctgccagcccctcccacctctccctccctgccagcccctcccacctctccctccctgccagcccctcccacctctccctccctgccagcccctcccacctctccctccctgccagcccctcccacctctccctccctgccagcccctcccacctctccctccctccagcccctcccacctctccctccctgccagcccctcccacctctccctccctgccagcccctcccacctctccctccctgccagcccctcccacctctccctccctgccagcccctcccacctctccctccctgccagcccctcccacctctccctccctgccagcccctcccacctctccctccctggctcatccctgctgtgtcccttctctctagtttcctgttcagtttcaggaaggaggctgggaacccagatgtagggaatttgcgccctggagtcagacctgggttcacgtcccagcgcctccacctctggtgtgaccttggtccagtctctcagcctcagtttcctcacctgtaaagtgggctccatgattagatgcaccctgcagggcagtgtagcagtgacctggctcagccactggcagccccaacaatcataccttgttaaagtagctctgtcggttccctcaggggttccgggggcccattcccctgtcctccatgcactgtgagacctgccctgccacagagcagagtgtaacagcctgagggtgagagccagacactgtgcctgtgcttagaccagacactggacgacgggagccagtgcagcctgggcgggtggactcctatggacccctcagcacccagcctcggtgccttcagcgcagggccgcgtggctgtgggggctcacaagacccggcccactcctgcttgtgcctacatctgggtgtttgcccattggtgccttttgacgcgttctggtgtgtgtgagacgtgcggggctgggaagtgttggcagagccgcgagtaccgtcctcactccttttgttcttttgacgtaagctggcgagtggcactgcctgagttccgctcagtgcccgccctgatgtgcggaccccgctgcattcttgctgttaggtggtggcggtgtgcgctgtcgctggtgggcaccgagagtctttgggagctttggggaggttgtgccaagcctgagcctcgacgtcccccttcccggctttctgttggctcttctgaggccagggcatctctatgagggcctcctgctggagccgtctctgtggatctcctctgccatcctggcccatgagtgggtgatgcgctggccaccatctggtgacagtggccgggcaccgctgccaaatgtgggtcccgcatctgcaagcccctccctgggtcccctagggtatggggtggttctgccactgccctcgctcccccaccttggggtgcctctccccctgctcgtgggggagaccctgcctgggatctgctttccagcaaggaatatactttggagggagacacacatgttcttttctggagctctgcagtggccacggcagcccagcccgccaagcaccctggaatgaaaacatcccgctgctgtctgggcctggcctgcactctgctgcctgcgctccagctggctgaggccgggcacgtctgcgggcacagcagcgggggcgccacagtctccctgcagagtgagcgcagctggaaaatgcagctcacgccctttcccagaacacctcgctcttcatggcttggcagctgtccttgcctaggggccagggtgcccaggcactggtggcaggagaagggctacatctggggctgaggcgggctgggtccttttctccctgcagctcccgaggcccagccctggcccagcctggcattcctgaccttagcagcgccatgatctgaagacaggctggcttctgtgaggccacctcagaaagggctttgtgcccaggcagaggcggaagccagctcttccttctggttgaggcaggaatgaggccagcgctggggcaagcccatgcccagggaacgtcacagctgtgggagtacaggggctccgggttctgagcccgtccactgtgcatcgtggccctggcctcaggatggctcgtaccatcattggctgtgcccacagccgagtgggtgatgggattccggctgccccgctggatctgtgctgctgccctctccagggcactgctgtgcccgcacagccgggcgcagatggccagtttgcttgcccccccccccaccatcctcttcctaccttggcttcctccattgacacactggaccctgctggctgcccggggaggtgtttgggggatggtgttgggggaggaggagggccccttgagcctcagtgtgcccatcaggagcgtaaggtcagtgcagcacctgcccacacaggctgtgaagggtgggagtggagagggatgcaagggggtcacaacgcctggctccatgtcagctgcgtgcaggggcaccaggagccggccctcattctccccttgaactggaagggtggccccgaccccagcggcaggtagcatacgtatgaagcgctctccttcctacaccccacaggtgggctcgtctccagacggccctttttgagctggctgtgtttttccatctgtgtaggcaaggacatcgcagactcccctttctcatctccctcgttcagcctccgaggccggagtctccatccctgtgcctgcctgtgggtcccgggaggacctgaggctgcccatgtcacccccggcatctcatcctggggacagttcagccgtgggagggatctgtaaggacagaatgccgctgagcctggggctccccagctagtctcacaccccgtgtctgggacccagagaccctcgtgcagggctctgttgcttggggcctggcagcctcgtcctgtatcagaggctgccacccccacccctcgtggggccagggttgtggccggcctccctggccctccccatggaagtggtaggcggagccagcagccatctgcccagcccggggctgcactgttttttttcaaatgagcaccgtcccaaactgcagcccgttaatttaaacaggatcatttccggccctggaagccgcctcactctccttaaatagaaaggagcacagcgcagagggaaacagatgaggtcatggctcggctggcccagcgaggaaggggccgcagtgggggtggcactgccgcctgtcccctgtcctctccagcgcccacactgcagcccatttcctcaccctgggcctgctctcgggagggacgggcctgggggtcctcttgctgggcggaggggaaccagctcctccaggagaggacggggcctggcagggggcatggggcctccctgggtctggcgtcctgtcctgcccctgccgagggaggagcggttacataagctccgcaggcggcccctccgagccggtccccccagcccagtttccagtgaggcggccagcgcgggcgggggtgccgggcctggcgcacacccgctgctgaccacacgtgtctggaatgtgcagatgtttctttgggggctccgtccggcccccagaccccactcagcatctggtctggggagtgggcgcctggggcactcagctctgagtgtgagactctgaggcaggtctggtttgtctggggccattccctctgctgtggattgggagggccccgggagctgccccacacccagggaagttctcctcagtcccactgttgcattccccgaccccggctcccccggcccaggagcgcctgtggggcagaaggcccagccccaagacttcccggccctgccagcctcaggcttcacccaccctcgcgccaactgtgggcagagcccagggggagggcaggagagccagcgcctggctgggaacacccctgaggggccgaggctccagggcgagggggcccgacctggggttcacacgcccgggtggcgggcagacccgctgcagcatgagacacgtgtcagctacctcgggccggcaggctggccctgctgcccacagccctgggacgtggccccacctgtgacgggtgtggaggggcagcctccaggcctggccacaccctctgctgttgctgctcctgctccaggattggcaagggtgctgggaaggggtgaagacccgtactgtggccacacacctgggacttccttctccacccagtggtgccccagcagccgctaaggagcccgctgggtcccacgctaggatggtcctaactcctcccgccttccagatcggacgctcggcgctggggaccccttgtgtcccggggctggggcaccgtcctgccccccatgggggtgtactcctcccgacaagcttggcttcagcttccctgggagcacatcctggccctcgggcacccatcaggctgtccctgtgcacctggctcccacccttccagctcatagcaggaactggggtgaggagtgcgtggggcagcaagggcctgggaccccagaggaccctgcactctgctctgtgctcttgcctgggcttagggccgctcggtggtcctgctgccagatgcctgggccctgctgtgtcccccatccttgcagggaaccagaacgtgggggcagggcatcagacagcggcgatgatgtcacctggcgggtgcagaggaagcccgaggggcggggtgggggggctggcgcgaggctgcctggctaggccttggcgttcccccagaacggcgatggcaaaagcagatggagacgtgaaaaagtacgggagcaagcgaggtgaggactccacggggacccctgtgctgttccctgtccctgaagcccacacctgagtcctgcccagggcagatgcttccacacccagggggcacctgagtcctacccagggcagacgcttccacaccctgggggctgggggactgcacctggctcctgtctgggccccagcttcattccactgccctgggccctgggagctcggccgagcggggtccccaagaccttgctgcatttctgggccttgggctggggtgagggccgggagaaggagccagcctggagcctggcacgcagggagtgcatggccagaaccggtgacaggcagggctgcctgctggcgtggaagaagtgtccatggcacccccaggcctggttcacagtgggatgggcggggagccggggggctctggggtcctcggctgacctgcccccacccctgccctggcttgtcagctcccagcagcagccactcttgatggattttccagaaaatgaggtgtggccaaacatcttcaggcttttccttctttcctttctcccgtggcctgggtgggagctgctccccatgcctgggggcaggtgcgagagcctgtgcccctccctggggcagtttcacagctgtgtcccttccagggggcctgcctgtgttcaccgtggcctctgcagcacctctcgccccttagggctcctgcgcctcgggtcccggtgcctcatttctccctaaagcattggttctgctgccgccgcagccgctggaaagtccctcctcaggtctaactgcagttcctcacggcacagtgttccccctcgggcatggtgcttgggcagtgggtgtgagtccagctgcctcaccctgtctcgagaatggcctcttgctggtctcccagccaccaccctgtcccaccccacggcggggatggtgtggatgcctagcagcgcggctgtgggcccacccatccttatgggcagtggggagcacctcagcccgtgtccctaccttggtgtagaggaggggacggcagagaagcagggttcagttaggggggaagtggtggccctgccggaggggccgttccctgtgtgcctggcccccagatcctctcccctcccggagcccagggcacaggcataggctctctgagtgtcccacagcccctgggggaagggaactgcacccccaaccgtgccctccatccgcagatggaacgagaagctccgggagccagtgcccagcgtctcatctgtctgggcacccagcccaggtgagggcctggctccaccgtccgtggctggtgctgcttcctggcacggagaaggcctcggctgctctgtcccctcagctggggtggcctctggtccccttctttgttggttcccttctcaagctcttgccctggccccgggccccaccgggcagcctgtgtgtgcgtctctcctgcgccgggtaggctcctgtgggagcggagctccggtgggaggagcagggctggaggctggcaggggctgggcgggtgttcagggatggaggccgccccggcttggggctggctgccgggtggtcattgctgggaagagcaagtctaggcggaggcacctgctgggtcactcgtggggagggtgacacctggggaagtagaggcccgtggcaggaggtgaggcctcggggtcctggggagcaggggggtggtgtgcagacctgcggagccatagtcctgtgccaggagcactactgggagtgcgtgggaccaggaggggtgcccagggtgggcggcagagtgacccccgaggtgcttgaggccgaggggaggtggagttctcggtttgccccagctctctgtctactcacctccgcatcaccagctccaggacctggtttgtaactcgggcagctctgaaaagagagacatgctgccgccctgtggtttctgttgctttttcttcactgactactgacatgggatgtttttcctacggctgtgaccaattgtgcttcttctaattgcctggtttttctttttttgtttttggagttttctctttctttcctccctccctctcaccctccatcctttttttttttatttttattttttgagatggagcttcactcttgcaggatggggtgctggagtgcaggggtgcgatctcagctcactgcaacctctgcctcgcgggttcaagtgattctcctgcctaagcctcctgagtagctggaattacaggtgcttgccaccacgcccgactaattctgtagttttggtagagacagggtgtctccgtgttggtcggtctggtcttgaactcctgacctcaggtgatgcgcccgcctcagcctcccaaagtgctgggattacaggcaggagccattgcacccggctctttccccttctccttttcttctctctctcctccctttctttcttttcttttcttttttttttcttttgagatggagtctcgctctgtcaccaggctggattgcagtggcgtgatcttggctcactgcaaccttcgcctcccgggttcacgtgattctcctgcctcagcctcctgagtggctggcactacaggctcccgccgccatgcccggctaatttttgcatttttagtagagacagggtttcaccctgttggccaggatggtctcgatctcttgatctcatgatccacccaccttggcctcccaaagttctggcattacaggagtgagccaccgtgcccggccatctttctttccttgctttctctttgttttctttcgagaccgggtcttgctctgtcgcccaggctggactgcagtggcacaatcatagctcactgcagcctcgacttccctggctcaagcgatccttcctcctcagccccccgagtagctggaactacagttacacactaccatgcctggctgattctttttttccttgtagagatggggtcttgctatgctgtccatcctggtctcaaactcctggccttcccaaagcactgggtttacaggcataagccaccacacccagtttccttttcttctttttaactggaatagttgacgttttctttattagctgtgtgtcaggagggtatttttggcctttagtatgtcgtgtaagttgctagtgcttttctgagattgtagtttgttttctaattttatttatattttgcgtagaagttgtgtattttagatggagttaggtcggctggtctttgatgttttatttattaattatgtatgtatttatttatttttgaggtagagtctcgccgtttcacccaggctggagtacagtgatgcgatctcagctccctgtagccttgacctctctgggctcaagtgatttttctctcctctacctcccgagtacttgggaccccaggcgcatgccgccatgcctggctaatgtgtattttttgtagatacggggtctcactgtgttgcccagggtggtttcaaaatcctgggcccaggcgatccttccgtctcagctcccacggtgctgtgttaccggcgtgtgccccagtgcctggccgtcttggaggtcttgtttctctgggtttatgcctcgaggtggcgcctgctcccctgtgctccctggtagcctggtagtgagcctgcttctcacacagtcatacctggttgtggtcccacagtgggaccaccctgttgggttcagaacaggagatgggggcccctcgagtctgtgtgggggctgtggacagggttgggagaccttggctctgtgggggactgtggacaggggatggggggccttggccctgcgtgggatgggttgggggtccgtgcccttcctggccctgggtggacaggtccatgtggcactcggcatagggctgagatgggtgcagagggctgaggcccccaggcctctcctggcttggtttccccagatgagtgttcatttgggtcttccatcagaaagtcccctcctgacctctgggagtggggagctcaagggtgggaggccatagcttggggatgctggcaatgtgtgggatgggcccagggatggcctctggcctactaggggctctggccctgacccacggccactcactcctcagagacgtctcccacaacctgctccgggcgctggacgttgggctcctggcgaacctctcggcgctggcagagctgtgagtgtcccccagtcgtgccagcatgcggggctcactccgggtgggctggcggcaccgcctcttgctgctcagctgtgggggcttccatcagctttgccgaatcccccgtctcttccagggatataagcaacaacaagatttctacgttagaagaaggaatatttgctaatttatttaatttaagtgaaatgtaagttgtggttctttgggtggggtcctggctggaccccaggcccccaatatcccttctgccctcccagttggtccgtgtccccttccaggcttgagaccagatcctgggggcagttcactgcctgcttggagccccccagtgccggcttggttggggcaggggaggcggtgctgtcagggtggctccagggcctggttgccagtggggggctggcatagacccttcccaccagacctggtccccaacacctgcccctgccctgcagaaacctgagtgggaacccgtttgagtgtgactgtggcctggcgtggctgccgcgatgggcggaggagcagcaggtgcgggtggtgcagcccgaggcagccacgtgtgctgggcctggctccctggctggccagcctctgcttggcatccccttgctggacagtggctgtggtgagtgccggtgggtggggccagctctgtccttcccagccaggtgggacctgggccctgcagacactgggcagggctcaggaaggcctctctggggggggcctccgggccaagggaacagcatgggagcctgtgagtgcggcgggcggatgtgggggcgtggggtggagccaggaggagcagaacccggggtccagtggctgcctcttctaggtgaggagtatgtcgcctgcctccctgacaacagctcaggcaccgtggcagcagtgtccttttcagctgcccacgaaggcctgcttcagccagaggcctgcagcgccttctgcttctccaccggccagggcctcgcagccctctcggagcagggctggtgcctgtgtggggcggcccagccctccagtgcctcctttgcctgcctgtccctctgctccggccccccgccacctcctgcccccacctgtaggggccccaccctcctccagcacgtcttccctgcctccccaggggccaccctggtggggccccacggacctctggcctctggccagctagcagccttccacatcgctgccccgctccctgtcactgccacacgctgggacttcggagacggctccgccgaggtggatgccgctgggccggctgcctcgcatcgctatgtgctgcctgggcgctatcacgtgacggccgtgctggccctgggggccggctcagccctgctggggacagacgtgcaggtggaagcggcacctgccgccctggagctcgtgtgcccgtcctcggtgcagagtgacgagagcctcgacctcagcatccagaaccgcggtggttcaggcctggaggccgcctacagcatcgtggccctgggcgaggagccggcccgaggtgagtgtctgctgcccactccccttcctccccagggccatccagatggggcagagcctggtacccccgtcttgggcccacactgaccgttgacaccctcgttcccaccggtctccagcggtgcacccgctctgcccctcggacacggagatcttccctggcaacgggcactgctaccgcctggtggtggagaaggcggcctggctgcaggcgcaggagcagtgtcaggcctgggccggggccgccctggcaatggtggacagtcccgccgtgcagcgcttcctggtctcccgggtcaccaggtgcctgcccccaccccccgaggggccataggttgggagatctctgaagcactggggcagagcctgcggctggggagtctcaggaggaaggaggtgggagctgggccggccctggtgagcaggtggcgccggccggtggggccgttcctgtcagctctgcagatgcagaggtggacatgagctgggggcagcctccggacactcctgggcacgccatacgggaggtggcctgcacggggatccctgccggtacccacaggccccgtgggtgggtgctgctgtgagcctgggctggtgggccctggtctccgggctctgagcctcagtttccccatctggaaagggggacagtgatggggctcccagcgggctgctgtgagggtgggaggatggaggagtgccctgagccccctgccatcccacacccgcccccaggagcctagacgtgtggatcggcttctcgactgtgcagggggtggaggtgggcccagcgccgcagggcgaggccttcagcctggagagctgccagaactggctgcccggggagccacacccagccacagccgagcactgcgtccggctcgggcccaccgggtggtgtaacaccgacctgtgctcagcgccgcacagctacgtctgcgagctgcagcccggaggtgtgcggggggccaggcaggggcctgagacgctggctgtggttaggggcctgccgagcgcccgcggtggagcctgggctgaggaggaggggctggtgggggggttttcgggcggctcggtccccagtctgttcgtcctggtgtcctgggccctggcccggcgcctcactgtgcactcgccaccccaggcccagtgcaggatgccgagaacctcctcgtgggagcgcccagtggggacctgcagggacccctgacgcctctggcacagcaggacggcctctcagccccgcacgagcccgtggaggtagtcggccccccacgttctacaacctgccctcctgcctgcccctggaggccttgcctgccctgcccactgtgggtctcgccaaaaaacttgggggccttaatgttgcttgtgcccagtgaagatggttgggaaaatccagagtgcagagaggaaagcgtttactcacattacctccaggccttttctctgagcgtgtgtgagttattcctgaaaggcaggtcaggggtcctgccccccatggacagtttccaccggagtcttcctctcgagcgacaggagccaggcctgtgggggtctgatggctcgctctccttccctcccctcttcctgggaagttcgggtagggggagtctgggcttcaggctgggatggggtctgtggagctgaggcggccccctgcccaccaggtcatggtattcccgggcctgcgtctgagccgtgaagccttcctcaccacggccgaatttgggacccaggagctccggcggcccgcccagctgcggctgcaggtgtaccggctcctcagcacagcaggtgggactctgggtggtgggtggtgggtggtgggcgccgcaggactcggggtggcctctctgagctttcacgtctgctggtcctgtggccaccagagtggttcccagtcttaggtggacagagcaggggttccagagacaccagctcattccaggtgtcctgggggtggattgggtggggcctgcctgggggccggcctgggtcagtcggctggccggagacggacgcagcactgggctgggagtgctgcccaggtggggagacctgtcctcacagcaaggccaggattgctggtgcaggcagttgggcatctctgacggtggcctgtgggcaaatcagggccccaacaccctcccctcctcacagggaccccggagaacggcagcgagcctgagagcaggtccccggacaacaggacccagctggcccccgcgtgcatgccagggggacgctggtgccctggagccaacatctgcttgccgctggacgcctcctgccacccccaggcctgcgccaatggctgcacgtcagggccagggctacccggggccccctatgcgctatggagagagttcctcttctccgttcccgcggggccccccgcgcagtactcggtgtgtggccctgacctgggtctgttccctgcatctcctcaggccaccttcctgtctgctgcccagggtctgggtctgtgcaccagacacacccagcctgcaggcccctcccacgtccttgccacctctgacctccgacctctgcagtgccctcggccctctcccagtgggagaagctctcgcctgggcccttggcacgagctgtgcctcctcttcctctctcccagcacagctgctccttcctgtctgccaggtcttggcctgtgtcctctccccgtgtgtcccccggtctgcaactgtcctgcctgtccttgtcacgagcactgtggggaggctccttgaggtgtggctgacgaagcggggagccctgcgtgtccaccctcatccgtcgtgcgggggtccacgggccatgaccgtgaggacgtgatgcagccctgcctccctctccacaggtcaccctccacggccaggatgtcctcatgctccctggtgacctcgttggcttgcagcacgacgctggccctggcgccctcctgcactgctcgccggctcccggccaccctggtccccgggccccgtacctctccgccaacgcctcgtcatggctgccccacttgccagcccagctggagggcacttgggcctgccctgcctgtgccctgcggctgcttgcagccacggaacagctcaccgtgctgctgggcttgaggcccaaccctggactgcggctgcctgggcgctatgaggtccgggcagaggtgggcaatggcgtgtccaggcacaacctctcctgcagctttgacgtggtctccccagtggctgggctgcgggtcatctaccctgccccccgcgacggccgcctctacgtgcccaccaacggctcagccttggtgctccaggtggactctggtgccaacgccacggccacggctcgctggcctgggggcagtgtcagcgcccgctttgagaatgtctgccctgccctggtggccaccttcgtgcccggctgcccctgggagaccaacgataccctgttctcagtggtagcactgccgtggctcagtgagggggagcacgtggtggacgtggtggtggaaaacagcgccagccgggccaacctcagcctgcgggtgacggcggaggagcccatctgtggcctccgcgccacgcccagccccgaggcccgtgtactgcagggagtcctagtggtgagtatggccgaggctccaccaccagcccccaggcaggtgcctgcagacagggtgctcacacagggcgtgaggcctggcttcccagtgagggcagcagcccagttactggggacgtcggccccgggcaggtcctgctggctggctcctcgggctacctggtgggctttaaattcctggaaagtcacggctctgacagtggctccgctaactcattccactgtctcatttcacaaaatgaatttaaaactctgctccctgacctcacacgagcccccgtgagtctctcacgccctctgctgtgttctcgcctggctaaagcgagtggcttttgaggtggagtctgaacccctgatgggaaactgcgggctgcccgcggtgccaccatgctgggtacatgggggacagggctgtctccatcttgcgggtacctgcctcttcaccaggggccttgggaggggccatcagaaatggcgtgacctgtgcagcctgtcctgggttctgtaagccagtgtaggtgcctcccctcactgctccgagctctctgggtgaggagctggggcaagagcgccgggagggtctgagaagactcagagagaggtggactctttgtagctggtactaggtttgctttacagatggggaaactgaggcacagagaggttgaggcattagtagtactacatggctggctggagagccggacagtgagtgtcccagcccgggcttggctcccatggcatgcagagccccgggcacctcctctcctctgtgccccgcgtgggactctccagcccgacgggaggtgtgtccaggaggcgacaggctaagggcagagtcctccacagagcccaggctgacaccattccccccgcagaggtacagccccgtggtggaggccggctcggacatggtcttccggtggaccatcaacgacaagcagtccctgaccttccagaacgtggtcttcaatgtcatttatcagagcgcggcggtcttcaagctctcagtaggtgggcgggggtggggaggggaggggatggggcggggcagggcgggggcgggctccaccttcacctctgccttctgctctgcttcatgctgcccgaggacgctgccatggctgtgggtgagtggagggagggacgccaatcagggccaggcctctcacctgccacctgggctcactgacgcctgtccctgcagctgacggcctccaaccacgtgagcaacgtcaccgtgaactacaacgtaaccgtggagcggatgaacaggatgcagggtctgcaggtctccacagtgccggccgtgctgtcccccaatgccacgctagcactgacggcgggcgtgctggtggactcggccgtggaggtggccttcctgtgagtgactcgggggccggtttggggtgggcaccaggctcttgtcccagccccagcctcagccgagggacccccacatcacggggttgcttttctgagcctcggtttccctgtctgttgggaggtaactgggtgcacaggagccctgaggctgcacgggagccgggagaggcctcagcacagccgggtgggccctgaatggaggcccggggcgtgactgcagagtggagcctcggctgggtcccaagcaccccctgccccgccaccgcccacccctgtcccggttcactcactgcgtcccaccgccccggcaggtggacctttggggatggggagcaggccctccaccagttccagcctccgtacaacgagtccttcccggttccagacccctcggtggcccaggtgctggtggagcacaatgtcatgcacacctacgctgccccaggtgagggatgagggggtgagggggccactgcctttcaggctctgagcacggggtccccccagctccccagtcaagctgccccccttcctccccaacagccctcactgtgacctcacctgggctgatggcttaggcccctactggggtgagggaggggccaggcgtggggggagtggacagggaagctgggcccctgaactgcgccccccgccctccccgggcctggctcttgctgctctgctgccccgagtgcagctgcacttggaggcggtgccgtcctcgccaggcagccctcagtgctgctacacctgtgctccgtcccgcacgtggcttgggagcctgggacccttaaggctgggccgcaggtgcagccgttcaccccgggctcctcaggcggggggcttctgccgagcgggtggggagcaggtgggggtgccgcggctgccccactcgggcctgtccccacaggtgagtacctcctgaccgtgctggcatctaatgccttcgagaacctgacgcagcaggtgcctgtgagcgtgcgcgcctccctgccctccgtggctgtgggtgtgagtgacggcgtcctggtggccggccggcccgtcaccttctacccgcacccgctgccctcgcctgggggtgttctttacacgtgggacttcggggacggctcccctgtcctgacccagagccagccggctgccaaccacacctatgcctcgaggggcacctaccacgtgcgcctggaggtcaacaacacggtgagcggtgcggcggcccaggcggatgtgcgcgtctttgaggagctccgcggactcagcgtggacatgagcctggccgtggagcagggcgcccccgtggtggtcagcgccgcggtgcagacgggcgacaacatcacgtggaccttcgacatgggggacggcaccgtgctgtcgggcccggaggcaacagtggagcatgtgtacctgcgggcacagaactgcacagtgaccgtgggtgcggccagccccgccggccacctggcccggagcctgcacgtgctggtcttcgtcctggaggtgctgcgcgttgaacccgccgcctgcatccccacgcagcctgacgcgcggctcacggcctacgtcaccgggaacccggcccactacctcttcgactggaccttcggggatggctcctccaacacgaccgtgcgggggtgcccgacggtgacacacaacttcacgcggagcggcacgttccccctggcgctggtgctgtccagccgcgtgaacagggcgcattacttcaccagcatctgcgtggagccagaggtgggcaacgtcaccctgcagccagagaggcagtttgtgcagctcggggacgaggcctggctggtggcatgtgcctggcccccgttcccctaccgctacacctgggactttggcaccgaggaagccgcccccacccgtgccaggggccctgaggtgacgttcatctaccgagacccaggctcctatcttgtgacagtcaccgcgtccaacaacatctctgctgccaatgactcagccctggtggaggtgcaggagcccgtgctggtcaccagcatcaaggtcaatggctcccttgggctggagctgcagcagccgtacctgttctctgctgtgggccgtgggcgccccgccagctacctgtgggatctgggggacggtgggtggctcgagggtccggaggtcacccacgcttacaacagcacaggtgacttcaccgttagggtggccggctggaatgaggtgagccgcagcgaggcctggctcaatgtgacggtgaagcggcgcgtgcgggggctcgtcgtcaatgcaagccgcacggtggtgcccctgaatgggagcgtgagcttcagcacgtcgctggaggccggcagtgatgtgcgctattcctgggtgctctgtgaccgctgcacgcccatccctgggggtcctaccatctcttacaccttccgctccgtgggcaccttcaatatcatcgtcacggctgagaacgaggtgggctccgcccaggacagcatcttcgtctatgtcctgcagctcatagaggggctgcaggtggtgggcggtggccgctacttccccaccaaccacacggtacagctgcaggccgtggttagggatggcaccaacgtctcctacagctggactgcctggagggacaggggcccggccctggccggcagcggcaaaggcttctcgctcaccgtgctcgaggccggcacctaccatgtgcagctgcgggccaccaacatgctgggcagcgcctgggccgactgcaccatggacttcgtggagcctgtggggtggctgatggtggccgcctccccgaacccagctgccgtcaacacaagcgtcaccctcagtgccgagctggctggtggcagtggtgtcgtatacacttggtccttggaggaggggctgagctgggagacctccgagccatttaccacccatagcttccccacacccggcctgcacttggtcaccatgacggcagggaacccgctgggctcagccaacgccaccgtggaagtggatgtgcaggtgcctgtgagtggcctcagcatcagggccagcgagcccggaggcagcttcgtggcggccgggtcctctgtgcccttttgggggcagctggccacgggcaccaatgtgagctggtgctgggctgtgcccggcggcagcagcaagcgtggccctcatgtcaccatggtcttcccggatgctggcaccttctccatccggctcaatgcctccaacgcagtcagctgggtctcagccacgtacaacctcacggcggaggagcccatcgtgggcctggtgctgtgggccagcagcaaggtggtggcgcccgggcagctggtccattttcagatcctgctggctgccggctcagctgtcaccttccgcctgcaggtcggcggggccaaccccgaggtgctccccgggccccgtttctcccacagcttcccccgcgtcggagaccacgtggtgagcgtgcggggcaaaaaccacgtgagctgggcccaggcgcaggtgcgcatcgtggtgctggaggccgtgagtgggctgcaggtgcccaactgctgcgagcctggcatcgccacgggcactgagaggaacttcacagcccgcgtgcagcgcggctctcgggtcgcctacgcctggtacttctcgctgcagaaggtccagggcgactcgctggtcatcctgtcgggccgcgacgtcacctacacgcccgtggccgcggggctgttggagatccaggtgcgcgccttcaacgccctgggcagtgagaaccgcacgctggtgctggaggttcaggacgccgtccagtatgtggccctgcagagcggcccctgcttcaccaaccgctcggcgcagtttgaggccgccaccagccccagcccccggcgtgtggcctaccactgggactttggggatgggtcgccagggcaggacacagatgagcccagggccgagcactcctacctgaggcctggggactaccgcgtgcaggtgaacgcctccaacctggtgagcttcttcgtggcgcaggccacggtgaccgtccaggtgctggcctgccgggagccggaggtggacgtggtcctgcccctgcaggtgctgatgcggcgatcacagcgcaactacttggaggcccacgttgacctgcgcgactgcgtcacctaccagactgagtaccgctgggaggtgtatcgcaccgccagctgccagcggccggggcgcccagcgcgtgtggccctgcccggcgtggacgtgagccggcctcggctggtgctgccgcggctggcgctgcctgtggggcactactgctttgtgtttgtcgtgtcatttggggacacgccactgacacagagcatccaggccaatgtgacggtggcccccgagcgcctggtgcccatcattgagggtggctcataccgcgtgtggtcagacacacgggacctggtgctggatgggagcgagtcctacgaccccaacctggaggacggcgaccagacgccgctcagtttccactgggcctgtgtggcttcgacacaggtcagtgcgtggcagggccgtcctccatgcccctcacccgtccacacccatgagcccagagaacacccagcttgccaccagggctggcccgtcctcagtgcctggtgggccccgtcccagcatggggagggggtctcccgcgctgtctcctgggccgggctctgctttaaaactggatggggctctcaggccacgtcgccccttgttctcggcctgcagagggaggctggcgggtgtgcgctgaactttgggccccgcgggagcagcacggtcaccattccacgggagcggctggcggctggcgtggagtacaccttcagcctgaccgtgtggaaggccggccgcaaggaggaggccaccaaccagacggtgggtgccgcccgcccctcggccacttgccttggacagcccagcctccctggtcatctactgttttccgtgttttagtgctggtggaggccgcacgctctcccctctctgtttctgatgcaaattctatgtaacacgacagcctgcttcagctttgcttccttccaaacctgccacagttccacgtacagtcttcaagccacatatgctctagtggcaaaagctacacagtcccctagcaataccaacagtgaggaagagccccttcccaccccagaggtagccactgtccccagcccatgtccctgttgctggatgtggtgggccggttctcaccctcacgctcccctctctggaccggccaggaggcttggtgaccctgagcccgtggtggctgctcctgctgctgtcaggcggggcctgctggtgccccagagtgggcgtctgttccccagtccctgctttcctcagctggcctgattgggggtcttcccagaggggtcgtctgaggggagggtgtgggagcaggttccatcccagctcagcctcctgacccaggccctggctaagggctgcaggagtctgtgagtcaggcctacgtggcagctgcggtcctcacacccacacatacgtctcttctcacacgcatccccccaggggccctcagtgagcattgcctgcctcctgctagggtccagctgggtccagtacaccagaacgcacactccagtgtcctctgccctgtgtatgcccttccgccgtccaagttggaaggtggcaaaccggatgagtatcctgggagggagtgagctcaccggcagtggccaggcccctgggaaacctggagtttgggagcagcatcctccatgggtcccccagtccttccagcaggccaaatagacctgtgttggaggtaaccccactcccacgccaggtgctgatccggagtggccgggtgcccattgtgtccttggagtgtgtgtcctgcaaggcacaggccgtgtacgaagtgagccgcagctcctacgtgtacttggagggccgctgcctcaattgcagcagcggctccaagcgaggggtgagtgttgagcggggtgtgggcgggctggggatgggtcccatggccgaggggacggggcctgcaggcagaagtggggctgacagggcagagggttgcgccccctcaccaccccttctgcctgcagcggtgggctgcacgtacgttcagcaacaagacgctggtgctggatgagaccaccacatccacgggcagtgcaggcatgcgactggtgctgcggcggggcgtgctgcgggacggcgagggatacaccttcacgctcacggtgctgggccgctctggcgaggaggagggctgcgcctccatccgcctgtcccccaaccgcccgccgctggggggctcttgccgcctcttcccactgggcgctgtgcacgccctcaccaccaaggtgcacttcgaatgcacgggtgagtgcaggcctgcgtggggggagcagcgggatcccccgactctgtgacgtcacggagccctcccgtgatgccgtggggaccgtccctcaggctggcatgacgcggaggatgctggcgccccgctggtgtacgccctgctgctgcggcgctgtcgccagggccactgcgaggagttctgtgtctacaagggcagcctctccagctacggagccgtgctgcccccgggtttcaggccacacttcgaggtgggcctggccgtggtggtgcaggaccagctgggagccgctgtggtcgccctcaacaggtgagccaggccgtgggagggcgcccccgagactgccacctgctcaccacccccctctgctcgtaggtctttggccatcaccctcccagagcccaacggcagcgcaacggggctcacagtctggctgcacgggctcaccgctagtgtgctcccagggctgctgcggcaggccgatccccagcacgtcatcgagtactcgttggccctggtcaccgtgctgaacgaggtgagtgcagcctgggaggggacgtcacatctgctgcatgcgtgcttgggaccaagacctgtacccctgcctggagctttgcagagggctcatcccgggccccagagataaatcccagtgaccctgaagcagcaccccgaccttccgctcccagcagccacacccaccgggccctctccggcgtctgctttccacaatgcagcccccgcccaggagggcccatgtgcttaccctgttttgcccatgaagaaacagctcagtgttgtgggtcagtgcccgcatcacacagcgtctagcacgtaactgcaccccgggagtcgtgggcatctgctggcctcctgccggcctcctgcgctgctgacagcttgctgtgccccctgcctgccccagtacgagcgggccctggacgtggcggcagagcccaagcacgagcggcagcaccgagcccagatacgcaagaacatcacggagactctggtgtccctgagggtccacactgtggatgacatccagcagatcgctgctgcgctggcccagtgcatggtaggatggccccacctgctcaccctgccccgcatgcctgccagggcactgggttcagccccccagggcagacgggcagcttggccgaggagctgagcctccagcctgggctccttcctgccatggcgttcctcggtctctgacctgcttcagtagcctcagccgttctgtcctgtgtgaacgcagggtgcctctcgggggacccagggtgtaaagaggggcccagatgtggggagggactaagaagatgctgctctgtgccctccactctcccctcccctcccctcccccttccctcccctagcccctcccctcctcccctcccctagcccttcccctcctcccctcccctagccctttcccttcttcccccccagcccttcccctcctcccctcccctttttctccactcccctctcctctctcccctcctcctccgctctcatgtgaagaggtgccttgtgtggtcggtgggctgcatcacgtggtccccaggtggaggccctgggtcatgcagagccacagaaaatgcttagtgaggaggctgtgggggtccagtcaagtgggctctccagctgcagggctgggggtgggagccaggtgaggacccgtgtagagaggagggcgtgtgcaaggagtggggccaggagcggggctggacactgctggctccacacaggggcccagcagggagctcgtatgccgctcgtgcctgaagcagacgctgcacaagctggaggccatgatgctcatcctgcaggcagagaccaccgcgggcaccgtgacgcccaccgccatcggagacagcatcctcaacatcacaggtgccgcggcccgtgccccatgccacccgcccgccccgtgcggccctttcctctgcctccctcctccccccaaccgcgtcgcctttgccccatcccatcttcgtccccctcccctccccccaattcccatcctcatccccctcccccaattcccattctcctccccctcccccttccctattaccatcccttttctccatctctctccccttttctccatttccccccccgtcctccccgtccttttgtccattcccctcatcttcctcatccccctcatcccccttcccctcccttatcccccttcccctccctttccccctgctcctcttcttctcccttctcttttctctacccttttccttcctttttcctccctctccccatcatccccctcatcttcgtcctcatccccatcaccttccccctcccccctccaccactctctctccagcttcccccttccttctgcctgcacctcgctctctgccccctcaggttccccctttctcccagcccccaccctccggctccccctttttgcctgcccccaccctccctctacctccctgtctctgcactgacctcacgcatgtctgcaggagacctcatccacctggccagctcggacgtgcgggcaccacagccctcagagctgggagccgagtcaccatctcggatggtggcgtcccaggcctacaacctgacctctgccctcatgcgcatcctcatgcgctcccgcgtgctcaacgaggagcccctgacgctggcgggcgaggagatcgtggcccagggcaagcgctcggacccgcggagcctgctgtgctatggcggcgccccagggcctggctgccacttctccatccccgaggctttcagcggggccctggccaacctcagtgacgtggtgcagctcatctttctggtggactccaatccctttccctttggctatatcagcaactacaccgtctccaccaaggtggcctcgatggcattccagacacaggccggcgcccagatccccatcgagcggctggcctcagagcgcgccatcaccgtgaaggtgcccaacaactcggactgggctgcccggggccaccgcagctccgccaactccgccaactccgttgtggtccagccccaggcctccgtcggtgctgtggtcaccctggacagcagcaaccctgcggccgggctgcatctgcagctcaactatacgctgctggacggtgcgtgcagcgggtggggcacacgcggccccctggccttgttcttggggggaaggcgtttctcgtagggcttccatgggtgtctctggtgaaatttgctttctgtttcatgggctgctgggggcctggccagagaggagctgggggccacggagaagcaggtgccagctctggtgcagaggctcctatggcctttcaggcccgtggcagagggtgggctcaggagggccatcgtgggtgtcccccgggtggttgagcttcccggcaggcgtgtgacctgcgcgttctgccccaggccactacctgtctgaggaacctgagccctacctggcagtctacctacactcggagccccggcccaatgagcacaactgctcggctagcaggaggatccgcccagagtcactccagggtgctgaccaccggccctacaccttcttcatttccccggggtgagctctgcgggccagcctggcagggcagggcagggcatcatgggtcagcattgcctgggttactggccccatggggacggcaggcagcgaggggactggaccgggtatgggctctgagactgcgacatccaacctggcggagcctgggctcacgtccgctaccccttccctgcccaggagcagagacccagcggggagttaccatctgaacctctccagccacttccgctggtcggcgctgcaggtgtccgtgggcctgtacacgtccctgtgccagtacttcagcgaggaggacatggtgtggcggacagaggggctgctgcccctggaggagacctcgccccgccaggccgtctgcctcacccgccacctcaccgccttcggcgccagcctcttcgtgcccccaagccatgtccgctttgtgtttcctgtgagtgaccctgtgctcctgggagcctctgcagagtcgaggagggcctgggtgggctcggctctatcctgagaaggcacagcttgcacgtgacctcctgggcccggcggctgtgtcctcacaggagccgacagcggatgtaaactacatcgtcatgctgacatgtgctgtgtgcctggtgacctacatggtcatggccgccatcctgcacaagctggaccagttggatgccagccggggccgcgccatccctttctgtgggcagcggggccgcttcaagtacgagatcctcgtcaagacaggctggggccggggctcaggtgaggggcgcagcggggtggcagggcctcccctgctctcactggctgtgctggttgcaccctctgggagtgagtctcgtcgcaggcgtcagaacaaggcagtttttgcagtgctgtgtgaagggctcgtgtgttcatcctgggaatgacctcgtgagcactcactgtccctgaggactaggacagctcctagctggaagtaggtgccagtcagtcagggtgggcagcccacgttctgcacagtagcgtggccccacaagtgacgtgagcatcgctaccactgtgggagactgtgcatccacccgcgatcctgactgcatagctcgtctctcagacggaggcgccagcaccctccccgtggctgtttcttcagtacctccattttcctttcattggaattgcccttctggcattccctttttgttttcgtttttctttttttagagacggagtctcactctgttgcccaggctggagtgcaatggcatgatcttggctcacagcaacttccagctcccgggtttaagccattccccttaagcgattctcctgagtagctgggagtacaggtgcacaccaccacacccagttaatttttcaccatgtcagccaggcgaactcctgacctcaggtgatccgcctgcctcggcctgccagagtgctgggatgacaggtgtgagccaccacacctggctgtgttcccattttttatctctgtgctgctttcctcttcattgcccagttctttcttttgattacctacttttaaaaactgtcggccgggcgcggtggctcacacctgtaatccgagcactttgggaggccaggcaggcaaatcacggggtcaggagatcgagaccatcctggctaacggtgaaaccctgtctctaataaaaagtacaaaaaaattagcccggcgtagtggcaggcgcctgtagtcccagctccttgggagactgaggcaggagaatggcgtgaacccgggaggcggagcttgcagtgagctgagattgcgccactgcactccagcctgggtgacacagcaagactccatctcaaaaaaaaaagaaaaaaaatactgtcacctgggtctgtcactgggagaggaggtgacacagcttcacgctttgcagtctgtgcatgaactgagggacgggtgtgtggtgcgggtcaccggttgtggcatgactgaggcgtggacaggtgtgcagtgcgggtcactggttgtggtgtggactgaggcgtgtgcagccatgtttgcatgtcacaagttacagttctttccatgtaacttaatcatgtccttgaggtcctgctgttaattggacaaattgcagtaaccgcagctccttgtgtatggcagagccgtgcaaagccgggactgcctgtgtggctccttgagtgcgcacaggccaaagctgagatgacttgcctgggatgccacacgtgttgggcagcagaccgagcctcccacccctccctcttgcctcccaggtaccacggcccacgtgggcatcatgctgtatggggtggacagccggagcggccaccggcacctggacggcgacagagccttccaccgcaacagcctggacatcttccggatcgccaccccgcacagcctgggtagcgtgtggaagatccgagtgtggcacgacaacaaaggtttgtgcggaccctgccaagctctgcccctctgcccccgcattggggcgccctgcgagcctgacctccctcctgcgcctctgcagggctcagccctgcctggttcctgcagcacgtcatcgtcagggacctgcagacggcacgcagcgccttcttcctggtcaatgactggctttcggtggagacggaggccaacgggggcctggtggagaaggaggtgctggccgcgagtaaggcctcgttccatgttcccactccgtgggaggttgggcagggtggtcctgccccgtggcctcctgcagtgcggccctccctgccttctaggcgacgcagcccttttgcgcttccggcgcctgctggtggctgagctgcagcgtggcttctttgacaagcacatctggctctccatatgggaccggccgcctcgtagccgtttcactcgcatccagagggccacctgctgcgttctcctcatctgcctcttcctgggcgccaacgccgtgtggtacggggctgttggcgactctgcctacaggtgggtgccgtaggggtcggggcagcctcttcctgcccagcccttcctgcccctcagcctcacctgtgtggcctcctctcctccacacagcacggggcatgtgtccaggctgagcccgctgagcgtcgacacagtcgctgttggcctggtgtccagcgtggttgtctatcccgtctacctggccatcctttttctcttccggatgtcccggagcaaggtgggctggggctggggacccgggagtactgggaatggagcctgggcctcggcaccatgcctagggccgccactttccagtgctgcagccagagggaaaggcgtccaccaaaggctgctcgggaagggtcaacacacttgagcagccttagctagactgaccagggagaaagagagaagactcagaagccagaatggtgaaagaacgagggcactttgctaagcagacgccacggacgactgcacagcagcacgccagataactcagaagaagcaagcacgcggctgtgcacgcttccgaaatgcactccagaagaaaatctcagtacatctataggaagtgaagaggctgagttagtcccttagaaacgtcccagtggccgggccgggtgtggtggctcacgcctgtaatcccaacacttcaggtggccgaggtgggcggatctgagtccaggagtttgagaccagcctgggcaacatagcaagaccccatctatataaaacattaaaaagggccaggcgcggtggctcacgcctgtaatcccagcactttgggaggccgaggcgggcagatcacttgaggtcaggagttcgagaccagcctggccaacacaatgaaaccccgactctactacaaatacaaaaacttagctgggcatggtggcgggcgcctgtagtcccagctactcgagaggctgaggcaggagaatggcatgaacccaggaggcggagcttgcagtgagccgagattgcgccactgcactccatcctgggcaacggagcaagactccatctccaaaaaaaaaaaaaaaaaatcccacaaagaaaagctcaggctcagagccttcacgatagaatttttctaagcagttaaggaagaattaacaccaatccttcacagactctttccaagaatacagcaggtgggaacgcttcccattcatacggaaacgggaggccgcaccccttaggaatgcacacgtggggtcctcaagaggttacatgcaaactaaccccagcagcacacagagaaggcgcataagccgcgaccaggaggggttgctcccgagtccgtggcaggaaccagaggccacatgtggctgctcgtatttaagttaattaaaatggaacgatggccgggtgtggtggctcacacctgtaatcccagcactttgggaggcggaggcgggcagatcacttgaggtcaggagttccaagaccagcctggccaacacagtgaaaccccgtctctactaaaaatacaaaaaattagctgggcatggtggcaggcacctgtaatcccagctactcaggaggctgagccaggacaatcgcctgaacgcgggaggtggaggttgcagtgagctgagattgcgccattgcactccagcctgggtgacagcgagactccatctaaaaaagaaaatatgaaatttaaaactctgttccttagctgcaccagtctgctgtcaagtgttcagtggcacacgtcgcgaggggctgccatcacggacggtgcagatgtcccatatatccagcattctaggacattctgtcagatggcaccgggctctgtcctgtctgctgaggaggtggcttctcatccctgtcctgagcaggtctgagctgccgcccgctgaccactgccctcgtcctgcaggtggctgggagcccgagccccacacctgccgggcagcaggtgctggacatcgacagctgcctggactcgtccgtgctggacagctccttcctcacgttctcaggcctccacgctgaggtgaggactctactgggggtcctgggctgggctgggggtcctgccgccttggcgcagcttggactcaagacactgtgcacctctcagcaggcctttgttggacagatgaagagtgacttgtttctggatgattctaagaggtgggttccctagagaaacctcgagccctggtgcaggtcactgtgtctggggtgccgggggtgtgcgggctgcgtgtccttgctgggtgtctgtggctccatgtggtcacaccacccgggagcaggtttgctcggaagcccagggtgtccgtgcgtgactggacgggggtgggctgtgtgtgtgacacatcccctggtaccttgctgacccgcgccacctgcagtctggtgtgctggccctccggcgagggaacgctcagttggccggacctgctcagtgacccgtccattgtgggtagcaatctgcggcagctggcacggggccaggcgggccatgggctgggcccagaggaggacggcttctccctggccagcccctactcgcctgccaaatccttctcagcatcaggtgagctggggtgagaggagggggctctgaagctcacccttgcagctgggcccaccctatgcctcctgtacctctagatgaagacctgatccagcaggtccttgccgagggggtcagcagcccagcccctacccaagacacccacatggaaacggacctgctcagcagcctgtgagtgtccggctctcgggggaggggggattgccagaggaggggccgggactcaggccaggcagccgtggttcccgcctggggtagggtggggtggggtgccagggcagggctgtggctgcaccacttcacttctctgaacctctgttgtctgtggaaagagcctcatgggatccccagggccccagaaccttccctctagggagggagcaggctcatggggctttgtaggagcagaaaggctcctgtgtgaggctggccggggccacgtttttatcttggtctcagagcagtgagaaattatgggcgggtttttaaataccccatttttggccgggcgcggtggctcacacgtgtaatcccagcactttgggaggccgaggtgggcagatgacctgaggtcagcagttcgagaccagcctggccaacatggcgaaaccccgtctctactaaaaatacaaaaaattagccgggcatgctggcaggcgcctgtagtcccagttactcgggagactgaggtaggagaatcgattgaacctggtaggtgaaggttgtagtgagccgagatcgcgccactgcactccagcctgggcaacaagagcgaaactccgtctcaaaaacaaaaaaattcctcaatttcttggttgttttgtaacttatcaacaaatggtcatatagaggttaccttgtatgtagtcacgcacatagtcacgcacatggcagccggcggcggagcgcacccacggcgtgttcccacgcgtgtgaccccgggctctgccatgccctcctatgctcaggtgtgctgaggtccacacggccctgccgttgcactgcagctgcctgcaggattcagtgcagtggcatgcagtgcaggtgcggtgccccggagccacaggccacaccacagggcctgcatgcacaggggctgcggtgtctgggtttgggtaactacgccctgtgacatttgcacagcaacagaattacctaatgacgcatttctcagaacacatccctggcactaagtggtgcgtgactgctgcttttgcatccacatctagtttgatttgtgtgttattcctttgagtgcttctcattgttaagcaaccaagaactaaagaggtatgaactgcccctggactcaaacaaaaaggaaaacttcctgatttacaaaaggcagataaccatcacatgagggcatctttatgaataaattgctggttggttttaaaaatacagagtatggggaaatccaggggtagtcactacatgctgaccagccccaggtatctccggcccaaagctctgtgaaatccagattcagtgcttccgcggggatttctgacggcagctcagactccgcatccacacagagcgcgtggccctcaccctcccggcttcctcaacccttggccgtcccttgctcggacagtgcttcgggctgaccaggtcggaggcttgggtttgtcctggacccctctgcgtccttcctcactgcagcctccagcgcgtcccgtggctcctttcccaacgcagagcacggccttccctgcgcctgagcctgcaccctccgtcctggcggcgcctctgccctggcattccctgccactccatgcctccctattggccattctccgtctctgccagcgagagcctgctccctgagtcagaccctgagtcatttgtgttgctataaaggaatagttgaggctgggttattttttatttttatttatttttttgagatggagtctctgttgcccagactggagtgcagtcgcatgatctcggctcactgcaaagtctgcctcccacgttcaagcagttatctgcctcagcctcccaagtagctaagattacaggcgcccgccgccacagccggctaattttttgtgtgtgtgttttagtagagaggaggtttcaccatcttagccaggctggtcttgaactcctgacctcgtgatccacccatctcagcctcccaaaatgctgagattacaggcgtgagccaccacgcctgaccaagttgaggctaggtcattttttaattttttgtaaagacagggtctcactgtctccaactcctgagctcaagtgatcctcctgcctcagcctcctgaagtgctgggattacaggcttgagacactgcgcccagccaagagtgtcttttatcctccgagagacagcaaaacaggaagcattcagtgcagtgtgaccctgggtcaggccgttctttcggtgatgggctgacgagggcgcaggtacgggagagcgtcctgagagcccgggactcggcgtctcgcagttggtctcgtcctccccctcaacgtgtcttcgctgcctctgtacctcttctctagcagctctgggaccgggcatatcagcatggtggcccgatgcagtggcacagcctcggtggtcactggctcctggagacacaagcagatctctggcctcagggagccctacacactgttgggatttgaaaggcattcatatgtttccttgtccagaagttaattttaggccataaacctgcatgggacagacacactggcgtctctagattgtagagatgcttgttggatggttgagacccaatcatagtttgcagggttgaaggggggctcattgcaccctgagagactgtgcactgctgtaagggcagctggtcaggctgtgggcgatgggtttatcagcagcaagcgggcgggagagggacgcaggcggacgcctgacttcggtgcctggagtggctcttggttccctggctcccagcaccactcccactctcgtttggggtagggtcttccggctttttgtcggggggaccctgtgacccaagaggctcaagaaactgcccgcccaggttaacatgggcttggctgcaactgcctcctggaggccgggatgaattcacagcctaccatgtccctcaggtccagcactcctggggagaagacagagacgctggcgctgcagaggctgggggagctggggccacccagcccaggcctgaactgggaacagccccaggcagcgaggctgtccaggacaggtgtgcttgcgtagccccgggatgcccctagcccctccctgtgagctgcctctcacaggtctgtctctgcttccccaggactggtggagggtctgcggaagcgcctgctgccggcctggtgtgcctccctggcccacgggctcagcctgctcctggtggctgtggctgtggctgtctcagggtgggtgggtgcgagcttccccccgggcgtgagtgttgcgtggctcctgtccagcagcgccagcttcctggcctcattcctcggctgggagccactgaaggtgagggggctgccaggggtaggctacaggcctccatcacgggggacccctctgaagccaccccctccccaggtcttgctggaagccctgtacttctcactggtggccaagcggctgcacccggatgaagatgacaccctggtagagagcccggctgtgacgcctgtgagcgcacgtgtgccccgcgtacggccaccccacggctttgcactcttcctggccaaggaagaagcccgcaaggtcaagaggctacatggcatgctgcgggtgagcctgggtgcggcctgtgcccctgccacctccgtctcttgtctcccacctcccacccatgcacgcaggacactcctgtccccctttcctcacctcagaaggcccttaggggttcaatgctctgcagcctttgcccggtctccctcctaccccacgccccccacttgctgccccagtccctgccagggcccagctccaatgcccactcctgcctggccctgaaggcccctaagcaccactgcagtggcctgtgtgtctgcccccaggtggggttccgggcagggtgtgtgctgccattaccctggccaggtagagtcttggggcgccccctgccagctcaccttcctgcagccacacctgccgcagccatggctccagccgttgccaaagccctgctgtcactgtgggctggggccaggctgaccacagggcccccccgtccaccagagcctcctggtgtacatgctttttctgctggtgaccctgctggccagctatggggatgcctcatgccatgggcacgcctaccgtctgcaaagcgccatcaagcaggagctgcacagccgggccttcctggccatcacgcggtacgggcatccggtgcactggtctgtcttctgggctttagttttgcctttagtccagccagaccctaggggacatgtggacatgtgtagatacctttgtggctgctagaactggaggtaggtgctgctggcatcagtaggcagaggggagggacacaggtccgtgtcttgcagtgcacaggacgggcccatgacagacaactgtctgccccagaacatccccaggataaggctgagaagcccaggtctagccgtggccagcagggcagtgggagccatgttccctgggtctctggtggccgctcactcgaggcgggcatggggcagtaggggctggagcgtgtgactgatgctgtggcaggtctgaggagctctggccatggatggcccacgtgctgctgccctacgtccacgggaaccagtccagcccagagctggggcccccacggctgcggcaggtgcggctgcaggaaggtgagctggcagggcgtgccccaagacttaaatcgttcctcttgttgagagagcagcctttagcggagctctggcatcagccctgctccctagctgtgtgacctttgccctcttaacaccgccgtttccttctctgtatatgagagatggtaacgttgtctaattgatggctgctgggagggttccctggggtggcgccgaaccagagctcaggcgagctggccagcaggaaacactcctgttgggttttgatgaggccctggccccggcctggggctctgtgtgtttcagcactctacccagaccctcccggccccagggtccacacgtgctcggccgcaggaggcttcagcaccagcgattacgacgttggctgggagagtcctcacaatggctcggggacgtgggcctattcagcgccggatctgctggggtgagcagagcgagggccccgggcgtctacgccaaggacaagggagtagttctccaggagtgccgcggcctcctgaccagcctggctccggggtgccggaagggctggggtgcggcacccacgccacccctctccggcagggcatggtcctggggctcctgtgccgtgtatgacagcgggggctacgtgcaggagctgggcctgagcctggaggagagccgcgaccggctgcgcttcctgcagctgcacaactggctggacaacaggtgggagctccctcccctgccctctccggggtggccgcagtcaccagccaggagcccaccctcactcctccggcccccgctggcctaggcggcttccacagcccctcagccacgcctgcactgcgcggtccccgcagctcccgccctgccacccgctcctactgacccgcaccctctgcgcaggagccgcgctgtgttcctggagctcacgcgctacagcccggccgtggggctgcacgccgccgtcacgctgcgcctcgagttcccggcggccggccgcgccctggccgccctcagcgtccgcccctttgcgctgcgccgcctcagcgcgggcctctcgctgcctctgctcacctcggtacgcccgtccccggccagaccccgcgcctcccaccggcagcgtcccgccccctcgcggggccccgccccggcagcgtctcacccctcgcagcgccccgccccctcgcagcgtcccgccccctcgcagggccccgccccggcagcgtcccgccccctcgtagggccccgccccggcagcgtcccgccccctcgcagggccccgccccggcagcgtccctcccgccctcctgaccgcgccccccacaggtgtgcctgctgctgttcgccgtgcacttcgccgtggccgaggcccgtacttggcacagggaagggcgctggcgcgtgctgcggctcggagcctgggcgcggtggctgctggtggcgctgacggcggccacggcactggtacgcctcgcccagctgggtgccgctgaccgccagtggacccgtttcgtgcgcggccgcccgcgccgcttcactagcttcgaccaggtggcgcagctgagctccgcagcccgtggcctggcggcctcgctgctcttcctgcttttggtcaaggtgagggctgggccggtgggcgcggggctgggcgcacaccccagggctgcaagcagacagatttctcgtccgcaggctgcccagcagctacgcttcgtgcgccagtggtccgtctttggcaagacattatgccgagctctgccagagctcctgggggtcaccttgggcctggtggtgctcggggtagcctacgcccagctggccatcctggtaggtgactgcgcggccggggagggcgtcttagctcagctcagctcagctgtacgccctcactggtgtcgccttccccgcagctcgtgtcttcctgtgtggactccctctggagcgtggcccaggccctgttggtgctgtgccctgggactgggctctctaccctgtgtcctgccgagtcctggcacctgtcacccctgctgtgtgtggggctctgggcactgcggctgtggggcgccctacggctgggggctgttattctccgctggcgctaccacgccttgcgtggagagctgtaccggccggcctgggagccccaggactacgagatggtggagttgttcctgcgcaggctgcgcctctggatgggcctcagcaaggtcaaggaggtgggtacggcccagtgggggggagagggacacgccctgggctctgcccagggtgcagccggactgactgagcccctgtgccgcccccagttccgccacaaagtccgctttgaagggatggagccgctgccctctcgctcctccaggggctccaaggtatccccggatgtgcccccacccagcgctggctccgatgcctcgcacccctccacctcctccagccagctggatgggctgagcgtgagcctgggccggctggggacaaggtgtgagcctgagccctcccgcctccaagccgtgttcgaggccctgctcacccagtttgaccgactcaaccaggccacagaggacgtctaccagctggagcagcagctgcacagcctgcaaggccgcaggagcagccgggcgcccgccggatcttcccgtggcccatccccgggcctgcggccagcactgcccagccgccttgcccgggccagtcggggtgtggacctggccactggccccagcaggacaccccttcgggccaagaacaaggtccaccccagcagcacttagtcctccttcctggcgggggtgggccgtggagtcggagtggacaccgctcagtattactttctgccgctgtcaaggccgagggccaggcagaatggctgcacgtaggttccccagagagcaggcaggggcatctgtctgtctgtgggcttcagcactttaaagaggctgtgtggccaaccaggacccagggtcccctccccagctcccttgggaaggacacagcagtattggacggtttctagcctctgagatgctaatttatttccccgagtcctcaggtacagcgggctgtgcccggccccaccccctgggcagatgtcccccactgctaaggctgctggcttcagggagggttagcctgcaccgccgccaccctgcccctaagttattacctctccagttcctaccgtactccctgcaccgtctcactgtgtgtctcgtgtcagtaatttatatggtgttaaaatgtgtatatttttgtatgtcactattttcactagggctgaggggcctgcgcccagagctggcctcccccaacacctgctgcgcttggtaggtgtggtggcgttatggcagcccggctgctgcttggatgcgagcttggccttgggccggtgctgggggcacagctgtctgccaggcactctcatcaccccagaggccttgtcatcctcccttgccccaggccaggtagcaagagagcagcgcccaggcctgctggcatcaggtctgggcaagtagcaggactaggcatgtcagaggaccccagggtggttagaggaaaagactcctcctgggggctggctcccagggtggaggaaggtgactgtgtgtgtgtgtgtgtgcgcgcgcgcacgcgcgagtgtgctgtatggcccaggcagcctcaaggccctcggagctggctgtgcctgcttctgtgtaccacttctgtgggcatggccgcttctagagcctcgacacccccccaacccccgcaccaagcagacaaagtcaataaaagagctgtctgactgc

SEQ ID NO: 15708 - DNA, 70336 bp, Homo sapiens
gtttgtttgcggaagtaggaggaagtagaagtgctgagtaagccgaggtgagtgacctcgcgggtgggcggggcctgggggtccgttccccaacttcctcggcgctccggactcccaagtctccgccggaccctcctttggatattcctcgtgtctccgattctgaggcatgtcctccattaacccttatgtgactccctgagtgcccccaccttccatcttttcatccccctgcgtccccaattcccatcccgagaccgcccgtgtctcatctcgaacttgtggaccccagggaccccagcttcgaccctgagtttctcccctgaaccccagtctcctccgtgtgtctccctcagtatccctaacttcccgagtcaatccatctcttctctttccccgaccctcagtgcctctttaggccccattggccgtcctaattttccttcctgtgctcctctaagtgctcacttgattccccacttcacgtccgtctccacctttcgtggtgcctctactcatttctcactccctgcttctcctgcctttcctccctgctttttttccttgcctttcctctctcgcgtgcctccagacctgcccccgacatgctccctccttcccctcagcctggccaccccagagtctcccacccctaatcctgtgtccacctcctgctcccacagatgacttggaagctggtgacagggagcatgtgaccagggtgatcatgggactgggtcggggcaagcctgtgggtgtgggacagggagggcacagggcaaggggacctgtggccgtatttttaatgggctacccacatgaccccaacgaatacctccccctagcttctgggtctttccctcacctgcctcttacccgcccaacaggatgtcaggcaggttcggtttggcaacgttgaggctgcacccttgggctgaatgcattgtttttgaatgcattgtttttgttagagtttctgcctggagtttggaacctgttttctgtccaagtctcagtttcctcatctgtgacaggggaactgtacctcctgccctcgtaagtctgccatgaggttcaaaatttgaatgagaaaatgtagaaggtaaagctttataaccagtatggccctgtacaaatacatgattttactgttgggtcataggcagaattgaaaggagtggaaagggaaagggctagaatgagaagacaaggagagaaggatgagcaggaggtcccttgtctttcagtgtatcatttggcagtgtttgttcatcacctcttgtgagtcaggctcttctgtatatgttctcttcaccattcattcagtcatcgtttatctaacaaatatttacggactgtctgatgttctaggctacccttggtgtggccaatgatattctcacttcacatgagaaaaagagggcgcatgagttgcttgaggtcacaccgatgaggttgaagctggaatctgacaccagagcctgtgtgattgtcctgatgtgtaaggtttgctactgtttaggacacttcttgttccttccgtggattactttcttgttacatgagagactccccaaaagggagtttccctcttactcagcagaatgacatcactaagagatacagaaaggagaaatttaaatactctgtgtgtgtgtgtgtgtgtgtgtgtgtgtgtgtgtgtgtgtgtctgcagacatctattgggtgtgtgtgctgggggaagtaggtaggcaaggagtaaggggccgtagtgaagagtgtgttacaaacttcactttgtagagggtggctccctgggagaatatgttctgtgtctttcacagtggattttgatagggtcatgtcttaaatgcctcttctcgttttcggatggtgatctcatccagtcttatttctttaagtgccgtctctattctgtcagcccacaaatttatatccccagtccagtccagacctttccctggaatgacatactcaaatctagttgcttactcagcacctcaaacttaggcttttcaaacttgaagtatttatttattgatttatttattttttgagacagagtctcactctgtcacccaggctggaatgcaatggcacgatctcggctcactgcaacctccacctcctgattctcctgcctcagcctcccaagtagctgggattacaagcatgcgccatcatgcccaactaatttttgtatttttgtagaggcggggtttcaccgtgttggccaggctggtctcgaactcctgatctcaagtgatccacctgccttggcctcccaaagtggtgggattacaggtgtgagccaccgcgccaggcctcaaacttaagagtttagaattgagctcctgttagttctgccctccatccctgaccccactcttcaccaaaacatgtccctcccactctctttctcatcttaggacataggagtattgttcattcagttgctcaggtcaaagctgtgagattatctatgatgcctctctgtttcttaccccacacccagccagagtgatcttgttaaaatgttgtttctttgcagtggcctctcctctcatggcacatgcctggccccctgttgcctctctgatgtcactggcttccttgcttttcctggaactcgctaaacatgttccagccccatggcctttgcacacgctctctttgcctagctattcatatgactttcatctctctccatcaggtatttatttaagatcaatttcttggtgaagacttctctcctcacccaatctaaaatttcactctccacctcagcacttcctatccccattctctggtttttctcctcagtagttaattgtcatctaaaacctttgtaaatatttacctgtttatcttctttattattagtagctctgtctaaaatataagttccaggatgtcagggattttgtggggttttttttggttggttggttgttttggttttgagacagggtctcactctgttgcccaggctggagcgcagtggtgcgatctcagctcactgcagcctccgcctcctgggtttgagtgattctcccacctcagtctcccaggaagctggaattacaggtgcacgccaccacacccagctaatttttgtattttttggtagagatggggtttcactatgttggccaggccggtcttgaactcttgacctcaagtgatccacccgcctcggcctcccaaagttctgggattactggtgtgagccaccgcgcccggccttgttttgttttaagacagggtctcactgtcgctcaggctggattgcagtggcacaatcacagctcactgcagcctcgacctgctagacttaagcaatccccccacctcagccaccttagtagctgggacttacaggcatgagagataccatgcctgggtaattgttaagtttttgtagaggtgaggtctcactatattacccaggctggtctcaaagtcctgagcttaagtgatcctccttccttggcctcctaaagtgctgggattacaggagtgaactgccgtgcctgaccagtctgttttgtttacgattgtatcctcagcggttagaacaatgcctgccacaatccatctcagtaaatatttgtggagtgagtcataacatgggccacactgtaccgtgccaccagcccaaagatctcttaaagtcacccctgtctcatgtgcttgggagctccagtgacagtttcggggcagtttgcttccagctgtggtccagccaagcggagtgaatgaaagagatgctttttccttttgtgaaaggacgttttgctctggctcacgtgagcagcagtgcattttgagacgagggccttggcttttggaatctaagagcctgttgagcaagcctcgctcagccaccttctttcagctttctcctgaaggcagtttgaggattaagagcctgatgctctggattccacctaattgggttcagatcctggcaaactgtgtaacctgtgccccagtttcctgtgtaatgtggagagacctggaccttttcttacaggtgtttggagggttaaatgtggcaattcggccgggcgcagtggctcatgcctgtaaccccagcactttgggaggtggaggtgggcggatcaccggaggtcaggagttcaagaccagcctggttaacatggtgaaaccccgtttctactaaaaatacaaaaaattagccgagtgtggtggtgcgcgcctgtaatcccagctagtctggagactgaggcaggagaatcgcttgaacccgggaggcagaggttgcagtgagccaagatcacgccattgcactccagcttgggcaacaagagtgaaactctgtctcaaaaaaaaaaaaaaaaaaaaagtggcaatttacccgaaactgtggtgaagcgtctggcgccctgtgggtgctgggcagcagtgggtgctgatggggtgtgaggggatgggatcaagccctttcccactaacttaggaaagaggttggaatgagctggggtcagagggaacatttgcggggacattttgccgggaggctgccttggaggttcagaggctcagatgacccctgtgttcattcagtgttttctcacccacagattgagcacctgctgtgtggccagccctttgcctagtgctgttcaagagtcagaggacataggcaggcaatcccccaccacaacctgccaccccatttcctctcttggggccttgatttctccacatgccaaacagggagaatgattgcaccttccttgtttctttttttttttttttgagacagtctcactttgtcatccaagctttagtgcagtggcatgatctcggctcactgcagcctctgcctctcgggttcaaagattctcctgcttcagcctcccaagtagctgtgattataggcacccaccatcacgccaggctaattttttttgtagttttagtagagatggggtttttttctcacacgttggccaggctggtcttgaacttctgacctcaggtgatctgcccatctcaccctcccaaagtgctgggattacaggtgtgagccaccgcgcccggctgcgccttccctgtttctttgtgagcttggaggtggatcacaagtgtgaaaccctttgccaaccgtgaggcatggtggccttgtgagaggacggaggccggtgtgtggtggcatgctcccgtgctgtgtggcacagacggagctacaggaaggaagttggggcagcttggcactctgagtggaccctgagtttccagcctgctctgtcttgactgggtgggaggagggtgctcaggagggtgtcactgctgccaggttctgctgccaggaccatccaacagttgttccaatcatgggacatcctgtcgtcagcagctggggctcgtgaggcctgatttccacctcgggcagttctgtgtgtgctcctggaatcccccacgtggccaagcctgtgaggtctgcttcctggcctgctgcctgtgggttcctgtcacgcacctctcgggcagctgtccggctcctctgctctcggcttagtcaagaaggaagcagaaggcttggagtctttcctgcttggactaggagtgagctcagcctaagtgccctgactatatataaagctgaactttccagaccgaagcctggggatggatcagtccgatcacttagggccgctcctgaaggagtgcaggtgctagatacaggttctcccggtggaggagcgaaccccttgtgggccgttagctactggtgggatttgagcatggtatttccctatccgttgtggagaggagcatggcagctcagagtgggtgggaacagtgtgtggtccctgttatcaccttcaagggaataaagtgtgtctgggggcttcagaggtgctggccccatgggcttataggtggttcattcattcattctcattcattcattcaccaaacttattaaacacccactgtgagtcaggaacatcatgccaggtgcttagggaaacaaatcaaagcgggttgggtgagcagcccaagccaacagatgcacccccattctcacatggtgtgtgttcctgtgggctgggccctgggtggtgtggggtgctggggagaagaggaaggcacaccaggctgcagggcggaggtgcgggtatgaattttcagaggagatggcacctgagctgtatcttcatggataagaagagatttgttcatttgtcctttgtggagcacacattcaggttaagaaagtggggaggatgggctacgctgatggagcgtatgtgtggtatccccaagtgcactgagacacgagtttgacgtgttctgggaagatcgatggtgcggcgtggctggagtagaggtgagggatgagttggaggggtgagttgggccagctctcatggatgctggagtctgggctttccctgggaggtcatggggcgccactggccagggtcagcagggagacctgcagctggatttgcatcgtacagtgggcatggaggggtgtcaggctgggttgggaaccgtgcaggctggaagggcactctggtgctctgagcattcagagggggcagctgggccttgaaggatgagcaggggctccagcaggaactggagagcgcattccagggaggacgcaagtgcaggcccctttcactacagaaaagcagttttcacacagaccttccaaaggggaggagaggggactgcctgggcctggcagctgcggcaggtagcagcaatcagagggcagggaccgctcctcccgtgcctgagacctgcccagggtccttcagggaattcgtagctgaggaggaaccagatttttgggactgagttctccctcaccacccgctctgagccaccctcttggtcccttgtcctctactgcacttcttccggggcttggctcctcgtcatgagaggagcttccctgggcatggcgaggggcgtgactgacatagcagccctggacaagtggctccaggtgacctgtgttcacgttgatcacagcactaaccacggcccctcctctcagcaccttcccctctcgagccgtccagtcccagtgaaaatgctcaccgttcatgggtgggctgagcaagcccctgatctctgccttcctccgtgttctgatctgcttcatctgctgtgaaggcctctcgccatttcccccgctggcaaactcctgttcttcctggaaagttcagctaaaaagtcatcccctttaggggtccttccctcaggggaccgtgcacttggcgagacagggactggtcttgggtctctctgttgactgttttatgaacccaggtagtcacttccagggaactcatcagagatgctaccattggctccaatctccctctgttcccactcgaggttttttgtttcttcgtttgtttttctttctttctttttttttgagacagagtctcgctctcgcccaggctggagtgcagtgacatgatctcggctcactgcaagctccgcctcccgggttcacgccattctcctgcctcagcctcccgaatagctgggactacaggcacccgccaccacgcccagctaattttttttgtatttttagtagagacggggtttcaccatgttagccaggatggtctcaatctcctgatttcgtgatccgcccgccttaacctcccaaagtgctgggattacaggcgtgagccactgcgcccagcccgtttgtttttgttttttggtggacatcaactttaatttgccctttgttttgttttgtttttgaggcagggtcttgctctgtctcccaggctggagtgcagtagtgcaatcttggctcactgcagtctcgacctcaagaggatcaagcaatcctcttgccttagcctcccgagtagctgggaccacaggcgcacaccaccatgcccagctaattttattttatattttgtagagacagggttttgccatgttccccaggctggtctcaaattcctgggctcaagcaatccgtctgcctcagcctcccaaaatgctggaattacaggcacgagccactgtgcccggccttaatttgccctttgaacatgtacaattcagggcctctctgggcctcagtttcttgatctctgagatgggaagatgggataataatacttgttcctcccgtccttcagctcctccaggggaccctcacaccagcacactctctgtcagtcttccctcaatgaacccagcaggcaagcttggttttgacagaggatgggtgagcagagataaggaaaacggccagaaatatctggcttccctcagcaggggcaccaaaattggtacctggaaattgcctggcttggacaggcagaattgtcactgtcaacccccaccaccaaaggtcttgggtctttgtctttctgcttgtggtgtttgagagagctgcttgacacagccgaggtgcggtctgtgtcaggtgacctgggcatcctgggggtgcagggagaagcccaggtaaggaggaggaggggccggtcatcagtggggaaaagtgattgtctaccccacgggaaggtcaagggtaggacgctgtgagaagccagggggagagatgaagtgaggcatgatgcggggggccctcatccaccatccccctcttgcagctgtgctgggaagagcctaggctccagggtccaaggtggcagggacagaaggaagcacgtgtgagcactttctccctgctggcccgccttcctggttggcaatgccgtgagtgttccaggatgtggccccgtggctgtcatttcctttcttccacctagtgataacaatggccactgtttgtgtgcccacagtcggcctgtgtcccagacaccttccctccattgcgtcatctcgtcctcctgcctaccctgaaggctggatgccagccaagcctgtcgtttctgtggccatgctgtcgtgggtgtgtggggggcatcccctagccccaggctctggtggggggtacacaggctgggccattgacgaaggggtgtgtggaatctttctttgatttcactgcacccctggtgactttctccctcaatctgaggctcatgggtgctggatgctcttgactctctgcccttcctgggcgcacccctccgcgtccctgtgggcccgtcctcggggtagcctctctgcgctcttccaggccaggcctgagtcccacaggtccccatcttcccggctgcagcccccagaggctcagcctatactgctacttcctttgaaaactataatcgctttacatagcatctggaaaatagggaaaaggaaaaaacaaaagcccataaacccagcaccctcatctactcaatggcatgttttctgtcagtctatcttggtttgttttctatcaggctttgttttttctatgcataatatttactcagttaaatttttgttttgacaaactttctgtgagccaagcttgtggacggagatgaaaagacgagcagctgcctttgagaaactcagactctgggccagcccatctgggtgccagctttcactgctccacccactagctgggtgaccctgggcccgtgactttacccctctgttctttggtgttctcatatgtaaaatgaggataataatagtaaccagttcatagagtggttgtcagacagaatgattaatgtacgtaaagctttcaggatggtgccagcaagatgcacaggagtgtttggtaggaggatgacgaagcttaccgtctggcaggaggggcagttgtaacatgctgggctgtgatagtacagatgtgtttaaagtgagggagagcccagagcaaggagagagaacctggcatctggtgatggtgtatcaagaacattttaggccagacacggtgactcacacctgtaatcccagcactttgagaggctgaggcaggcagatcgcttgaacccgggcgttcgagaccagcctgagcaacgtggtaagaccctgtctttataatttttttttttttttttctgagacggagtcttcactctgtcacctaggctggagtgcggtggtgctatcttggctcactgcaacctccacctcccgggctcaagtgattctcctgcctcagtctcccaagtagctgggattataggtgcccaccaccatgcccagctaatttttttatatttttagtagagacggagtttcaccatgttggtcaggctggtctcaaattcctgacctcaagtgatctgccctcctcagcctcccagagtgctgggattacgggcatgagccaccatgcctggcctctataaaaattgtttggaagaaattacctaggcctggtgatacacacctgtagtcctagctactcaggaggctgaggtggaaggaggtagaggctgcagtgagccatgattgagccactgtactccagcctgggcaacagagccagaccctgtttcaaaacaacaacaacaaaaacatttttaaggaggaggctgagaaccacgagaaccaagcttggatttgaagaaggatcagggctttctcagacagaaaaggagaggaagaacattccagatagacatcattgagagatggcactgagccttgtaatgggacactgcgaacttttcttcagttgttatgatctttttttttttttttttgagacggagtttcgctcttgttgcccaggctggagtgcaatggcgccatctcagctcaccgcaacctccgcctcccaggttcaagcgattcttctgcctcagcctcccaagtagctgggattacaggcatgcgccaccatgcctggctaattttttgtatttttagtagagacggggtttctccatgttggtcaggctggtctcaaactcctgacctcaggtgatccgcccgagtcggcctcccaaagtgctgggattacaggcgtgaaccaccgtgccttgttggtataattattagtattgatcttttttccttttcatgtgcctcttagtgggccccttgcttttgtcttccttctgtccccagggttgatcctgtgctcagcacataggccagggaagaatgtggctgtgacccagtgtccactcagatgtcctctctcccccagggcacccatactctgtccttagtgtcttttgtctggtgacatcttggcacagaggcagagggcggcctccgtctgattggcgcctggctttggtgacagtaccttaggaaggcagtgtattttctgggaacctaggaaataacaaggtatctaattccatcatcaacactggggacaatttccatggcagaaactatgactctgaatatgcagcgtaaagttaccacccagacactgctgctcctgagtctcgaatggcatcttctgcaggggctcccccacctgcccctgcagaaggtgcagttcgttcatttccaaggagcttgcttttgtgtgctgtctctcggagctctttgggaaacctgtggtagcaggaaacaaaggatttagaccaatgccgatgatccccttgctccgatagagtgtgacatgatgctggtcaccttttggtatctaggaggggggacattgattttgtttgcggaagtgaaatgatccatgctggcctctttttttttttttttttttgagacagagtcaccctatcgcccaggctggagtgcagtggcgcgatctcagctcactgcaacctctgcctcccgggttcaagtgattctcctgcctcagcttcccgggcagctgggactacaggcgcctgccaccacatctggctaatttttgtatttttagtagaggcagggtttcgccatgttggccaggctggtctcgaatttctgacctcaaatgatccgcccgcctcagcctctcgaagtgctgggattacatgcctgagccactgtgtctggtccatactagcctctttgagtgctgaaaggttatctctgtaacttatttagtgagaaccctccatttgcccagggcattactgcctataatgtatgttcacatgtgctatctcctttggtcaataccacacactacaggtgaggaaactgagtctctgctgggacactgggtcaggaagcaggcagttaaggtcacctgtgcacagtggcagcacagggggacagccttctaggtagccagcctggcctgagggttctgtcacttttacctcccactcagtgttgtttctctttctttcccctccttttaagatccctccaggcccaggatctggggacaacgctggtggggagtgatctgggtgtctgtgcaggaaaccgctgcactgggtgagatgggcatgggagactgtgcctggctgaccagagacctcgttttcttccagacagagggggaagacggtggggcctccccacctgccccgcagaagatgcagttctttggccgcctggtcaataccttcagtggcgtcaccaacttgttctctaacccattccgggtgaaggaggtggctgtggccgactacacctcgagtgaccgagttcgggaggaagggcagctgattctgttccagaacactcccaaccgcacctgggactgcgtcctggtcaaccccaggaactcacagagtggattccggtgggtgatgctcagcgggaacatacttctctcctttcactcccccacgtctcggattggaggtcttattggccgagaagcagtttctttgagtctctgtctgaggggtctggagaggggtgggagagaggggagactgtactcttggaccagagggaagggcttccgagactccacacttctggcccatcagtgtcccagcacgaggctgaggatggaagcctgggttgtttctggcctggaggctcgacctatatggacaaagggaagaaggaaggacagggagactgagagtgtccacatcagataaggcccatggggagaacctttagccctggctctttatttttggttttggtttttgttttttgagacagtcttgctctgttgcccaggctggagtgcagtggcgcaatctcggctcactgcaacctctgcctcccaggttcaagcgattctcctgcctcagcctcctgagtagctgggattacaggcacccaccaccacgcccagctgatttttgtatttttagcagagacggggtttcatcatattggccaggctggtctcaaactcctgacctcaggtgatctgcccaccttggcctcccaaagtgctgggattgcaggcgtgagccactgcacctggcctagccctggctctttaagggcatggccgttctcataggggctgcccagggtttgcttaggaaggctggacagagctgttgcctcttggggcatgctgggactcccctgggcctgaagagaaggctcaaaagccaggacaggcctgagggaaccgggccaacggcagagctggttgggaaaaggggagaagcagccaaggttccaaatgcaggccccagcagtgcttggcagactggcatctagttgggctcagacagatatccctgtttccgctcacctatccatctggctgtcctgtcagccatccattcaacatgcaccaagcacctccagtgtctccagagtcctgggcttcgggccagtcctggctggcctgtgagatgacaaacatgtcctgtgtctttaaggaacgtacagtctggtgggggaggtccggtgcaaacaggcgtcatagcaccccttgaggagtgctgtgacagagggagagcctaggaaacagtgtggatcacaaggaggtgattgagagctactctgcgtctggaagagtgaggaggagcctgtgtggcagaacaaaatggataaggtcgttccagccgtgcagaagtgtggaggtgtgagcctgcaggcaggtggctctggttggatcccaggtgcatgcagggctttggtgagagtgaggctgaaggaagcagctggggactcattctgactaaagaggcatggcaggaggggtctctgaaagtgtcaggctgggggccaggggctgccaccaacagaagagcaaggcaggtatcagggccccatccaatcaggtgagaattcagagcctggctccacaaggaacctgaggcagaggcacccacagcaggtgcttgggctaaatgcagctcagtggccagtgcaggcaccagttttaatacagtggggccattccagattctgagtgcagatggggctgagcagaccgccttccagctggactcgatcaggactgaccctggacggggcaggcttgcacttgtagcttcagagctccactgcaggcacagctgaccagggcagcgggtccactccttggagagctggacagccccacttttgaggtacacggccctggggataccactaatctccacgtaccaataatcaccaagttctgtcagttgtaaaatcccttgacaggattccagatttgtctcagccagcttaagccccagtgtgggcagacctccatcccaggaggatttagtcctttgtcagcagcttcttagctacacgtaagctattctgtggtactttatagtttacaggattttttgttttcttttttttttttttttgagacagagtctcgctctgtcacccaggctggagtacagtgacgcgatctcggcttactgcaagctccgcctcccaggttcacgccattctcctgcctcagcctcccaagtagctgggactacaggcacccgccaccacgcctggctaatattttgtatttttagtagagatggggtttcaccatgttagccaggatggtctcaatctcctgacctcgtgatccgcctgcctcggcctcccaaagtgctgggattacaattttacaggatgtttttaagtatgttgggttagcacattctctgccaatccgtggaggtgggcaaggaaggcagtattccattttatgcatgagaaaatagccttgggatgataagtgattcatcccacttatacacaggaagcagtgaagaaacagaatcagtgtcttctggttcccaattcatttctctgtgctgctgtgttgtttccatgtatgtatgtatgtatttatttttttgagacgttaagtcttgctctgttgcccaggctggagtgcagtggcatgatcttggcttacagcaacctctgcctcctgggttcaagctattcttctgcctcagcctcccgagtagctgagactacaggtgcgtgccaccatacctggctaatttttgtgttttttagtagagacagggtttcactgtgttagccaggatggtcttgaactcctgacctcgtgatctgcctgccttggcctcccaaagtgctgggattacaggcatgagtcaccatgcccggctttgtttgtcttatttctaaattttattgatttatttattttcacagtcatagctctggagtcttttttatcttctcccctctaacctgctcccacccgaacctttccatttcagcagatagcatcattgcaacgggctgtgccagatccagccatcacatccacctttccagccaaagggagggtggaagggcaggatgcagaaggtcaatctccccctcctcagggacatttcatggaagttgcacgcattggccagaacccggtcacatggccacagctaactgcaaaggatgctgggaagtgttgcctgtgttgcagacagccacgtgccagtcgaaaatcagaggttctttctccctccgtcttgctgctggctcgcttctccagaccacagtcattgtgcacgtgtctcctgctgctccggctgtggcctgcactcctctcatcctcttccaagctgctgtcacagcgctgtttccagagggcaaatctgattggtcactcccctgctttactccccaagggcttcctgttttcttttatttttatttttattttcattttttgagatggagtctcgctctgtcgctcaggctggagtgcagtggcacaatgtcagctcactgcaagatctgcctcctgggttcatgccattctcctgcctcagcctcccaagtagctgggactacaggcgcccgccaccacgcccagttaattttttttgtatttttagtagagacggggtttcaccatctactcttagccaggatggtctcgatctcctgaccttgtgatctgcccgcctcagcctcccaaagtgctgggattacaggagtgagccaccgcgcccggccagcttcctgttttcttaacacatcaggtgcttaatgacttaaaagggcccagtgtgatcaagtttctgcctctgtgttctcagctcatgccgccttgtgctcctggcctttgcccaggctcttgctgtggcctggaatactcccctttctttgcctgccttccttcctcttgccctcccctgacctgcaggctggattaggagtttctgctgggcatcccatggcacccgtccctgcactggggatcctgctttcctggtaggccacagaccttgtgaggggagggactgtgtctgttgggttcatgacagtgtgcccagcccccagcaggtgcctggcgtagatcaggtttgtggaacaaatgaatgtgatatattaatttagctttagagtattcattgagggctgctgtgtgccaggccctctgtgccacctgggtggagggtggaggactgttgcattgagggcagttgaaggagtgagctgggaagtgggaggtggaggatggggactgggatgcagggtttgaggttatcaggggtcccagaagcagtaatgccaaggcctaggctgtgacctggagtgagggctgcgatggggtggggtggggtcgaggctgtggaggagggtcatcagggcactgctggagccctggggttctccagggccgggggtggtcattgcagtgttctcccagctcctctcaacaccctgcggtctgtggagagcaggcctggtgcactggacttgcctctggccagggctgagtttctgccttctaaacgatcttcctcctgtgttgccctagaggcctctggactgtcctgagtacttgacgcgtgttagagtgagcatgggctgctagccttccgctccaggtggaggagtttctgttgttcttttgctgctgttgctgcagtgagctgccaggctgagcttctggatggacctgggggatggaattaggagcttctgaattcttgggttgtataacctaaggccggagagtcccacagcactgctgctgggcggagagactggaccctgctgatacagacagcgacagcagcaggagcatctgcagtttcccagcaggtcctgcatgcctgggcttggcactagtctaagtagtaactcatgttatcctcacgacagtcccacgaggtggggtcattactgacctcctattacagatgaggaaacagaggcttgcagaatttgagatcacacagctggtcagcgtagcgattattcagaccctgtcacctggctccagaacccactcgtttacctttcttacatcagggctgctttgtagtgtggcgagctgagtggagctccacccgcctgggctgatcctggcccttcctgcctgacctatggtgcgggggccctggctctccccgtgtgagcccccaggggtcacttgtaatatgcctgtgtacactatgatagcatagatacttctgttcctggtacagattaatcatttacggctggcattgacttgtaacagatgacatttgatgaaatcaaccagcctctcactggtatctcagcagaaacagggctgtacctcccaggcatcctgggaaggatgatagaagtgtgtgatctgtgcttccctaccgggagctgacttttgaggctctctggactgggactttgccataaaactgcttatcagaaacctcagataagtggagtgccctgtgtcctggccacgtactctggggccagctcctccatccattcagtcctcccacatcccatcttcaccaagcagagtggaaagcggcaggtctctgcgagaaaaggaggctctgtacccagccttcagtgagataactttagagtggggccttgtattccctacacaggccttgtccccgacacggcctctttgcccttgcttctccttctgctaagaatgctccttcccaactccttggctggacacacggctcctgctctgtgggcctgtcctgttcccactcagagcctcagcaccccccatgtggccaagacacagcccctcttgccttaggttgccgtgggtctgtttccacatctgtttcccctccagactgcagggctcctgagggacagggcctggggccaagtctcctctgcgttcctgatgcctggtggtgtgccacgctctccgtgggtgcacggtaaatatctgccgagtggctagatgtatccatggttgctgaaggccaagtgtgttgaccagagggcgtgggaaaggctccactggggtggctggggtagagatagaccttaaggggtccagaagactccaccagctggagggaaaggccctacagagacaaggtactaggaaaggcccagaggacagaggaggggccctgtggggagcctgtgggcaggaagggcctgtgctgggctttgaaactggggactcaggtactgctctagcgtgagggtccttggcattttttttggtccaggaccccctgaggtccctggggaatgagaacaggctcacacagccactttcaagaggtttgcaggtcccctgaggcttagccacagacccctcccaccccagcagagacacagcagaggcttctgagtggaggccaggtggcttcagcctggggttctagaagggagggaagagacacacccccgtgtgtcctccagagcctcagccttctccctgaatctcccctttgcctcctcactgtaacccacacctggctctccttgaaggacccgcttgccccgcagcctcctgagagttttctctcccagtccctctcccactgggcctggaggtggggtagggtcctccttgcccccagccttgaatcttctgtcaccctacaataccacttgctgtcaccccggtgataggtatctacgagcctggggtgctcccccacatcctcaaagatgtgagcccctgactcagcgttgcctctggttcctgaccctccacattcacatgaccacgcgctggcctttatcatcgccagtgacagcagctctcccgtaaatacaagtttcaagcaccccactttccagtctctgccttctgtctttccagttcattccctctagtcctccacccacacagtgcttttccccattgacagggaattgctcctggccgcttttcccagccccatcccgttcatgtgccttgctttgtacccagcatggactccatggcctgtcattgtcactccttcacctatacttcctgcctccttgcttctctctctcttcgtcatcctggcatcaccaccccagaactgcttggtttcagttctccaccatggctaggggaacatacctttttgctgactgctctcactttctttttttttttttttcttttttttttttttgacacagagtctcgctctgttgcccaggctggagtgcagtggcacactctcagctcactgcaacctccacctccggggttcaagcagttctctctgcctcagcctcctgagtagctggtattataggcacccgccaccacacccggctaatttttgtattttttttagtacagacagggttttgccatggtggccaggctggtcttgaactcctgacctcaggtgatatgcctgccttggcctcccaaagtgctgggattacaggcatgaaccaccctgcccggccctattgctctcactttgaaatcacgacatgagccacagtgagcctatgatgtggtttgacgtctttctgcatttctctgttcacccctctcccagaaggcatgcctccttccctcccctcagcctgcagccccttcccctccacgcttactctcagctgatagccctgctgctgtctcgctgagaaaatagaaatagccagaggagaattccctctaccccatgcacacacctctgtccccgcctactccacattccctgttgtcagcaccgatgtgtttagctgagggtggtccccccattcaaggccatcatctcctgtcatctacttcttgacaccatttgaacaattatctcccctctttcctacataacactttccccttttctactatatattttttgctatggattgaaagtatccccccgaaatcatatgttgaagccccaatccctcgtgtgatggtattaggaggtagagcactatgggggtgattaggtcatgaggatggagccctcatgaatgggattagtgcccttagacgaagaggcaagaaagagatgatctgtctctgccatgtgagggcacaacgagaagatagccatctgcaaaccaggaagtgaaccctcatcaggaactctatcagccagcaccttgatcatagacttcctagcctctagaactgtgagaaataaaggttgtttaagcctcccagtctgtagttttctgttataatgtcctgacctaagttattttccatcgctatacaatgggttatttttttctttaaaaaaaaattatttcttgactctactttttcctccagagactgcttatattccactgtcttcattcttctcctcctgttttctctctttaaacttttcaaaaatagcaaaatataacacatatagagaaaatgatatacagctcagtgatttatcacaaacacctgtgtaaccaccactcgaatctagagataggacattacagcaccccagaagccctccttttgtcccctcttcccaaagaagggtaaccaataacttgccttttatgataaaggctttttttttttgagatggagtctcactgtgttgcccaggttggagtgcggtggcgcaatctctgcttactgcaagctctgcctcctgggttcacgccattctcctgcctcagcctcctgagtagctgggactacaggtgcccgccaccacgcccggctaattttttgtattttagtagagacgaggtttcaccgtgttagccaggatggtcttgatctcctgacctcgtgatccacctgcctcagcctcccaaagtgctgggattacaggcgtgagccaccgcccccggccaagataaaggcttttctatctggcttctttgttagcattttgttggcgagattgatacgttttgtgtgcagctgtctgtcattttcattgcaatagaattccattgtctactatatcacagttactcattctactactgatgaaaatttgggttatttctagtttttttggtgcatacatgcatacatttctggtagacatacctagaagtgaactggctgcattatgggccataacttgtcttcaacgttagtaaataataccgcccgtctgttttccaagcagcagtaaatggcactttctgttacttcatatcttctgttacttggtactgtcaggttttaaaattttagtcattctgtcgggtgtctagtagtatgttattgtggttttattttgcatttgcctgattgcaaatgaagttgagcactttttgatacagtgattaaccatttggatatcctcttcagtgaagtatcagctcaattctcttgactatttaaaaaataaagttgtttatctttttcttacagagttttaggaggagttttttggtacatgtgcagtccaaatacacaccttttgtcagtgatacgtgttcagctgcacacacggtgttttgcctttttattcttttaatggtatctattgataaacatgagttcttagttttaatgaagtcaaatttgttcatcttctttacggtgtactttttgtgtcttgtttaaggaagtccttctctatcttaaagctttgagaagcattccttctttctcctattttctaaaaattgttgaagatctccttccttccttccttccttccttccttccttcctttcatctatctctctctcacccaggccaaacttcagtggcatgatcatggctcactgcagcctcaacttcccaggctcaagtgatcctcctgcctcagcctcctgagtagccaggactacaggcacgcaccaccatacctggctaattttaaaaattttttgtagagacacggtctcatcaagttacccaggctggtcttgaactcctgggctcaaacaatcctcccacctcagcctcccaaagtgctgggattacaggcatgagtcacatgtctagcctgtattctttctttcttaaatgtttggaagaattcatgggtaaaaccatgtgaccctggagtttatttgtgggaagcttttaaaacatggattcgatttctttaacaaatataggactatgagattttcatctcatgtcggtttgggtatgttgtgttttcaaggaatttttctattttatcgaagttgtcaaatttgtctgcaggtccccttatttcctttttaatgtatggaggatctgaagggatggtactttgtgttgtctctatttcttgtttggttttgctagtgatttgccaatttaaaaaatctttccaaagaaccaacttttggctttgtttattttttgaaaacctgagtagctgggattacaggcgcccaccaccacacccggctaatttttttatttttagtagaggtggggtttcaccatattggccaggctggtctcgaactcctgacctcagatgatccacccgcctcggcctcccaaagtgctgggattacaagtgtgagccagtgtgcctggcaagccgctttttaaatggcaccaatcccattcatgagggcagagccctgatgatcgaattacctcctaatggccccatttcttaatactatcacactgagaattaagttttaacataagaattttaggaagacacaaacattcagaccatggaacatatataaaacagttgtcctaccaactaacagaatacacattcttttcaagaacacctatataaaaattatagacactgacctatgctggccataaagcaaatatgaacaaatttcagatacctgaagagatttagactatgttctccaactacagtgcaattaagctagaaatcaatagcaaaaatgtaactataaatgagcccgtatgtttgaattttaagcaagatatatgtaaattatctatggttcaaaaaagaagtcacagtgaaatttagaaaatatcttgacgtggcgggttgcagtggctcacgcctgtaatcccagcactgtgggaggccaaggcgggtggatcacctgaggtaaggagtttgagaccagcctggccaacatggtgaaaccctgtctctactaaaaatacaaaacattagccaggcgtggtggtgggcacctgtggtcacagctacttgggaggctgaagcgggagaatcacttgaacccgggaggcagaggttgcagtgagccgagattgcaccactgcactccagcctgggcaacatgagtgaaacttcatctcaaaaaaaaaaaaaaaagaaaagaaaaagaaaatatcttgacccaatgatgatgcaaatactacgtatcaaacttgtaggatgaacttccacttctggccatgacagaggagcctgtatcagactagccttcctatttatatatttatttttgagatggggtgtcgctctgttgcccaggctggagtgcggtggtgcaatctcagctcactgcaacctccacctcctgagttcaagtaattctcctgtcccagccttccaagtagctggaattacaggcgcccaccaccacacccagctagttttttatatttttagtagagacggggtttcaccatgttggccaggctggtctcgacacctgacctcaggtgatccacctgcccctgcctcccaaagtgccgggattacaggtgtgagccactgcgcctggccgtgagtgacctttttaatgtgttgttgaatttgatttgctggtattttgttgagaagttttgcatcaatatccatcagggatactggcctgtagttttctttttttatatgtctttgtctggttttggtgtcagggcaatactggcctcatagaatgagtttggaagttttctctcctctgtttttcataatagtttgagtagggttggtattagtttttgtttaaatgtttggtaaaattaagcagtgaagccactgggtcccaggcttttctttgctgggagacttttcattacagctttgatctcattacttgttattggtctatttaggttttggatttcttcacggttccatcttggtaggttgtgtatgcctaggaatttatccatttcttctagggttttcaatttattggcatataattgttcacagtaacctctaataatcctttgagtttctgtgatattggttgtaatatctcttttgtcatttctgatttttttgtttgggttttctctctttttttgttagtctagttaaagatttattgattttgtttatcttttcaaaaaactttattttgttgatcttttgtattgttttgtttcaatttcatttatttctgctatgatctttattatttcttttcttctactaattttgggtttggtttgctcttttctagttctttaagagacatcattagattattttgaagtttttctacttacttgatgtaggtgcttataggtacaactttcctcttagtacttctttccctgtatctcacaggttttgatatgttgtgtttccattatcatttgtttcaggatgtttttaaatttccttcttaatttcttcattgaccattcaagagcatattatttcatttccatgtgttcgtatggtgtgcaaaataccttgtttttgatttgtagttttatttcattgtgatcacagaagatacttgatatgatttcaaatttaaaaagtaatttggctgggagaagtggctcatgcttgtaatcccagcgctttgggaggccgaggcaggcagatcacgaggtcaggagatcgagaccatcctggctaacacagtgaaaccccgtctctactaaaaatacaaaaaattagccaggcatggtggcaggtgcctgtagtcccagctactcaggaggctgaggcaggagaatggtgtgaacccgggaggcagagctggtagtgagccgagatcgcgccgctgcactccagcctgggtgacagagcaagactctgtctcaaaaaaaaaataataacaataataataatttaagacttgttttgtggcctaccatatggtctatccttgagaatgatccatatgctgaggagaagaatgtgtattctgcagccgttggatgaaatgttctgtaaatatctaataggttcatctgatctatactgcagactaaggctggtgtttctttgttgattttctgtctggatgaactgtctaatgctgaaagtggagtattgaagtctccagctattattgtattgaggtctatctctctctttagctctaagaatacttcctttatatatctgggtgttccagtgttgagtgcatatgtatttaaaattgttacattatcttgctgaattgacccttttatataatgaccttctttgtctctttttatagtttttgtcttgaagtctgttttgcctcatagaatagcatagctattcctgctcttatttggtttccatttgcatggaatatctttctccatccctttagtttcagtctatgtgtgtctttacaggtaaagtgtgtttcatgtaggcaacagatcactgggtcttgtttttctatccgttctgccactctgtgtcttttgattggagagtttagtccatttatgttcaatgttattactgacaagtaaggacttactcctgccactttattaattattttcttgttgctttgtgatcttctttctttccttcctgttctccttttagtgaaggtgattttctctggtggtatgttttaatttcttgctttttatttttttgtgtgtatctgctgtatgttttttgatttgaggttaacatgaggcttgcaaataatatcttataacctaatattttaaactgatgacaccttaacactgattgcataaacagacaaacaagcaaagagaaaactaataaaaactctacattttaactttgtccccccactttttaacttattgtactgtttatgtctgaaaagttgtagttattatttttgattggttcctcttttagtctttctactcaagatatgagtggtctacatatgacagtgttataatattctatatgtttctgtgtacttgctattaccattaagttctgtactttcaagtgatttcttattgctcattaatgtccttttctttcagattgaaaaactccctttagcatttagcagtatgtgaactgcatttttcaagtccagaatttctgcttgattcttttttttttttttgagatggagtcttgctctgtcgcccaggctggagtgcagtggcgcgatttccgctcactgcaagctctgcctcccgggttcacaccattcttctgcctcagcctcccgagtagctgggattacaggcgcccgccaccacgcctggctaattttttgtatttttagtagagatgggatttcaccatgttagccaggatagtctcgatctcctgaccttgtgatccgcctgccttggccttccgaagtgctgggattacaggcgtgagccactgtgcccagcctgcttgattcttttaaattatttcaatctctttgctaagtttatctgttaggattctgaattccttctctgtgttagcttgaatttcactgagttccctcaaaacagctattttgaattctctgtctgaaaggtcacatatctctgtctctccagaattggccactggtaccttaattagttcatttggtgaggtcatgttttcctgtatggtcttgatgcttgtgatgttcgtcagtgtctgggcattgaagttaggtatttattgtagtctttgcagtctgggcttgtttgtatctgttcttcttaggaagactttccaggtaataaaagggacttgggtattgtgatctaagtttttggtcactgcagccatatctgcattagggggcaccccaagcctactaatactatggctcttgcagactcgtaaaggtaccacttgggtggtcttggataagatctggaagaattctctggattaccaggcagaggctcttgttctcttcccttactttctcccctaaaagtggagtctctctctctgtgctgggccgcctggagctaggagaggggtgacacaggcacctctgtggccactatcactaggactatgctggctcagacctgaagccagcacagcactgggtctcacccaaggcctacagtctccactgcctggctactgcctacgtttgcttaaggcactagggctctacagtcagcaggtggtgaagccagtgagattatgtccttcccttcaaggcagcaagttccccctacccccatcctgggaaggtccttagatgccatctgggaggcagggcctgcagtcagaaaccttagtaatctccccagtgctctattctattacagcctggctgatacccaagccataaggcaaagtccttcctgctcttccctcccctttccacaagcagagaagtctctctccatggccaccactgccccagccctgtggcagtgctgccaggccactgccaacgttcattcagggcctaagggctcttgaagcaactgaacactgccaggcctgggactctccctttagggtagtgggctcccctctgacccagggcaggtccagaactgccaccccacagccaacacttagaatctgggaccccaagagccctcttggtgctctgccacactgtagctgagctggtacctaggctgatttttgctttttatgaaggtacttttttgtgtgtatagttcaatttggttttcctccagggaggacaattggtggaggtttctatttgggcatcttttttttttttttttgagacggagttttgctctttcacccaggctggagtgcagtggcgcgatctcggctcactgcaacctctgcctcctgggttcaagcgattctccagcctcagcctccccagtagctgggattacaggtgcctgccaccatgcttggctactttttttttcaattaaaaagtaaactttaatgtcgaaaatgcaaacttggggaaggcagaaagatcacacacaaggctgtcgcttcacacttggaaggttgcacggcggccaggagaggcactcctcacttcccagacagggcgggggccgggcagaggcgctcctcacttgccagacggggcggcggccacatgcctggctaatttttgtatttttagtagggacggggattctccgtgttggccaggctggtctcaaactcctgacttcaggtgatccacgcacctcggcctcccaaagtgctgggattacaggcatgagccaccgcgcccagccctatttggccatcttgctttgcctccaccttcatttgataacagaacacccccatgtaaccaccaccacaatcaagatataagacatttctgttattctccaaatttccttcaccctcctttatagtccatggcacccaccccatccctgggcaacacctatgtgcttcctttttttttttccccgcaggaggacgtcttcctatacctatgtgcattccatcactgctgcttttaatcatatagcgtgtagtcttatgagtctgactttttcacttagcataatgcttttgcaatttgtgattgagcgttttcatatgattctgttttttctgtctcttagcttggaagttatacactttttagtagtaactgttgggagatcgttctccaagagtctctctcatatttccatacatcctgctagcagagacattgactacctgtttttgtctgtttagtgttgctataaaggaatacctaagtctgagtattatacatagaaaagaggttttatttgtctcatggctcctcaggccatacaagaaacatggtgccagcatcttaccagtgtcacatggcaagaaaggaagtgaggaagagaaaataagttgttaactggttgttaaaaagtgccaggcacgggccaggcacagtggctcgtgcctgtaatcccagcactttgggtggccaaggcgagtggatcacctgaggtcgggagttttgagaccagcctgaccaacatggagaaaccctgtctctactaaaaaaaatacaaaaaaattagctgggcatggtggtgcatgcctgtaatcctagctactcgggaggctgaggcaggagaatttcttgaatccaggaggtggaggttgcagtgagccaagatcacctgggcgacaagagcgaaactctgtctcaaagaaaaaaaaagtgccaggctctttttaacaaccagttcttacaggaactaatagagtgaaaactcactcacccccaccccacagggagggcattcattcatgagggatccacccctatgacccaaacacctcccattagccccccacctccaacattggaatcaaaatttaacatgaggtttggggggcagaaatccaaattatagcactacctttgttccaggctaccttcaaaggatgtttatacagcaaacagccttggaaaatagagttagggtctccttgtagagcacagggtaagtttgcttacttttcagcataatcaagattgtgtcttcttctggagcaaaactttgacaacaacaagcggggcaaagtctgaaaccttttgcacatcttgacagaaccttagagattacgagatttatctctgccttactcaaggtccattagtatcttccagaacaataagttggtcttagaatcctttagctatgtattcccttccaggcttcgatgctgtgtgctgttgttttatttagtttttattttaaacccaacaagacgctataccatcaatacttatttagatccccccacatatttaacttgccatggtgcttcattctttcatgcctctttaagcatccatctaggatcgtgttcattccacatgaagagaaagcttttggcccagcacgatggctcacacctgtaatcccagcactttgggaagcctaggcgggaggatcgcttgagcccaggatttccagaccagcctgggctacgtggcaaaaccctgtctctactgaaaatacaaaaaattagccaggtgtggtggttcacgtccctgctactcgggaggctgaggtgggaggattacttaaacctgggaggttgaggctgcagtgagcgttgattgcaccactgcactccagcgtgggtgacaggagtgagaccatgtctccaaaaaaaaaaaagaaggaaagaaaaagcttttgtatttcctttcgtgtaggtctgctaatgacaaagtctctgggttttttgtttgactagagaaatgttttaattttaaccttattcttgaaggttttgtttttgttttcattttgttttgtgtgctaagtacagaattctcattggcatttatttatttagagacagagtcttgctctgtggcccaggctagagtacagtggcacgatctccgcctcccaggttcaagcgattctcctccctcaacctcctgagtagctggggctacaggcatgcaccactacacctgactaatttttgtatttttagtagagacggggtttcaccgtgttgcccaggctgatctcaaactcctgagctcaagtgatttgcctgccttggcctcccaaagtgctgggattataggcatgagccgccgtgcctggccagcatttattttcttttcagctctttaaggaagtcattccattatctctgggttccattgttgagaagccagctgtcattctaatggttgccctttgaagataacttttttccctctgctattttaaatatttcctccttgtattttattttcaacaggtgtaatgtggcacatatatcagcaattgttatgttacatacaatacatattgtgcaacatatgtatcattatcagttattgctgtgtaacaaactactccagaacacagtggcttataaaaggaatcatttatttagtccttaaatctgcaatttgagcagagctcagtgggaaagcctcagctttactttatatggcaccatataaggtaactcgcaactggcaagttggtgctggctgttggctggtagttcattcagggctcagggcccaggaccaagagtcgtcaccatggcttgcttcagcctccttgaggcatgatggctgggtcccaagagaagagaaatagaaacttccagtctcttaaggcattggtctggaagctgggacggcatcacttttgccatattctgttggtaacgcagttacatcgccagattaaagggtaaagagatacaaattcccactgctcagtgcaaggaatatcagtgattttagggggccctgttttaaaacccctacaaggtgctaagcgtggatttctggggctttcttgttttttgtttttttctatgtgtttttttttttttttttggtggtggggtcagggagggcttatagggtatgttaaatcagcagaataattttatttatttatttggagatggagtttcactcttttgcctaagctggagtgaagtagcgtgatcagagatggagtttcactcttttgcctaagctggagtgaagtagcgtgatctcggctcactgcaacctccgccccgctggttcaagcaattcccctgccttagcctcccaagtagctgggattataggcacccaccgccacgcccggctaatttttatatttttagtagacatggggtttcgccatggctagtctggaattcctgacctcaggtgatccacccaccttggcctcccaaagtggtgggattacaggtatgagccactgtgcctgacctataatgttttttaaaaatcagttttggaaagtttgcagacattaacttttcaaatgtagcttccatttgattctttttctactctgcctctgatcctccacttatgtatgtatgctagatcttttattagatagtctgtgtctcttatgtactctactatattttgtattcttctgtctctccatgctttattctgtttactctttcctgattatattttttaattttgtaatttccatttgatgcttttttgatcattcaaaactcttcaccaaaattctaaatttccttttttaacctctcgaatgttatcacagttactttaaagtctattttggataacttaaatatttacagtcccctcacagatatgtttcttttgtatattgtttctgttggttttctttcatgtcttatctccacatatgcctggtgagttttgattatgtgttggtcattgtatttgcaagtatgctcgtagaaataatctggaatggccgggcgcagtggctcatgcctgtaatcccagcactttgggaggctgaggcaggtggatcacgagatcaggagatcaagaccatcctggctaacatggtgaaaccccatctctactaaaaatacaaaaaattagctgagcatggtggcacgttcctgtaatccctgctactcgggaggctgaggcaggagaatcacttgaaccaggaggcagaggttgcagtgagccgagatcacgccactgcactccagcctgggtgacagagcgagactccgtctcaaaaaaaaaaaaaaaaaaaaaaaaagaaataatctagagcctagtttgatgtttccttacaaagaatgaatttatttttgcttctcccattgcaactaggataacctcagtctagtttctggaactgaaatcacttgaggctgaactgtggtctctgtgagagcgtgtctgtgtatggctcacccttattcctaggctacgtagttctttaggaccctaacccaaagtaagagatgttcatcagggctctcctcttggcagacgcctgggctccagtccctgtgtcctgagccccatgaggctgttactggtgctgctcgtctgcccatcctctccagtaacagccacctgaacactgcaattcctgggtttccatcattccttccagcctggtgagtcatcagtgtcttttgaggtatccagtgcctgccagcagatgttttttaataatttgtccagcatttctggctgtcctcagtaggtggtctgtttcacattccctagtctgctgttaatggaaagtggaagttctgagagagaatcatcgttcccgtcagcattcaaatgcctgattacactttccccattcgctatcctttcctttatttgctcctcaccacagcaaaactcctcaaaaatatctatctttgcaatcttcagattctcacattgtgtccttaaacccactttaatcaggccttggttccctccattccactaaaagtaatgttgtcaaggtcgtgcatgcctccgtgatgctaattccagtgatgagttttcagttgtcattctctgacatatcggcaacacttgatgtggagtaccctgatgttgagaggctggtgagatgaaggaaaaacccagccaagggcaatgaggaatggcttccttccgcctcctccttccctatctttgttgtggtttttgttgtttctgtaacactgattacgttatagtttatttaatgtacttccttattctatgtttttactttagtcattttgttgatctcctccataataacataggctcgggccaagcacagtggctcacgcctgtaatcccagcactttgggagaccaagatgggtggatcacttgaggtgaggagttcgagaccagcctggccaacatggcgaaaccctgtgcctactaaaaatacaaaaattagctgggcgtggtagcaagcgcctgtaatcccagctactagggaggctgaagcaggagaattgcaggagaatcacttgaacccagggggcagaggttgcagtgagctgagatcgcgccactgcactccagcctgggtaacagagtgagactctgtctcaaaaaaaaaaaaaaaaaaaaggcttcaggagggcagagcattttatgcaattgttcattaattgacccctccatttggcacagatcacatgcccagtagttaactgttaatcaacgcactctctgtggaacaacaggctggtcccgttgagccaacactctctgggcactgccttcactagactctggctggctgctgcgcttgtagaggtatgcaagacaaaaccttttggtatgttaaaagccctggtcagaactttaagtaaccatcactgacatataatggttatggttttgaaagtgcttttatagtggtttttcatctgtcctcacagcacctctgggaggtaggtaggacaggtacagttagtctcatgtttcaaatggggctcagagagggaaaaggatttcccaagatcacacagcaccttagtagcaaaacttggactcaacctcaacacttaaaaatgaacaaagctggccgggcgcagtggctcatgcctgtaatcctagcactttgggaggcccaggcaggcaggtcacctgaggccaggagtttaagatcagcctggccaacatgacaaaactctgtctcttctaaaaatacaaaaaattagccgggcatggtggcgggtgcctgtaatcccagctactcaggaggctgaggcaggagaatcacttgaacctgggagatggaggctgcagtgagccgagatcgtgccattgtactccagcctgggcaacaagaatgaaactccatctcaaaaaaaaaaaaaagaaaagaaaagaaaaagaaaagtttccctttttttaaatatctcattttaatgactgcataatagtttattacatagttataccataatttatataatattttgttgctgtacatttaggttaaacaatacttacttagttcctactatgaagaggggccaagtactcgaggctggagctctcacatgtggcaatgaaattagaaagtggatatggcagggctgtggtaaaataaaatataaaaataataaatgatattaccaaagaaaaggaaagtttttcaaaataaaggaaaatctagacaagcatagtggctcacacctgtaatcccagtacttttggaggctgaggcaggaggaacacttgaggccaggagttcaagaccagcctgggcaacatagcaagaccccctgtcaacaaaaataaaaaaaaattaggccaggcacagtggctcacggtggctagtgcctgaaatcctagcactttgagaggctgaggggggtggattgcctgagctcaggagttcgagaccagcctgggcaacatggccaaaccccatctctactaaaaacacaaaaaattagccaggtgtggcagcacacgcctttaatcccagctactctggagactgaggtaggagaattgcttgaacccgggaggtgaaggtcgcagtgaggtgagattacaacactgcactccagcctgggtgacaaaatgagactctatctcaaaaaaaaaaaaaattagctgggcatggtggtgcatgcctgtaatcccagctactcaggaactaaggtaggaggatcccttcagcccaggaattcgaagatgcagtgagtcatgatcacaccaccgcaccccagcctgggttacagagcaagaccttgtctctaaaaaacaaagaaagtctaacctaaacgccattatgtcatttacatgtgtataggggtgtgtgtgtgtgtgtgtgtgtgtgtgtgtgtgtgtgtgtgtgtgtgtgtttgcttgggaggggagtcgggctggagctggccaggccgcagcctggggaccttctgattccagcagggatgtgggccgagggtcccgccttactcatttcgggtcttgctcctctgtcctggctctacagactcttccagctggagttggaggctgacgccctagtgaatttccatcagtattcttcccagctgctacccttctatgagagctcccctcaggtcctgcacactgaggtcctgcagcacctgaccgacctcatccgtaaccaccccagctggtcagtggcccacctggctgtggagctagggatccgcgagtgcttccatcacagccgtatcatcaggtgagcaagggaacaagaccatttggacaacgtgtgtgtacctgcttgtgtgggcagtgggggccgcaggcctcggttcccctccatagtttgacttaaaaaggagcagggcctggcatggtcgctcactaacgcagtcccagcactttgggaggctgaggagggaggatcacttgagactaggagttcaagaccagcctggcaaaatagcaagaccttgtctctacgaaaaaattaaaaaattagcatgtgtctatactcctagctacttgggatgctgaggcaggaggattgcttgagcccaggagttagagtttacagtgagctatgattgcaccactgcacttcagcctgggtgacagaatgagaccttgtctctaggaaaaaaaaaaaaaaaaaaaaaaaggtgctgcgttgctaccagattaaaatgtaagaaggacaatgtaatgtttccagagtccggagtgctcaccaggtgccaggtctgtgggagctgatttctacccaccatgaaattgaattttcccaacccccacaaggtatcgtcattttattttactttattttattttattttattttattttattttattttattttatgttacgttatgttattttattttgagacggagtcttattctgtcacccaggctggagtgcagtggcgcgatcttggctcactgcaccctctgcctcctgggttcaggtgattctcctgcctcagcctccggaatagctgggattacagtaatgtgccatcatgcccgggtaattttttttttttttttttttttttttgagacggagtctcgctctgtcgcccaggctggagtgcagtggcgcgatctcggctcactgcaagctccgcctcccgggttcacgccattctcctgcctcagcctcccgcgtagctgggactacaggcgcccgccaccacgcccggctaatttttttgtgttttttagtagagacggggtttcaccatgttggccaggttggtctcgaactcctaacctcaggtgatctgccctccttggcctcccaaagtgccgggattacaggcgtgagccaccatgcccggcccaggtatcatcattctagagagagctaacaggacttgtgcaggtcactcagccagagagggtgaaagaggggcttggatccttggtgtctgcccaggctgctcttctggaagctgaaggcctccttttgtgaatccattcagccagcagatggagcagctgttgcccctggtgagggcactgtccccacccttgcacagggcaccagttggccatcttgtgcagaggtagccacacctcctctgagtctctatcctagatagctcagttaagctcccaggcccagaactcaaaacctcactgctggccgggcgtggtggctcacacctgtaatcccagcactttgtgaggccgaggcgggtgtatcacttgaggtcaggagtttgagaccagcctggccaacgtggtgaaaccccgtctctactaaaaatacaaaaaattagcaaggcgtggtggcgcacgcctgtaatcccagctactcgggaggctgaggcaggagaattgcttgaacccagaggcggaggttgcagtgagccgagattgtgtcactgcattacagcctgggcaacaagagtgaaactccacctcaaaaaaacaaaacaaaacaaaaaccctcactgcactttagtttccaggcgtgcttttggacagcactgtctcatctcaccatcactctgtccatttcctggggcaggcacagcagcttgtgtcgataaggatattgacgcccagaaaggttaagtgaattgcctgaggctagtgagatatccgtgttctgtgaccctttcctgtgccaccaccctgcccacttcctgctggtgtggccctggggcccatctcttgtacgagtgagcaaactgaacagaaacctgatacaggtcacatcagatataattacattcaaatcagcccaactagctgagtggcgggaatgctcttgagctcaaataaaccagaaagtccgagtttccgagtgcacttccctgcatgtgcacttaggtccccctgccaccttgtaccacacctgctcacctctgctcaccctggccctctcctgcagctgtgccaattgcgcggagaacgaggagggctgcacacccctgcacctggcctgccgcaagggtgatggggagatcctggtggagctggtgcagtactgccacactcagatggatgtcaccgactacaagggagagaccgtcttccattatgctgtccagggtgacaattctcaggtgctgcaggtgagcagggggaggggcagggtgactggtactgatacctcccggtgtccacggttccctttgggcccctaggctcaggtgtcactctcaggcctctcactgtcccccattggtccttgaggcctgagctccttcatggagggtgcagacccctccctggctcttccctcccagcccttttccaggagccacgtcctcagtctctttgcttgataaacctggggacggcctccaacccagcaaaataaaccccaaaaaaggcccagctccagtcagttagttcagttccacttttcctgagcacaaactgtgagccagatgcctgcctggaggggctcgtgggccagcgggacctgggcttaaccttttgcaagcttgtccaatctgtggccctgcaggctgcatgcagcccaggacggctttgaatgtggcccaacacaaattcacaaactttcttaaaacattatgagatccatgcatggaccttttttttagatcagctgttgttagcgttcatgtattttatgtgtgacccaagacaattcttctgatgtggcccagggaggccaaaatattggacaaccctattttacaggaattcaaaccaagcaaaccaaactgtctccagttcctgtaggcatttgtgccagaggccctcctgttaacgtttttgattacctgggcaaaagatgtgattttttaattgtgggcaagcagatggggtgatactattaaatagctatttcatatattagattgaacagaaaaggcaggatgttggattatgttttattgtctagaattagaaaattcttctaaagatcatgttctctctgccttggcatcagaatgcaactacgttataccagaaaatgtggattcctttttttttttttttttttttttttttgagacagagtttccctatgtctcccaggctagagtgcagtggtgcgatctcggctcactgcaacctccacctcctgggttgaagtgatgctcgtgcctcagcttcctgagtagctgggattacaggcatgtgccaccatgcctgggtagtttccgtatttttagtagggatggggttttgccatgttgcccaggctggtctccaactcctggccttaagtgatccacctgcctcagcctcccaaaatgccgggattacaggtgtgagccactgtgcccggcccagaaaatgtggattcatatcttatgcttcttgctctcagggaagggaattctccacccactgttgaactccactttcaccgagaatcctctgcgcacccagcatggtgccgcgcagaccctgcctccatgcgggggtgtgcacacccgcttctcgatagtcatgcacgactgcagctgtcctttatccggtgctgattggtgcctgaccttgaactgagtgttgtatgtgttccagttaattcttagaatacactcatggggtggaggtcattattcccctttcctctccgaagaaactgaggttcagtgttgttaattaagaagcgtgcccagggagggccacaaagctgagagagtggggcttgaccttacattggcctcgatgccagccctttgctcttcctgctgtgtctctggcctgccttcaggtccagtgggactgctgtgaggtgaccctggtgtcacatgggtacactgtggttgtaatgaacctcatggggacagcactgagccaaaagtgagacagtaaaaccctcctagcactttcttttttttgagacagcatctagctctgtcgcccaggctggagtgcagtggtgtgattgtggctcactgcagcctcaacctcctggactcaggtgatcctcccacctcagcctcctgagcagctgggactacaggctcgtgccaccacatgggctaattttttttttttttgagacggagtcttgctctgtcgcccaggctggagtgcagtggcgcgatcttggctcactgcaagctctgcctcccgggttcatgccatcctcctgcctcagcctccagagtagctgggactacaggcgcccgccaccacacccggctaattttttttgtatttttagtagagacagggtttcaccgtgttcgccaggatggtcttggtctcctgaccttgtgatccgcctgcctcggcctcccaaagtgctgggattacaggcgtgagccaccacacccaggccacgccagctaatttttaaaatttttttggtaaagatggggtctccctatgttgccgaggctggtatcacactcttggtctcaagtgatcctctcacctcccagtgtgttggaattacaagcatgagccactgcgcctggcccctggctctctttttaatactgctgttctttcattgaaaacatagtacctgcatgtagaaaaaaatcagtcaggacagaatgaaaagcaagaatcattcccacctggacccccagtgcccatcctgagatacagctaccttttaagttccttgactcagaaatgtttcatgtgagccacagtcatgccaggtcgaccccttccctcccatccacactggcacttggctttcctggtgcttctctttacgttctttttttttagacagagtttttgctctattgcccaggctagagtgcaatgatgcaatctcagctcactgcaacctctgcctcctgggttcaagcgattctctttcctcaggttcctgagtagctgggattacaggtgcctgccaccatgcccggctaatttttgtatcgttagaagagacgacatttcaccatgttggccaggctggtctcaaactcttgacctcaggtgatccacccaccttggcctcccaaagtgctaggattacaggcatgagccactgcgcccggcctctttacgttcttatcagcatcctatggagtcaaacttcccttcctctttcatcagctccttggaaggaacgcagtggctggcctgaaccaggtgaataaccaagggctgaccccgctgcacctggcctgccagctggggaagcaggagatggtccgcgtgctgctgctgtgcaatgctcggtgcaacatcatgggccccaacggctaccccatccactcggccatgaagttctctcagaaggggtaagacctcctcccctccccatctgctggcctgctgggctccagctctcctgtcacctgtcccgtgcctgaggcaagcagtatccaccatagatcttagcatctccagcctcagagcagaggccccgggttcacaagcctcattaggccccgcctggcccaaagaaggtgctccatcattgtatcatgggtaggaatctcggttcacaagttcagctgtgcaaggaggagactttaaaatttttctggctgggcgcggtgtctcacgcctgtaatcccaacactttgggaggctgaggtgggcagatcacctgaggtcgggagttcgagaccagcctgaccaacatgaagaaaccccatctctactaaaaaatacaaaattagctgggcgtggtgacacatgcctgtaatcccagctacttggaaggctgaggcaggagaatcggttgaacccgggaggcggaggttgcagtgagccgagatcgcaccgttgcactccagcctgggcaataagagcgaaactgtctcaaaaaataaataaataaataaataaataaataaataaaaataaatttatttaatgtaccttaattcctaggagtgaatctccctctataaaactggagacaaccaatcttagccctctttggggtctcctctttccagctcccctccaggtggtgctccagttctggagtctgatgcaaccccaaggcccacctggcccctcctctaacccagcccagcctgatctgaacagccccccgatggcttcagtgctccttggtttcttgtgtgcccagctcaaagcctgggaaatgcttggtaaggtggccgagtgcccgtccacctagatgcctctttcctttctggctggtggcacgttgggaggcaggtacaggctcatgttttgggagcctgggaacccctggtgtcaggaaaattgtcttcaaaggggtaggggatgagataaaaagataaatgaatatctcaaatctcaaaatactatctaggccaggcgcggtggctcacacctgtaatcccagcagtttgggaggccaaggtgggtggatcacctgaagtcaggagttcgagaccagcctgaccaatatggtgaaaccctgtctctactaaaaatacaaaaattagccaggtgtggtggtgtgtgcctgtagtcccagctactcaggaggctgagacaggagaattgtttgaaactgggaggcagaggttgcagtgatttgagattgtgccacagcactccagccagggcgacagaacaagactccatctcaagaaaaaaaatactatctaacaggaacaacatctagaatgaatgaatgagccaatgagtccttcgatcctggcactgtgctaaagcaccagcctcaccgaaatgaataagccactccaggacaggagacaccccagccacccagaatctcatagcgcagtgccagacaagcagtgagaaggcatggacgggcagcactcaggcagggaggctggcacttgtgcctgtcctcaggttgttccttcctctgggagctgcatccaccttgctagccccatggggcattgctagcccttctaagggctggaccaagcctggacaaaccctcctttccttgaatctcccaagcacagccagaatgagctagagctttcagaaatacttgaccaaacagagaagataccaacacccccagccccgcagtcaggttccccatttgcaggttgtgacctgagtggacaccaggtgatgctcttctctacccagagggctggcacatggccccactcttgcttgtctccagccaccctgagctgtactgggcaggagctgtaattgaccagttttctctctcttcaaacaacctcagccctcaccggtccctctgtccccacacaggccatcctgggtgggtccagcgtcccatcacataagaggatctttgcacagaagacaaaggaagaggctcctaccttgagtggagcagggagatcccttatcgacttggcagccagcacagccctactccaagaatcccacggcctcagtgttactgacaagtggttccctcacagctcagactaggagctccctcgctgtttttctttttcttttcttttctttgttttgtttttgagacagagtttcactctgtcacccaggctggagtgcaatggcatgatcttggctcactgcaacctctgcctcccaggttcaactgattctcctgcctcagcctcccaaggagctgggattacaggtgtgcgccactatgcccagctaatttttgtatttttagtagagatggggtttcatcatgttgaccaggctagtcttgaactcctgacctcaggtgatctacttgcctcgccctcccaacatgctgggattacaggcgtgagccaccgcgcctggccacctctgctgtttttcaatgcagctgacctttcccacaaagctcggtttgtgcctgcggttctcagatggttaagcccctgctgaggaagggaaacagataatcccagacagtgagatggaggctgagactgaggatgcctgggggctgcactaggagctcagagacggcatcaggcagctggagttcagggaaggtttgggggcagcagagcccgagccaagccatggacactagccggagctggccactcgggtgaagacttggggggctccagagggcccagggaaagaagctgggcctgactccatgtgcctagtgctgagcaccaagcgctggcataagggctgtagggagctgggcagcataaatcctgggcctgtgctgggcacccctaataatagagaacagcagctgaacactaacgctgtcccagccaccggcttagccttcatgtgggctatttcactatagcccagagagctgatgtattttattccccctctaaagctgagggccaagtgtggtggctcatgcctctaatcccagcactttgggaggctgaggcaggaggatcgcttgagcctaggagtttgaggctacagtgagctatgatcatgccattgccctccagcctgggtgacaaagggaaatcctgtctcaaacaaacaaacaaaaaacagatgaggaaaccagggcttagagagattaagtaatttgctcaaagtcaggcagtcagtaagtgccagacctgggaattaaacccatgtgggctgtcctagtaattgcactaaaaaaaaaaaaaaaaaaaagctttattgagatatagttcctattccatacaatccacctattgaaagtatacaatgattctgatatattatgtttattttttccaactgtgatagattatatataacataaaatttgccattttaaccacttttgttttttgtttttgagacagagtttcgctctcgttgctcaggctggagtgcaatggtgtgatctcggcttaccgttacctccacctcccgggttcaagtgattctcctgcctcagcctcccgagtagtagctgggattacaggcatgcaccaccatgcccagttaattttgtattttttagtagagacagggtttctccatgttggtcaggctggtctcgaactcccgacctcaggtgatccacccaccttggcctcccaaagtgctgggattacaggcgtgagccaccacacccggcccattttaaccacttttaagtgtacaattcggtggttttaatcacatttacaatgttgtccaaccattacccctttctaaaacttttcttatcacctcaaacagaaactgtaaccattaataactcccgattctcccctccccacagcccccgataagtcccatatcctctctgtctctcagaacttgcctgttctagaacctcgtatcagtgaaatcatacagcgtttgtccttttgtgcctggcttatttcacttagcatgatgtcttcaaggctcatccatgttgcagcacgtatcagaatttcctttctttttaaggcagaatactattttgtttatccattcagtccttcactgatagacgcctgggttgtttccaccttttgtctgttgtgaagaatgctgctgtgtacatgggtctgcaaatgtccattcaagtccctgcattccgtcctttgatacttccgacctcaggtgatccgcctgcctcagcctcccaaagtgttgggattacaggcgtgagacaccgcgcccagccagaaaaattttaaagtcttctccttgcacagctgaacttgtgaaccgagattcctacccatgatacaatgatggagcactttctttgggccaggcggggcctaatgaggcttgtgaacccggggcctctgctctgaggctggagatgctaagatctctggtggacactgcttgcctcaggcaccgagtagaaagcaattgtgctctttcccactctgtcatactgcttcctatagcatgcaggtcactgtgtgactcactgacagtgtggtaaggaggtggagggtggctgtgtgccaggcacagaactgggctctgaaatgcctggtcttccttacaccccagccactcctctcagcactctctccatgttgctcagcttctggaggccaccagtgaggaagctggggcttgacttcaagcccatctgactctaaagccagtaccagggagggtgatcattgctggtggcagcatcaggaaggcttcctggaggagggggttagttgtgccttgaggggctcagtacagccttaaccatggtgagtgtgctggttgggtttgctgaactttgtttgcagtgatgctctctgtaagcagtagatgaagctccaagtcctggcttcatcccacgccacgcagaccctagcttctgctcaccaaccggggcccctctctcaccaggtgtgcggagatgatcatcagcatggacagcagccagatccacagcaaagacccccgttacggagccagccccctccactgggccaagaacgcagaggtgagtggatcctgaggtgggtgggtggggcagggggccgggccccgcaggtcctcagggccctcaggaagcaggttcccgagaggaccctgaggctagcacttgggggctgaccttgcagtgggtgtgcaggcagagaagtccatgaagagctgggatcctggcagggctctgctgctctctggctgggcggggggatccgccctgtgcctcagtttcctcatccatgaattctgctttggcgatgtgatgaagtcagcaaggcagtgtgtgacaaaactcggcacaaattgtaaagtgcttcccaaatagaaggtggcgtgatgatgattgtattattagtcaggattctctagagggccagaactaacaggagatatatatatagagagagaggggggtttatttttttattttattttttttgagacggagtctcgctctgtcgcccaggctggagtgcagtggcacaatcttggctcactgcaagctctgcctcccaggttcatgccattctcctgcctcagcctcctgagtagctgggactacaggcgcccgccaccacacccggctaatttttttgtatttttagtagagacgaggtttcaccgtgttagccaggatggtctcgatctcctgacctcgtgatctgcctgccttggcctcccaaagtgctgggattataggcgtgagccaccgtgcctggcctaaagggggatttattaaggagcattaactcacacgatcacaaggtcccacaataggccatcgcaagctgaggagcaaggaagccagtccaagtcccagagctgaaggacttggagtctgatgtttgagggcaggaagcatccagcacgggagaaagatgtaggctgggaggctaagccagtctagccttttcacatttttttctgcctgctttatattctggccgtgctggcagctgattagatggtgcccacccagattaagggtaggtctgccttcccctactgactcaaatgttaatctccgttagcagcaccctctcagacacacccagggtcaatactttacatccttcaatccaatcaagttgacactcattattaaccatcaagatgatgatgatgatgatggatgatgatggtggtggtggtggtgctgggcctagctgcacacacagggagcctggctgggcatctcctctgagttcttcccctaagctaagctctgtcctcctgggaggatggaggcctctggtctcatcaccaggaagcacagcttgacagagaatgggatgccccagagttcatggcctacttctcaatgtgatgggccaggagggagggcactgccagcctcagggtacctctgcattccaggagccggacaccgagtcaggcccttccgtgtaggtttggtcactcattgtcatcacatgctgtgaggtggggacttgcattcccatcttcacagaagccctgaagtgcacatggctacagtgacccatccaagcgcaggcagctgggatgagtgaagctgggctttgggctcaggtctgtgactccaaagccaggctcccctccctgttcccaaggctctgccagggatgtgcattgccaaggcccagtgagaggtgatacctttgcagggttccagggagggatgcagggagcggggtgcttcaggacaggccccagaggagcctttgcaaggagagtgggttctgttggcactaggaaaggaccagaagcctcttaaaacagtcagcacatctttggctttttgtccctagtcttgggatgctgatgggatgggaggcagtctaggcccccctagaactggggcctgcccctggaatcctcttgctagcgctttccaacatcccagtacctgtaggcctctcagagcagaagtggcagtgcccacgtgtcccggggtgcggcagctccccgagtgcctgtgctaactcagcctgaccgtctcccgcagatggcccgcatgctgctgaaacggggctgcaacgtgaacagcaccagctccgcggggaacacggccctgcacgtggcggtgatgcgcaaccgcttcgactgtgccatagtgctgctgacccacggggccaacgcggatgcccgcggagagcacggcaacaccccgctgcacctggccatgtcggtgagcccaggaccgcgtgtcctgccctgtggggccccggtgggaatgcaggagggctgtccggactggagccctcctccccactgtctccctcctatcgtcagctgctccaaatcatcttcccacccaaagctcagttcagaccctgactcctccctcaggaagccttccaagtccccctctcagcccaaaataacaccacctcctgtgtgctgtggtaccttttccacctgtgcccccatttggcacttgcatggcacgagagggaaaaatgacagctctggccatagactggccctgagcaagccatgtcacctgtcagcctcgatttcctcatctggaaaatggtggtgtcaatacttatctggaagagttgtggaaaagttatggtggacacttggtcaccctctacagaatgtctaagtgacacacgcagtacctggcccgagtgagcatcctgcttcccttcactggtccgcgtgttgctctcatcttccctgggaggctgtaagatcctggcaggcaaagcctgagtgtgcagcccagcagcctgtggcaggtgccaggcatattcgttggtttattatagaacacagttcctgccctcaaagcccttactgtctggttacacatctagagtatgaacatattaaacctagcagaggaggacgttactgtgttacagacatatgtgtgtgcatgtattcttttttttcgagatggagtctcgcactgtcgcccaggctggagtgcagtggcgcgatctcggctcaccacaacctccgcctcccaggttcaagcgattctcctgcctcagcctcccaagtagctgggactgcaggcacgtgccaccatgcccagctaatttttgtatttttagtagagacggggtttcaccacgttggccaggctggtctcgaactcctgtgttggccaggctggtctcaaactcctgacctcatgatccacccgccttggcaccccaaagtgctgggattacaggcgtgagccaccgcgccccaccgtgtgcacgttttctatagcaataccgtatgtacagaagtctgtttactgagtctcagtgacagaacatgagagacccccgggactctaaaagctgattcaggacacattcagagacatcctgttttataccaaaggtcaaaacttggaagagatgttgttgcccaaaaggctgaaactataaatagtttcatttttgaaactgtggacatttttagcactgggtgggcccttggaatgatctaactcagcagttctcaagttttttggcctatttgatccctttatactctgaaaaattattgaggatcacaaagattttttaatcatctggattttctttatctatatttaccattttagaaatttaaagtgtgaaaatttcaaaatattaattcatttaaaaataacaataataaatatatatgcctactatgtacccacaaaaattaaaattaaaaattttttaaaaaacttaaaaaataactggccagctgcagtggctcgtgtacaccagcactttgggaggccaagatggtcagatcacctgaggccaggagttcgagaccagcctggccaacatggcgaaagcccatctctactaaaaatgcaaaattagctgggtgtgagacctctgaaagggtatcacgtgttcacaggggtccccaggtcttactttaagaactgctgatagactttggtcatcttcatcccatcttcacagtttttggcatattcatcaaccacctttacaattatgtacttaatcacctcttcaaattggcttacttttatttatttattttgagacagagtttcgcttttgttgcccaggctggagtgcaatggcacgatcttggctcaccgcaacctctgcctcctgggttcaagcgattctcctgcctcagcttcccgagtagctgggattacgttcatgcgccaccacacctggctaattttgtatttttagtagagacggggtttctccatgttggtcaggctggtcttgaactcctgacctcaggtgttccacctgcctcagcctcccaaactgctgggattacaagcgtgagccaccgtgcccggcctggcttacttttaaactgacttaaatttattttgagagaaatgttgcatcactaccataaatggccatccatccatccagtgccaaccataaaaggtaaccaatgcagggcgcggtggctcacgcctgtaatcccagcattttgggaggccgaggtgggcgaatcacgaggtcaggagttcaagaccagcctggccaacatggtgaaaccctgtctctactaaaaatacaaaaaattagctgggcgtagtggtgggcacctgtaataccagctactctggaggctgaggcaggagaattgcttgaactcggtaggtagaggttgcagtgagctgagatcacgccactgcactccagcctgggtgacagagtgagactccgtctcaaaaaaaacaaaacaaaacagtaacaacaacaaaaaatcacagttaatgctgaaaacacacacatatctgtagccatagaagtcctaatagaatgtgaagaactgtttggaaaaccccattctagacccacagcttcattctctaggcagggaaatcgggtcccaagaagaggaaggtgacaaggccagagcccacagttccaggtggccagtgtgtcctctgaaaccatgccatgctctgcgcccctgcccggcctccaggtgtggaaatgtgtgacgttcttcgtggggacactcccccgaaggctgccattaggggcacgtgtgttcggttacccctcagggatgacaccctggactgggtgggcaagatggccttccctgccctcacccaccctctccttgctactcctgaaagccatcagcagctgacctactgtgtccccatggctcctgggtcggggtcacagatgcactgcatctttggaggcggagctggcagagcaggggcgagtcacttctagtttctgcctgggttcttacaccctcccctgtgggtgcttttaagcctgtttgtcaggtccccagccatcaaatggcagactttggactaccagattgacttgggtgggggtgaggagggttccagtgtctccccgtgctgaggagaggcccgctgggtgagttgacaggttggggctggcagccaggggcccctttgttcttcacttccccggcagttgcacgtcttatcctctctccatctccaacagaaagacaacgtggagatgatcaaggccctcatcgtgttcggagcagaagtggacaccccgaatgactttggggagactcctacattcctagcctccaaaatcggcagacgtatgtgctctgcactctggggctggagtggggtgagggttgggtggatacagggaccgaggaggagggaagtcccaggcatcaggtgccagcatcctgtgctgacccgccctgctcagagctgccaggagcacctcgtactcagagagggggcttccttacccaagcacaagggccctgagcagtagatgcaggcccaccacggggcttgctataccagcatcctctcccgtgcagcgccccccacctcagggagctaagattcccagcaggggtggggacaggagagccagcagcagccttctttccccaccgttggggaattcactgatggaaccactggctagaatgaccaagggtgcatgcactacactgcacgagctctgggcatgcctgtgtgggcagagtgcatggccatgtgctgcacgctcgcacagtgagccttagcttcagagctggacagagcagatcctcctcaccagaggcctggagcccgctctggagggtttcagcagctgtgggggtcactgtgggcaggtacctgatggcagcagtgtgtgtgtgccagtgcacacgtgtgtgtctgcatgcaccgcatctatgacctccttttcagcaatcccatccatcaaatggagtaggtgccccctggctggctcattagtccctttggaaccctgaactatcacttagcatttttgagaatcactgaatgtggccatgggattcctgctttcttggctggagtagaaggaaagaaggggttcccacaggcatcgggcagggtgacactgacctcctcctcccatatcctccttccctggccttaggaagctgcttgggatgtaccagcctgggggcagcactccctgtcagggtgggctgaggcctctggagcagcccacgtgcccagggcctgggagctgggacaggggacggagtgtggaaaggaggggcctctcctttgcatgttgacatcatttctgatcctgtgccatctccccttccccaaaccatgacaagttgtcaccaggaaggcgatcttgactctgctgagaaccgtgggggccgaatactgcttcccacccatccacggggtccccgcggagcagggctctgcagcgccacatcatcccttctccctggaaagagctcagcccccaccgatcagcctaaacaacctaggtaggcctcgcctcccgactccctcttctccagctggttcccaggcccctggatcacagcaggccccaccaaagcaacaggatccctaggacggaagtcactaaaggaagccggggaggatggggccggagttgtcagcctctaggcagccagcaacccacagatcccagaggcctagggtgtccctggctgatgtcccatgctccgttgcccctgagaggatgtgtcctgcacacagtctcaggcctgggcatttccagtggcacccatgaggtggctgctgttactgccctcctgtccccagggcgttcagggtgggcagtgaggagtgctgtcgggggactgggggcccgggccctctggcttcacctgtccctctggcttcacctctatcacactgtttgaatctcggttgggcctgagacctgtgtgcccccttcctggccccgtggtgactttcagacgttgaatgtggccaggcagccagcatctgccccggtgcattccttggtgcccagggagacatccccagactagacaggacccttctctggactttctgtgggctggcccactcagggacctccattgtttgggagcggggtcccctgaacagagggcagccaggagccagtccttggtgagccagacttcactgtggaggcggcagcaccttcagccagggtagcccgaccaagcctggaactctggagaggcaccgtgactgtggcttctagtcctggctccacctctctctcccctcccaggaactccccctccacctcccatctttatctctcaattttgcaggcagtcacccaagccaggccggatggtgggcctggggtgcggcgtcagatgggtaacgccctgggcctggagaggccaccgagcctagccatgcggcattagctctagctctcactccctaatccgtccttcttagctgcgcacacaccacacgccccctcccctgcaccctgtccccggcctctctcagccactcttctgcttcccttgttcactgtggagccgtgtgccctggggagggggagacaccgcttcgcagccctcggttctgctttgctgcttctagactctgcacagtggtggggggctgtcagagttggggtcacgcgggctgctgcaccaggcacctggggactgggctgcttgtcaggaggggcagctagtcagttgggtggacgtcaggcaggccttggacacaaaggaagacatggacagagtggatggtgggcctgatcccggaggccactgggatttccagacctgggatcaggacgagggatgtctcctttcatccatggacttaaaccccgaggaacgtcctgactcagccttttgactaaatgaccttgggtgaattatggaccctcttagagcctcacctgtcaatagggaataagaattcttaggccccaggtggttattgcagcatcggctccgatgcaagaagaagcactttgtctgaagaggacacgcaagggtattcatgccttggggtttcaagaggaagagattgaggggaacctgggagctggctgggcagggtggggagcccttcccagagcagtgggcccccctttccactccagcccatttctctcctgtggcctgtggctcagctttctcctgggacagagtccttcctgtggggaagggacagatgacagggggagtggggggatgagggcgtggccgtgggcgaggcacagcccaggtttgatctagggacctctggggtagcagggcttggggacccacctgaccacagcatgccctgctctgtgcctcacagaactacaggatctcatgcacatctcacgggcccggaagccagcgttcatcctgggctccatgagggacgagaagcggacgtaagtggatcgagatcgggggcagagcggggaacgtgtgcgctttcctgcccctcacccaccccctgttgtgggctcagggctttactctctgcaccctcacagccggcgaagtggctctgctcctagtcttatagttctcagcagagacagaacatggagagcctgtgtcgctcgttcattaatgctgggcggtgcaggctctggagaccagcccagggtgccaggcttcttggacttggtggggctggcgcagtgttctggcctccctccctgatctccttatggctagaagagggggagatgcctgggtcccccctggggagatctcagcagctgcttcccactgctcctactggcttccttaaccacctcccactgcagaatagtggcgtgggctgccttccccagcacctgctgtatacctagtcccattgtaagaggcgggcctgggtgacaggatgcaaagagaagacgcccaggccttgcccttcaggcataatcccgggtgcttgaactcagtgccagctggcacggcaaggtaccaggacaaatgcgtttccagccactgtgctgtcgccacctcccttgattgctgcagttgattcatttattctttattagtctctcatgttcctaatagccttcccagggaggaatttgtaaccttgttttacagatgcagaacctgagcccctgagaggtgaagtgacttgctcaaggtcacacggagtgagtgtcagggtggcaactcacagccgggtcttccgaacccacgtcctttgtgctaccgcaggctctctctgggttctctgtggactctatacctagtgccagccctctgcagggaaagctctcttctcagaatcagaggcagctccactcccagggccaggcagtgatcgtgcagctctgtgggtcctctcacttcgcactcacttccatgctaccctgttgtgtgccctggaggttcccctgccccatcagcattccctcccctgtgccccctgcatgctcttgcacgcgggcacacgcacacacacacgcacacatgcacgcacacacacccacatgcacatgcctgcgggttgcccacatgcatgtgttgcccacatgcaaacacatggacacgcacacacatgcacacatgcaaacacacgtgcatgcacacacatacacatgcgcacacatacacatgcatgcatgcacatggacacccacacacatgcacacacatgtacacacatgcatgtacatacacacacctgtgcaggggctgaggtgaggcagctgcacctgaaggggggacccacatttcccaagggaggaaaagcagattccccagattctggagcctcagaaccctgcctggagcggggctgaggcaagagtcaggagacccctcggtagctccccacttgggccttccaagctacagagccctgcgccctctgggttgatctctgtcgccagccccgcatcttcgggagtttgctttggcctccagcaacagtgtagtctctcccctgccacctctaggcttgctgtggggctgggtacctggtccaggaaaagacccctagaggtgggacccgggcctcctccatttatcagccctcttgggcacctcctgcatccccttgacacacagcgctgcccagagcagaggcggcttctgccctggtggagcttccaggtcagcgcaggagagagtaaaagaaagattgcgaatggaatggaagcagcctccaccaggaagcaggtggagcagcaggcgggctgtgagggagggtctcgatggcatcagggcaggcttctctcagcttcatcaagctgagatgggaagatgagaagatcagaggaaggttccagactgaaccaaccacaaaggcattcccccagggcatggccaatgaggacaggcaggatgtggggagacgtgtcagggcgcgctggagagcatgtgactcaggaggcggcagacctgggtccaggtccagtccgcatccatatgacttggttcccgtcacctaacctctgagctacactccctccgtcactcaaaaatatgcacagagagtaggcgcagtggctcctgcctgtagtcccagctactcgggaggatcacttgagctcagaaggttgaggctgccgtgaactgtgattgcaccaccacacaccagcctgggtgacagagtgagaccctgtctctataaataaataaataaataaataaggctgggcacggtggctcgtgcctgtaatcccagcactttgggaggccgagacaggcggatcacatgaggtcgggagttcaagaccagcctggccaacatggagaaaccccgtctctattaaaaatacaaaattagctgggtgtggtggcgggcacctgtgatcccagctactcgggaggttgaggcaggagaatcgtttgaacccgggaggcagaggttgcggtgagccgagatcgcgttattgcactccagcctgggcaacaagagtgaaactccgtctctaaataaataagcacagggatgtcagggagggtctgcctcagaggcgtttgggacaatgacatgagctaatgctggtagcacccctcccatagcccctggcatgaacctctcccttcctccctgccccctcctcccctgcttcttccaccttgtgtggaggccctgatactctgtcactgcccattcctggcctggctgtagggtccccgcccctccttccccagccttatttaattccaacagactttatcaggcacctgctttggatcaggcctgatactgaccaaaatcaggtgtcccaagttggggagactggccgagatcctgctgggatggcgcctggtcagtgatgctatcccccgaccttcctttccctttctctgttgcactctccagcccctgaaatactagacatttgttcctttactgccctcacccccaccctcgctgtcctgcataggacagaagttcctcgggtccgtctgggtctgtctgccaggacacagctgcaggggacaagggctatgagggtggatgtaaagtactgggctgtggcaggaccctcctctctcccactgctgttcccactgcagccacgaccacctgctgtgcctggatggaggaggagtgaaaggcctcatcatcatccagctcctcatcgccatcgagaaggcctcgggtgtggccaccaaggacctgtttgactgggtggcgggcaccagcactggaggcatcctggccctggccattctgcacagtgagggcggcccctggggatggggccaggcggggctgagacctgtgtcctcaaggggccgagtttgtcttcagggctttgcaaaaagagagtggaggagtagaggagggctataagcactttgaggaggcaggggcggggctgcaggtgctgaggtcccaggctggaaggagaagggctgggcccatgggcttgggtttggggatcccccgccctctggccacagagggtagagctggctgtgtgaaattttggcataggaagcgtttcctatcgactgccttaacccctcctcccctcacccctgcaaagcaggcaccaggggccacacagcctgctgcacataaggaatcccattcccagggtgcacgcagcaggcagtctcaggaatgaggagccactgagcctcaggatgccagagccctcgcctgcacacttcattttactgggaaattttactgggaaattaagttcccaggtggggagggatgacgtgaagtcacatagctcatccatggggtcgctgggctggagcacagtcccctagactcccagcctggcacctcctaggccacagggcactgtgtagtctcctttcactgccgctttgcgaaggcgcctggcttgctggacagatagccgggtggtcagtgttgtgacggctcctctgtggagctgtctgagcttctaggtgctgacaggtggggaggggcactgccagatcagggtcctcagctccccccaaccccctggacattgtcctgggactcaacatgtctgactggtgcccctgcccctgtgctggtcagattccattttctccagagcgcccccacatctggatcctggtcatgcaaagtcttggaggtgcccggggaggactccccaccctagggtgggtatcagggcctgtgggccaggcctgtgttggatgctggggatgcagagctgagccaggcataccccagcctcaggagcagggggctcagccagtccaggaggtgctggggacagagtcccatgggcggaggaggagagtcatctgtcaagttgccgggacgttagtgtccacggcggtttattgactggtatttcatttccttttgatgattctcaccatagccctgcggggtgagcagatggggaaactgagaaccagagaggatcagccagtgaattgggcagtcaggactgggtctccagcagtgtgcccagctctctaccccagcctcagggtcccagcatcccctctctggtcttccacagggtccaagggcgggcacgaggtctgagcaggcagactgggcagagtcctagcttcttctccaaaagggccacgtccttcttcagggaccatttcttccccatccggggtcttgagactcccaggggccatggaggggatttgagaggtctcctggctgatcctccggtgtgggcagatggcctcctttcagctaccctctgcttgtacatccctggccctggggaactcactgcctcacgggggaagtggggcagcttctccttcctggaggtgcagccggccccttggccctgtctgttctgaaggctcaaaggacagggctattccttgttttctgtgacaaacaacgtgggtctagcttttataagcttttactcttgaggggctcttctttaaggaaaataatacaaaatcatgaatacaagatgaagtgcagagccgtggggcttcagtggtttttgagtctctccgttgcccaggctggagtgcagtggtgcatcttggctcactgcaacctccgctcccgggttcaagcgattctcctgcctctcagcctcccgagtagctgggactacaggcgcccgccaccacacctggcgaatttttgtatttttaatagacggggtttcaccatgttgggcaggctggtctcaaactcctgacctcaagtgatccacctgcctcagcctcccaaagtgctgggattacaggcgcgagccaccatgtccagccggaaggaggtttctctctgtctgtctgggaggttgcaaaggaagggcccagaatttgggtttgcttaggcctcggtaaacccgcttcctcctgccacctcctgcgttcaggcgctctgcaggctgttctacgggagccctgcgtgtggccgctgcatctccccgcctctgacccctttgttcctaggtaagtccatggcctacatgcgcggcatgtactttcgcatgaaggatgaggtgttccggggctccaggccctacgagtcggggcccctggaggagttcctgaagcgggagtttggggagcacaccaagatgacggacgtcaggaaacccaagtaagccctggcgcactggggccgtggccgcagctgtgcccactgtggctgttccctggggacagagggctccctgtcctgctgagggagggggaagagcgccccacgcttgaggggagcagagggaacccccttcccagggaggcagagggctggggtgtggctctcacttgggcatgcagacacctgctgagcgcaggaggggcgtggcctggtgggcctggctctgccctgcctggctctgccctgcccggctctgccctgccggctctgccctgcctggctctgccctgcccggccaggggtctggggcttgcctggagagagcctgggccacccttctctgagaccacctgggcagaggctgggtttttgctgcccaggcaaaaggaacccactggcctttcaaatgacacggctaaacattttctcacatttcagacagcactcgctcccaggatcggactactaggttataatcagagggcttcagtcttacctttaatttaaggcctacaagacttgaactaatttaagtcagactgaaggagaaagtcacatttccaggaaacatttgtttgggaagcccaaatcctaggactaagcaatgcatcccgttcggggctggatgaatggtgtgttccaagaggagtgttttgagcatttctgagtgattttttcatattttgaaagtgagtgtcccccagtcttaggggcccggcatcccctctgcggtcttccctagggtccaaggccagggaccttcaatcttttttcccactctgtggcttgtctttctgctctgtggtgtttctaggtttttgttttttgttttttgttttggttttggttttggtggcccatgttcttaatgaggtagataatatttataaatatttttcttcttgtagtttgtgattttttcctttctttctttcttttttttgaaacagggtcttgctgtggggcccatgctggagtatattgctgtgaacacggcttactgcagcctcgacctcctgggttcaagcagtcctcccatctcagccgcctgagtgcctgggactactagcatgtgccaacacatgtattttttgtagagatggggtttcaccatgttgtccaggctagtcttgaactcctgagctgaggcgatcctcccgccttggtttcccattacaggcatcagccaccatgcccagcctagtttgtgctttttatttctcgttcataaacccctttgctgcccccaagcagcacacgattctcctgtgtcgagctggaaagctctctagatctgccttttacattgaggtcttttatcaacctggaattgatttttgtatgagggtgaaatccaagatccaatttaatgttttccacgtgattggccaatttttcccagccccatctgtgaagtctgtccttccctccgcttcctcagcagtgggtcaagcatccctctgctcttggatctgctccaggctgtgttttgttccactggttggaaagctgtctctgtgcccggaccacagagcataaaaaactaccgctgtgtggtgagtcctggtgtctgggtggcagatcctccaccttggccttcttcaaaaacatcatggctattcttgggggcagtagagagaagtggatacaagcatagaccctgaagtttctacctcttctcaaaaataggaatatgccaggcatggtggctcaagcctgtaatcccagctctttgggaggctgaggcaggaggatcacttgaggccaggaggtcgagaccagcctgggcaacatagtgagaccctcatctctacaaaaaatttaaaactaacaattagctgggcatggtggcactatggctgtagtcccagctaattgagaggctgaggtgggaggatcacttgagccccggaggctgaggctacagtgggctgtgatcccatcactgcactccagcctgggcaatagagtgagaccctgtcttaagacaaaaaaaaaaaaacaaaaacaaacaaactcacaaactataaaaagaaaaaatatttataaattctactccattaagaacatgggtccatccaaataaataaataaaacaaaaacaccataaagggagtaaaaagacaagccacagagtgggagaaaagatttcgaatccatacatccatcaaaggactcattttcaaaatatgaaaagatcattcagaaatgctcaaaatagtaaccaccattttactttctcttcctatgagtttaactgctccaggtactgttaagtaaaatttttaggggataattgatttggaccaggattctgtaccaggcccaacagaagaaacgaatatggagtcattcatgccaagtgaacctagttagcttaggcgtatacccatgtaacaaatagctgagttctggttagctacaacagctaagctttaatcaatcatagatggccacctgattcaaacaaggcaaaccaattaagctccacacctcactttggttttcagcccatcaacactgcctgaccacgttgcaggccagagttctttgaacctattctggttttgtggcctgcctgactctcagttcatcaataaaagccaattaacatctttaaatttgttgcaattttatctttgaccgtaccttatgtaagtggaatcatacagtatttgtctttttgtgactggcttatttctttctttttttttttttttgagatggagtcttgctctatcacccaggctggagtgcagtggcgcgatctcggctcactgcaatttctgcttcccaggttcaagtgattctcctgcctcagcctccggagtagctgggattataggcgtgcaccaccatgcccggctaattttttgtattttagtagagacagggtttcaccatgttggccaggccagtctcaaactcctaacctcgtgatccacccacctcggcctcccaaagtgctgggattacaggggtgagccaccgtgcccggccatgactggcttatttcacttggcatccatgttgtagcgtgtgtcagaatttccttcctttttaaggctgaaaaactccattgtctgttggatacacgttttgcttctccattcatccattgatggatattttagttgtaaattgactgctgtcaatgtcggatgtgcaaatacctgtttgaggcctactctctcttactggtgccttctctagagagaattctgatgggttcagtttgatcatattttgtttaagatttttggccaggcgcagtggctcacgcttgtaatcccagcactttgggaggccgaggtgggcggatcatgaggtcaggagatcaagaccacagtgaaaccccatctctactaaaaatacaaaaaattagccgggcgtggtggcgggcgcctgtagtcccagctactcagagaggctgaggcaggagaatggcgtgaacccgggaggcagatcttgcagtgagccgagattgcgccactgtactacagcctgggcaacagagtgagactccgtctcaaaaaaaagatttttgtgtccacgctcgtgggcgaacttgacccgttttttcctattttgggttttgaggaaatatttcctctttttatttttcttggaagagttagtataatagtttattttgaatttatggtagaacttgatagtaaattcttctaggcctggagtttgcttggtgggaggatttttgatgatggaattaatttctatagtggttgtgagactgaccactcggggtttctaaatacctttttgagttagttttggttaagtgaggtttttctaggaatgtgtccatttcatctaaatctttaagcttattggcttagagttgttcaaaatattctgtttttttttttttttttttttttttgagacggagtttcactcttatcgcccaggctggagtgcaatgacgtgatctcggctcactgcaacctctgcctcctgggttcaagcaattctcttgcttcagcctcccaagtagctgggattacaggcatgcgcaaccacacctaatttttgtattattagtagagacggggtttccccatgttggccaggctggtctcgaactcctgacctcaggtgatccacctgcctcggcctcccaaagtgctgggattacagacatgagccaccatgcccagccgattctcctttttctaacgtctgcagtgtgtgttggtgcggcccccttttctttcctgattttgataacagataacagccatgttttatcagtcttgcaacaggtttttccattggattagcctttcaaaaaaaccaacttttgctgaattgtgcccccaaggttggaccaatctgacactcctccagcactgccggagagagcctgttttgcggggatggtgcggggagaagcccacctatcccgaacagaggttggagtgggcactctgctacccaaggccctggggtgtgaattgtggggaaagggaaaggtggatgggcgggtggctcagccgtcctcctgcctcatttctctccagggtgatgctgacagggacactgtctgaccggcagccggctgaactccacctcttccggaactacgatgctccagaaactgtccgggagcctcgtttcaaccagaacgttaacctcaggcctccagctcagccctcaggtttaaaccatgtttgatgcatccatgggaagcgactggcccgagaggctgtggggtggtgggtgggagtcgtgcacttgccatcaggcaccctcaccgtgccaccagcccacccgctgcactggtctttattggctgaggacagggattgcgggggagctgtcaggcccctggcaggttagaaaagtccctggaaagtcctcagctgtacctgccttccaccaggacgaactagccagagagtgtggcttcgtgggtcctgcttctgaagagttcccagcctcccctcttcccgcacccccagcccccaacacgcacaccctgagatctggagtgcatgggttttatgccagtcccttgtgccactgggccgccctccttccccgcccctagaccagctggtgtggcgggcggcccgaagcagcggggcagctcctacttacttccgacccaatgggcgcttcctggacggtgggctgctggccaacaaccccacgctggatgccatgaccgagatccatgagtacaatcaggacctgatccgcaaggtgagtgccgtaggccagagggcctggacccactgctccctggagccaatcctgtgtcagcaaaccatgctagggaccgacccccaggacagcaggtggcttttacacacgcactcattcatatgtgcacacagggcaaattgatctcactggaacctgttccatgggtgggatctgcctgaagcactgtgctaagggggatctgaggaccactgtgctctaagtgtgcatgagtggggagggcggcatgcataccatgaacgtgccactcgagccagcctggggacaggacacatgcttgcccttgagctcacctctgtggatagacagtcccacaggaatgcctgtccccacgggttgccggtgctgtggtggaggaccgtgaggcctctgctaaaaggcctgggggctcggaaagggctccatggaacaggggacccatcctgaggcccttggggacagagcagtgcagaatcagtgatctggaggaagagcagcagccctctctctgcagaggtacagcagaggctggcaggacccagcatgctaggggaggccctgtggcgtggcgggcggtgggtgaccggggtgggcgagcgcggtggctgagctcagaccctggagccagggcgcctctgggggtccccgttctgcctgcactcactgcagctacctaatggggccatcatagcgcctgcctggggaggctgcgaggccttggcatgctgttgtctgtgaaatgttcacagcactgccgggagcctgagctgcatccttgctgctgtggtttcccgaagccccagggcgtcctgggcagcgcagcagaggctctgggcagacagagaagcgccctctaggggccagatcgggcagggcgggcttcctgcaggcggcagagaccgtcagactgtcagacactagccagtctaactctcctattgcgtgcggatggggagcctgggacccagagtgggaggcatcacccaagatcatccagcaaatcggcagcagagcttgttcggaagcaaataagagaggcagcggccgggcgcagcggctcacgcctgtaatcccagcactttgggaggccgaggcaagtggatcatgaggtcaggagatcgagaccatcctggctaacacggtgaaaccctgtctctactaaaaatacaaaaaaattagccaggcgggcatagtggcaggagcctgtagtcccagctactcgggatgctgaggcaggagaatggtgtgaacccaggaggcggagcttgcagtgagccgagatcgcgccactgcactccagactgggagacagagcgagactccgtctcaaaaaaaaaaaaaaaaaggcagcacccagggctcaggttcaagccttagcccctacttccctaccacgtggcccctgcagctgcttcccggcctgagcttcgctgagagccctcatttgcaaactgggtgatcagtgccctctccacagactggctggagattaaatgaagtaatgatgcaaatacctggcaaatcaccaacaccaaggaacaccgtctgcctttcctcccctggccacgacttgacttgggccagcatcagatggggtgggcgggatccttcttgcagctggtgtatgtgtggtcctgttggtacacagatgctgtcctgagcagatggcatgtgatgcccgcaccagccgttctggggtcacgtgcaagaggctggctggaaatcatgccaggcatgctcttgccaccagagacctcttgccctgttctcatgtgccccagagcccagtcttgggcctccccttgacgctccccttcgtgccccctacctgtggaaggtctcttctgactgcccctgtcctgttcccaacagggtcaggccaacaaggtgaagaaactctccatcgttgtctccctggggacagggaggtccccacaagtgcctgtgacctgtgtggatgtcttccgtcccagcaacccctgggagctggccaagactgtttttggggccaaggaactgggcaagatggtggtggactgtgtgagtgtgggcccctcccccaggccacttccctcagggtctgtagcccaggtcgatggcttcccctcatcctgtggggcctttggtgttggaggagacagcagggctctgtccatcgcctttagccagctggagggagagagagtccacagttcagagtctcagtgcggggcagggaccctcagtgaccaccagcaggggggttttcaaacgctttttagctgcggatccctttctgcaaacatagcgcagtgtagaagcccagaatggacaaaggctccagagcgggctgggcgctcaccctgtaatcccagcactttgggaggccaaggcaggcggaccacttgagcacagcagtttgagaccagcctgagcaatataatgagactttgtctctaccaaaaaattaaaaactagctggacatggtggtgtgtgcctgtggtcccagctactcaggaggctgaggtgggaggattgcttaagcccaagaggcagaggctgcagtgagctgtgatcatgccactgcactccagcctgagcaacagaaggagaccttgtctcaaaaagaaagaaagaaagagagagagagagagagaggagggagggagggaaacttcagggagaggggacatggaggcctgtcgactcagccgctaccctttcccccactcatcatccctgaaagggcactgctgagacctctgcccctctgattgcacagctgggacagtccctgcagtcccaggaaggggttttgcccgagccgctctgctgctgtgtggctcagcctgactcgaaagagcctggggctccccaggctggggctccgagagtgcagggcagggccgggcggggtgcgggccgggcggggtgtgggcccggcactcaccaaggctgcttctcaccagtgcacggatccagacgggcgggctgtggaccgggcacgggcctggtgcgagatggtcggcatccagtacttcaggtgagggctcagccgccccagcccttggccccgtgccctggcgtggtcggactcaccgaccttcccctcccagccctagtgtggactttcccttccccaagggtctgctctgttccccaagcccaccctggtcctagctggcgtcccctgcccagcctgagcatcctagggtgaccccctcctccctggcccgaacagattgaacccccagctggggacggacatcatgctggatgaggtcagtgacacagtgctggtcaacgccctctgggagaccgaggtctacatctatgagcaccgcgaggagttccagaagctcatccagctgctgctctcaccctgagggtccccagcctctcaccggccccagctgacctcgtccattcagcccctgccaggccaagcccagccactgccctcccgggcagatctgggcccaggcacctctgagtccatagaccaggcctgggagaatgccaagctgcctgcccgaggctggtcctgaaggcctgtctcccactaaccccgccttccagcactttctgtcattccaggctgggaaagtctagagccccctttggcccctttccctgactgtcaaggacaactgactcccccatcagctcaaacattaagggtacccgggcacaaccgtacccctgcccccagccccagcctccctgagggcctgccgggctgcctctgccccagcccccagcaagggcactcccaggcttcctggtgggtgcagcccactccctctgccctctgctccgttccctgggggctgggactaaagaaatgggtgtcccccaccccatcagctgggaaagcccaggccgcaggagtgggatgcccgttggactttgcccctcacactggcccagcccctcacactgccccaccccgagaaccctcagctctcaaaggtcactcctgggagtttcttcttcccaatggaagtggcttaagagccaaaactgaaataaatcatttggattcaagttca

SEQ ID NO: 15709 - DNA, 70259 bp, Homo sapiens
gggggtccgttccccaacttcctcggcgctccggactcccaagtctccgccggaccctcctttggatattcctcgtgtctccgattctgaggcatgtcctccattaacccttatgtgactccctgagtgcccccaccttccatcttttcatccccctgcgtccccaattcccatcccgagaccgcccgtgtctcatctcgaacttgtggaccccagggaccccagcttcgaccctgagtttctcccctgaaccccagtctcctccgtgtgtctccctcagtatccctaacttcccgagtcaatccatctcttctctttccccgaccctcagtgcctctttaggccccattggccgtcctaattttccttcctgtgctcctctaagtgctcacttgattccccacttcacgtccgtctccacctttcgtggtgcctctactcatttctcactccctgcttctcctgcctttcctccctgctttttttccttgcctttcctctctcgcgtgcctccagacctgcccccgacatgctccctccttcccctcagcctggccaccccagagtctcccacccctaatcctgtgtccacctcctgctcccacagatgacttggaagctggtgacagggagcatgtgaccagggtgatcatgggactgggtcggggcaagcctgtgggtgtgggacagggagggcacagggcaaggggacctgtggccgtatttttaatgggctacccacatgaccccaacgaatacctccccctagcttctgggtctttccctcacctgcctcttacccgcccaacaggatgtcaggcaggttcggtttggcaacgttgaggctgcacccttgggctgaatgcattgtttttgaatgcattgtttttgttagagtttctgcctggagtttggaacctgttttctgtccaagtctcagtttcctcatctgtgacaggggaactgtacctcctgccctcgtaagtctgccatgaggttcaaaatttgaatgagaaaatgtagaaggtaaagctttataaccagtatggccctgtacaaatacatgattttactgttgggtcataggcagaattgaaaggagtggaaagggaaagggctagaatgagaagacaaggagagaaggatgagcaggaggtcccttgtctttcagtgtatcatttggcagtgtttgttcatcacctcttgtgagtcaggctcttctgtatatgttctcttcaccattcattcagtcatcgtttatctaacaaatatttacggactgtctgatgttctaggctacccttggtgtggccaatgatattctcacttcacatgagaaaaagagggcgcatgagttgcttgaggtcacaccgatgaggttgaagctggaatctgacaccagagcctgtgtgattgtcctgatgtgtaaggtttgctactgtttaggacacttcttgttccttccgtggattactttcttgttacatgagagactccccaaaagggagtttccctcttactcagcagaatgacatcactaagagatacagaaaggagaaatttaaatactctgtgtgtgtgtgtgtgtgtgtgtgtgtgtgtgtgtgtgtgtgtctgcagacatctattgggtgtgtgtgctgggggaagtaggtaggcaaggagtaaggggccgtagtgaagagtgtgttacaaacttcactttgtagagggtggctccctgggagaatatgttctgtgtctttcacagtggattttgatagggtcatgtcttaaatgcctcttctcgttttcggatggtgatctcatccagtcttatttctttaagtgccgtctctattctgtcagcccacaaatttatatccccagtccagtccagacctttccctggaatgacatactcaaatctagttgcttactcagcacctcaaacttaggcttttcaaacttgaagtatttatttattgatttatttattttttgagacagagtctcactctgtcacccaggctggaatgcaatggcacgatctcggctcactgcaacctccacctcctgattctcctgcctcagcctcccaagtagctgggattacaagcatgcgccatcatgcccaactaatttttgtatttttgtagaggcggggtttcaccgtgttggccaggctggtctcgaactcctgatctcaagtgatccacctgccttggcctcccaaagtggtgggattacaggtgtgagccaccgcgccaggcctcaaacttaagagtttagaattgagctcctgttagttctgccctccatccctgaccccactcttcaccaaaacatgtccctcccactctctttctcatcttaggacataggagtattgttcattcagttgctcaggtcaaagctgtgagattatctatgatgcctctctgtttcttaccccacacccagccagagtgatcttgttaaaatgttgtttctttgcagtggcctctcctctcatggcacatgcctggccccctgttgcctctctgatgtcactggcttccttgcttttcctggaactcgctaaacatgttccagccccatggcctttgcacacgctctctttgcctagctattcatatgactttcatctctctccatcaggtatttatttaagatcaatttcttggtgaagacttctctcctcacccaatctaaaatttcactctccacctcagcacttcctatccccattctctggtttttctcctcagtagttaattgtcatctaaaacctttgtaaatatttacctgtttatcttctttattattagtagctctgtctaaaatataagttccaggatgtcagggattttgtggggttttttttggttggttggttgttttggttttgagacagggtctcactctgttgcccaggctggagcgcagtggtgcgatctcagctcactgcagcctccgcctcctgggtttgagtgattctcccacctcagtctcccaggaagctggaattacaggtgcacgccaccacacccagctaatttttgtattttttggtagagatggggtttcactatgttggccaggccggtcttgaactcttgacctcaagtgatccacccgcctcggcctcccaaagttctgggattactggtgtgagccaccgcgcccggccttgttttgttttaagacagggtctcactgtcgctcaggctggattgcagtggcacaatcacagctcactgcagcctcgacctgctagacttaagcaatccccccacctcagccaccttagtagctgggacttacaggcatgagagataccatgcctgggtaattgttaagtttttgtagaggtgaggtctcactatattacccaggctggtctcaaagtcctgagcttaagtgatcctccttccttggcctcctaaagtgctgggattacaggagtgaactgccgtgcctgaccagtctgttttgtttacgattgtatcctcagcggttagaacaatgcctgccacaatccatctcagtaaatatttgtggagtgagtcataacatgggccacactgtaccgtgccaccagcccaaagatctcttaaagtcacccctgtctcatgtgcttgggagctccagtgacagtttcggggcagtttgcttccagctgtggtccagccaagcggagtgaatgaaagagatgctttttccttttgtgaaaggacgttttgctctggctcacgtgagcagcagtgcattttgagacgagggccttggcttttggaatctaagagcctgttgagcaagcctcgctcagccaccttctttcagctttctcctgaaggcagtttgaggattaagagcctgatgctctggattccacctaattgggttcagatcctggcaaactgtgtaacctgtgccccagtttcctgtgtaatgtggagagacctggaccttttcttacaggtgtttggagggttaaatgtggcaattcggccgggcgcagtggctcatgcctgtaaccccagcactttgggaggtggaggtgggcggatcaccggaggtcaggagttcaagaccagcctggttaacatggtgaaaccccgtttctactaaaaatacaaaaaattagccgagtgtggtggtgcgcgcctgtaatcccagctagtctggagactgaggcaggagaatcgcttgaacccgggaggcagaggttgcagtgagccaagatcacgccattgcactccagcttgggcaacaagagtgaaactctgtctcaaaaaaaaaaaaaaaaaaaaagtggcaatttacccgaaactgtggtgaagcgtctggcgccctgtgggtgctgggcagcagtgggtgctgatggggtgtgaggggatgggatcaagccctttcccactaacttaggaaagaggttggaatgagctggggtcagagggaacatttgcggggacattttgccgggaggctgccttggaggttcagaggctcagatgacccctgtgttcattcagtgttttctcacccacagattgagcacctgctgtgtggccagccctttgcctagtgctgttcaagagtcagaggacataggcaggcaatcccccaccacaacctgccaccccatttcctctcttggggccttgatttctccacatgccaaacagggagaatgattgcaccttccttgtttctttttttttttttttgagacagtctcactttgtcatccaagctttagtgcagtggcatgatctcggctcactgcagcctctgcctctcgggttcaaagattctcctgcttcagcctcccaagtagctgtgattataggcacccaccatcacgccaggctaattttttttgtagttttagtagagatggggtttttttctcacacgttggccaggctggtcttgaacttctgacctcaggtgatctgcccatctcaccctcccaaagtgctgggattacaggtgtgagccaccgcgcccggctgcgccttccctgtttctttgtgagcttggaggtggatcacaagtgtgaaaccctttgccaaccgtgaggcatggtggccttgtgagaggacggaggccggtgtgtggtggcatgctcccgtgctgtgtggcacagacggagctacaggaaggaagttggggcagcttggcactctgagtggaccctgagtttccagcctgctctgtcttgactgggtgggaggagggtgctcaggagggtgtcactgctgccaggttctgctgccaggaccatccaacagttgttccaatcatgggacatcctgtcgtcagcagctggggctcgtgaggcctgatttccacctcgggcagttctgtgtgtgctcctggaatcccccacgtggccaagcctgtgaggtctgcttcctggcctgctgcctgtgggttcctgtcacgcacctctcgggcagctgtccggctcctctgctctcggcttagtcaagaaggaagcagaaggcttggagtctttcctgcttggactaggagtgagctcagcctaagtgccctgactatatataaagctgaactttccagaccgaagcctggggatggatcagtccgatcacttagggccgctcctgaaggagtgcaggtgctagatacaggttctcccggtggaggagcgaaccccttgtgggccgttagctactggtgggatttgagcatggtatttccctatccgttgtggagaggagcatggcagctcagagtgggtgggaacagtgtgtggtccctgttatcaccttcaagggaataaagtgtgtctgggggcttcagaggtgctggccccatgggcttataggtggttcattcattcattctcattcattcattcaccaaacttattaaacacccactgtgagtcaggaacatcatgccaggtgcttagggaaacaaatcaaagcgggttgggtgagcagcccaagccaacagatgcacccccattctcacatggtgtgtgttcctgtgggctgggccctgggtggtgtggggtgctggggagaagaggaaggcacaccaggctgcagggcggaggtgcgggtatgaattttcagaggagatggcacctgagctgtatcttcatggataagaagagatttgttcatttgtcctttgtggagcacacattcaggttaagaaagtggggaggatgggctacgctgatggagcgtatgtgtggtatccccaagtgcactgagacacgagtttgacgtgttctgggaagatcgatggtgcggcgtggctggagtagaggtgagggatgagttggaggggtgagttgggccagctctcatggatgctggagtctgggctttccctgggaggtcatggggcgccactggccagggtcagcagggagacctgcagctggatttgcatcgtacagtgggcatggaggggtgtcaggctgggttgggaaccgtgcaggctggaagggcactctggtgctctgagcattcagagggggcagctgggccttgaaggatgagcaggggctccagcaggaactggagagcgcattccagggaggacgcaagtgcaggcccctttcactacagaaaagcagttttcacacagaccttccaaaggggaggagaggggactgcctgggcctggcagctgcggcaggtagcagcaatcagagggcagggaccgctcctcccgtgcctgagacctgcccagggtccttcagggaattcgtagctgaggaggaaccagatttttgggactgagttctccctcaccacccgctctgagccaccctcttggtcccttgtcctctactgcacttcttccggggcttggctcctcgtcatgagaggagcttccctgggcatggcgaggggcgtgactgacatagcagccctggacaagtggctccaggtgacctgtgttcacgttgatcacagcactaaccacggcccctcctctcagcaccttcccctctcgagccgtccagtcccagtgaaaatgctcaccgttcatgggtgggctgagcaagcccctgatctctgccttcctccgtgttctgatctgcttcatctgctgtgaaggcctctcgccatttcccccgctggcaaactcctgttcttcctggaaagttcagctaaaaagtcatcccctttaggggtccttccctcaggggaccgtgcacttggcgagacagggactggtcttgggtctctctgttgactgttttatgaacccaggtagtcacttccagggaactcatcagagatgctaccattggctccaatctccctctgttcccactcgaggttttttgtttcttcgtttgtttttctttctttctttttttttgagacagagtctcgctctcgcccaggctggagtgcagtgacatgatctcggctcactgcaagctccgcctcccgggttcacgccattctcctgcctcagcctcccgaatagctgggactacaggcacccgccaccacgcccagctaattttttttgtatttttagtagagacggggtttcaccatgttagccaggatggtctcaatctcctgatttcgtgatccgcccgccttaacctcccaaagtgctgggattacaggcgtgagccactgcgcccagcccgtttgtttttgttttttggtggacatcaactttaatttgccctttgttttgttttgtttttgaggcagggtcttgctctgtctcccaggctggagtgcagtagtgcaatcttggctcactgcagtctcgacctcaagaggatcaagcaatcctcttgccttagcctcccgagtagctgggaccacaggcgcacaccaccatgcccagctaattttattttatattttgtagagacagggttttgccatgttccccaggctggtctcaaattcctgggctcaagcaatccgtctgcctcagcctcccaaaatgctggaattacaggcacgagccactgtgcccggccttaatttgccctttgaacatgtacaattcagggcctctctgggcctcagtttcttgatctctgagatgggaagatgggataataatacttgttcctcccgtccttcagctcctccaggggaccctcacaccagcacactctctgtcagtcttccctcaatgaacccagcaggcaagcttggttttgacagaggatgggtgagcagagataaggaaaacggccagaaatatctggcttccctcagcaggggcaccaaaattggtacctggaaattgcctggcttggacaggcagaattgtcactgtcaacccccaccaccaaaggtcttgggtctttgtctttctgcttgtggtgtttgagagagctgcttgacacagccgaggtgcggtctgtgtcaggtgacctgggcatcctgggggtgcagggagaagcccaggtaaggaggaggaggggccggtcatcagtggggaaaagtgattgtctaccccacgggaaggtcaagggtaggacgctgtgagaagccagggggagagatgaagtgaggcatgatgcggggggccctcatccaccatccccctcttgcagctgtgctgggaagagcctaggctccagggtccaaggtggcagggacagaaggaagcacgtgtgagcactttctccctgctggcccgccttcctggttggcaatgccgtgagtgttccaggatgtggccccgtggctgtcatttcctttcttccacctagtgataacaatggccactgtttgtgtgcccacagtcggcctgtgtcccagacaccttccctccattgcgtcatctcgtcctcctgcctaccctgaaggctggatgccagccaagcctgtcgtttctgtggccatgctgtcgtgggtgtgtggggggcatcccctagccccaggctctggtggggggtacacaggctgggccattgacgaaggggtgtgtggaatctttctttgatttcactgcacccctggtgactttctccctcaatctgaggctcatgggtgctggatgctcttgactctctgcccttcctgggcgcacccctccgcgtccctgtgggcccgtcctcggggtagcctctctgcgctcttccaggccaggcctgagtcccacaggtccccatcttcccggctgcagcccccagaggctcagcctatactgctacttcctttgaaaactataatcgctttacatagcatctggaaaatagggaaaaggaaaaaacaaaagcccataaacccagcaccctcatctactcaatggcatgttttctgtcagtctatcttggtttgttttctatcaggctttgttttttctatgcataatatttactcagttaaatttttgttttgacaaactttctgtgagccaagcttgtggacggagatgaaaagacgagcagctgcctttgagaaactcagactctgggccagcccatctgggtgccagctttcactgctccacccactagctgggtgaccctgggcccgtgactttacccctctgttctttggtgttctcatatgtaaaatgaggataataatagtaaccagttcatagagtggttgtcagacagaatgattaatgtacgtaaagctttcaggatggtgccagcaagatgcacaggagtgtttggtaggaggatgacgaagcttaccgtctggcaggaggggcagttgtaacatgctgggctgtgatagtacagatgtgtttaaagtgagggagagcccagagcaaggagagagaacctggcatctggtgatggtgtatcaagaacattttaggccagacacggtgactcacacctgtaatcccagcactttgagaggctgaggcaggcagatcgcttgaacccgggcgttcgagaccagcctgagcaacgtggtaagaccctgtctttataatttttttttttttttttctgagacggagtcttcactctgtcacctaggctggagtgcggtggtgctatcttggctcactgcaacctccacctcccgggctcaagtgattctcctgcctcagtctcccaagtagctgggattataggtgcccaccaccatgcccagctaatttttttatatttttagtagagacggagtttcaccatgttggtcaggctggtctcaaattcctgacctcaagtgatctgccctcctcagcctcccagagtgctgggattacgggcatgagccaccatgcctggcctctataaaaattgtttggaagaaattacctaggcctggtgatacacacctgtagtcctagctactcaggaggctgaggtggaaggaggtagaggctgcagtgagccatgattgagccactgtactccagcctgggcaacagagccagaccctgtttcaaaacaacaacaacaaaaacatttttaaggaggaggctgagaaccacgagaaccaagcttggatttgaagaaggatcagggctttctcagacagaaaaggagaggaagaacattccagatagacatcattgagagatggcactgagccttgtaatgggacactgcgaacttttcttcagttgttatgatctttttttttttttttttgagacggagtttcgctcttgttgcccaggctggagtgcaatggcgccatctcagctcaccgcaacctccgcctcccaggttcaagcgattcttctgcctcagcctcccaagtagctgggattacaggcatgcgccaccatgcctggctaattttttgtatttttagtagagacggggtttctccatgttggtcaggctggtctcaaactcctgacctcaggtgatccgcccgagtcggcctcccaaagtgctgggattacaggcgtgaaccaccgtgccttgttggtataattattagtattgatcttttttccttttcatgtgcctcttagtgggccccttgcttttgtcttccttctgtccccagggttgatcctgtgctcagcacataggccagggaagaatgtggctgtgacccagtgtccactcagatgtcctctctcccccagggcacccatactctgtccttagtgtcttttgtctggtgacatcttggcacagaggcagagggcggcctccgtctgattggcgcctggctttggtgacagtaccttaggaaggcagtgtattttctgggaacctaggaaataacaaggtatctaattccatcatcaacactggggacaatttccatggcagaaactatgactctgaatatgcagcgtaaagttaccacccagacactgctgctcctgagtctcgaatggcatcttctgcaggggctcccccacctgcccctgcagaaggtgcagttcgttcatttccaaggagcttgcttttgtgtgctgtctctcggagctctttgggaaacctgtggtagcaggaaacaaaggatttagaccaatgccgatgatccccttgctccgatagagtgtgacatgatgctggtcaccttttggtatctaggaggggggacattgattttgtttgcggaagtgaaatgatccatgctggcctctttttttttttttttttttgagacagagtcaccctatcgcccaggctggagtgcagtggcgcgatctcagctcactgcaacctctgcctcccgggttcaagtgattctcctgcctcagcttcccgggcagctgggactacaggcgcctgccaccacatctggctaatttttgtatttttagtagaggcagggtttcgccatgttggccaggctggtctcgaatttctgacctcaaatgatccgcccgcctcagcctctcgaagtgctgggattacatgcctgagccactgtgtctggtccatactagcctctttgagtgctgaaaggttatctctgtaacttatttagtgagaaccctccatttgcccagggcattactgcctataatgtatgttcacatgtgctatctcctttggtcaataccacacactacaggtgaggaaactgagtctctgctgggacactgggtcaggaagcaggcagttaaggtcacctgtgcacagtggcagcacagggggacagccttctaggtagccagcctggcctgagggttctgtcacttttacctcccactcagtgttgtttctctttctttcccctccttttaagatccctccaggcccaggatctggggacaacgctggtggggagtgatctgggtgtctgtgcaggaaaccgctgcactgggtgagatgggcatgggagactgtgcctggctgaccagagacctcgttttcttccagacagagggggaagacggtggggcctccccacctgccccgcagaagatgcagttctttggccgcctggtcaataccttcagtggcgtcaccaacttgttctctaacccattccgggtgaaggaggtggctgtggccgactacacctcgagtgaccgagttcgggaggaagggcagctgattctgttccagaacactcccaaccgcacctgggactgcgtcctggtcaaccccaggaactcacagagtggattccggtgggtgatgctcagcgggaacatacttctctcctttcactcccccacgtctcggattggaggtcttattggccgagaagcagtttctttgagtctctgtctgaggggtctggagaggggtgggagagaggggagactgtactcttggaccagagggaagggcttccgagactccacacttctggcccatcagtgtcccagcacgaggctgaggatggaagcctgggttgtttctggcctggaggctcgacctatatggacaaagggaagaaggaaggacagggagactgagagtgtccacatcagataaggcccatggggagaacctttagccctggctctttatttttggttttggtttttgttttttgagacagtcttgctctgttgcccaggctggagtgcagtggcgcaatctcggctcactgcaacctctgcctcccaggttcaagcgattctcctgcctcagcctcctgagtagctgggattacaggcacccaccaccacgcccagctgatttttgtatttttagcagagacggggtttcatcatattggccaggctggtctcaaactcctgacctcaggtgatctgcccaccttggcctcccaaagtgctgggattgcaggcgtgagccactgcacctggcctagccctggctctttaagggcatggccgttctcataggggctgcccagggtttgcttaggaaggctggacagagctgttgcctcttggggcatgctgggactcccctgggcctgaagagaaggctcaaaagccaggacaggcctgagggaaccgggccaacggcagagctggttgggaaaaggggagaagcagccaaggttccaaatgcaggccccagcagtgcttggcagactggcatctagttgggctcagacagatatccctgtttccgctcacctatccatctggctgtcctgtcagccatccattcaacatgcaccaagcacctccagtgtctccagagtcctgggcttcgggccagtcctggctggcctgtgagatgacaaacatgtcctgtgtctttaaggaacgtacagtctggtgggggaggtccggtgcaaacaggcgtcatagcaccccttgaggagtgctgtgacagagggagagcctaggaaacagtgtggatcacaaggaggtgattgagagctactctgcgtctggaagagtgaggaggagcctgtgtggcagaacaaaatggataaggtcgttccagccgtgcagaagtgtggaggtgtgagcctgcaggcaggtggctctggttggatcccaggtgcatgcagggctttggtgagagtgaggctgaaggaagcagctggggactcattctgactaaagaggcatggcaggaggggtctctgaaagtgtcaggctgggggccaggggctgccaccaacagaagagcaaggcaggtatcagggccccatccaatcaggtgagaattcagagcctggctccacaaggaacctgaggcagaggcacccacagcaggtgcttgggctaaatgcagctcagtggccagtgcaggcaccagttttaatacagtggggccattccagattctgagtgcagatggggctgagcagaccgccttccagctggactcgatcaggactgaccctggacggggcaggcttgcacttgtagcttcagagctccactgcaggcacagctgaccagggcagcgggtccactccttggagagctggacagccccacttttgaggtacacggccctggggataccactaatctccacgtaccaataatcaccaagttctgtcagttgtaaaatcccttgacaggattccagatttgtctcagccagcttaagccccagtgtgggcagacctccatcccaggaggatttagtcctttgtcagcagcttcttagctacacgtaagctattctgtggtactttatagtttacaggattttttgttttcttttttttttttttttgagacagagtctcgctctgtcacccaggctggagtacagtgacgcgatctcggcttactgcaagctccgcctcccaggttcacgccattctcctgcctcagcctcccaagtagctgggactacaggcacccgccaccacgcctggctaatattttgtatttttagtagagatggggtttcaccatgttagccaggatggtctcaatctcctgacctcgtgatccgcctgcctcggcctcccaaagtgctgggattacaattttacaggatgtttttaagtatgttgggttagcacattctctgccaatccgtggaggtgggcaaggaaggcagtattccattttatgcatgagaaaatagccttgggatgataagtgattcatcccacttatacacaggaagcagtgaagaaacagaatcagtgtcttctggttcccaattcatttctctgtgctgctgtgttgtttccatgtatgtatgtatgtatttatttttttgagacgttaagtcttgctctgttgcccaggctggagtgcagtggcatgatcttggcttacagcaacctctgcctcctgggttcaagctattcttctgcctcagcctcccgagtagctgagactacaggtgcgtgccaccatacctggctaatttttgtgttttttagtagagacagggtttcactgtgttagccaggatggtcttgaactcctgacctcgtgatctgcctgccttggcctcccaaagtgctgggattacaggcatgagtcaccatgcccggctttgtttgtcttatttctaaattttattgatttatttattttcacagtcatagctctggagtcttttttatcttctcccctctaacctgctcccacccgaacctttccatttcagcagatagcatcattgcaacgggctgtgccagatccagccatcacatccacctttccagccaaagggagggtggaagggcaggatgcagaaggtcaatctccccctcctcagggacatttcatggaagttgcacgcattggccagaacccggtcacatggccacagctaactgcaaaggatgctgggaagtgttgcctgtgttgcagacagccacgtgccagtcgaaaatcagaggttctttctccctccgtcttgctgctggctcgcttctccagaccacagtcattgtgcacgtgtctcctgctgctccggctgtggcctgcactcctctcatcctcttccaagctgctgtcacagcgctgtttccagagggcaaatctgattggtcactcccctgctttactccccaagggcttcctgttttcttttatttttatttttattttcattttttgagatggagtctcgctctgtcgctcaggctggagtgcagtggcacaatgtcagctcactgcaagatctgcctcctgggttcatgccattctcctgcctcagcctcccaagtagctgggactacaggcgcccgccaccacgcccagttaattttttttgtatttttagtagagacggggtttcaccatctactcttagccaggatggtctcgatctcctgaccttgtgatctgcccgcctcagcctcccaaagtgctgggattacaggagtgagccaccgcgcccggccagcttcctgttttcttaacacatcaggtgcttaatgacttaaaagggcccagtgtgatcaagtttctgcctctgtgttctcagctcatgccgccttgtgctcctggcctttgcccaggctcttgctgtggcctggaatactcccctttctttgcctgccttccttcctcttgccctcccctgacctgcaggctggattaggagtttctgctgggcatcccatggcacccgtccctgcactggggatcctgctttcctggtaggccacagaccttgtgaggggagggactgtgtctgttgggttcatgacagtgtgcccagcccccagcaggtgcctggcgtagatcaggtttgtggaacaaatgaatgtgatatattaatttagctttagagtattcattgagggctgctgtgtgccaggccctctgtgccacctgggtggagggtggaggactgttgcattgagggcagttgaaggagtgagctgggaagtgggaggtggaggatggggactgggatgcagggtttgaggttatcaggggtcccagaagcagtaatgccaaggcctaggctgtgacctggagtgagggctgcgatggggtggggtggggtcgaggctgtggaggagggtcatcagggcactgctggagccctggggttctccagggccgggggtggtcattgcagtgttctcccagctcctctcaacaccctgcggtctgtggagagcaggcctggtgcactggacttgcctctggccagggctgagtttctgccttctaaacgatcttcctcctgtgttgccctagaggcctctggactgtcctgagtacttgacgcgtgttagagtgagcatgggctgctagccttccgctccaggtggaggagtttctgttgttcttttgctgctgttgctgcagtgagctgccaggctgagcttctggatggacctgggggatggaattaggagcttctgaattcttgggttgtataacctaaggccggagagtcccacagcactgctgctgggcggagagactggaccctgctgatacagacagcgacagcagcaggagcatctgcagtttcccagcaggtcctgcatgcctgggcttggcactagtctaagtagtaactcatgttatcctcacgacagtcccacgaggtggggtcattactgacctcctattacagatgaggaaacagaggcttgcagaatttgagatcacacagctggtcagcgtagcgattattcagaccctgtcacctggctccagaacccactcgtttacctttcttacatcagggctgctttgtagtgtggcgagctgagtggagctccacccgcctgggctgatcctggcccttcctgcctgacctatggtgcgggggccctggctctccccgtgtgagcccccaggggtcacttgtaatatgcctgtgtacactatgatagcatagatacttctgttcctggtacagattaatcatttacggctggcattgacttgtaacagatgacatttgatgaaatcaaccagcctctcactggtatctcagcagaaacagggctgtacctcccaggcatcctgggaaggatgatagaagtgtgtgatctgtgcttccctaccgggagctgacttttgaggctctctggactgggactttgccataaaactgcttatcagaaacctcagataagtggagtgccctgtgtcctggccacgtactctggggccagctcctccatccattcagtcctcccacatcccatcttcaccaagcagagtggaaagcggcaggtctctgcgagaaaaggaggctctgtacccagccttcagtgagataactttagagtggggccttgtattccctacacaggccttgtccccgacacggcctctttgcccttgcttctccttctgctaagaatgctccttcccaactccttggctggacacacggctcctgctctgtgggcctgtcctgttcccactcagagcctcagcaccccccatgtggccaagacacagcccctcttgccttaggttgccgtgggtctgtttccacatctgtttcccctccagactgcagggctcctgagggacagggcctggggccaagtctcctctgcgttcctgatgcctggtggtgtgccacgctctccgtgggtgcacggtaaatatctgccgagtggctagatgtatccatggttgctgaaggccaagtgtgttgaccagagggcgtgggaaaggctccactggggtggctggggtagagatagaccttaaggggtccagaagactccaccagctggagggaaaggccctacagagacaaggtactaggaaaggcccagaggacagaggaggggccctgtggggagcctgtgggcaggaagggcctgtgctgggctttgaaactggggactcaggtactgctctagcgtgagggtccttggcattttttttggtccaggaccccctgaggtccctggggaatgagaacaggctcacacagccactttcaagaggtttgcaggtcccctgaggcttagccacagacccctcccaccccagcagagacacagcagaggcttctgagtggaggccaggtggcttcagcctggggttctagaagggagggaagagacacacccccgtgtgtcctccagagcctcagccttctccctgaatctcccctttgcctcctcactgtaacccacacctggctctccttgaaggacccgcttgccccgcagcctcctgagagttttctctcccagtccctctcccactgggcctggaggtggggtagggtcctccttgcccccagccttgaatcttctgtcaccctacaataccacttgctgtcaccccggtgataggtatctacgagcctggggtgctcccccacatcctcaaagatgtgagcccctgactcagcgttgcctctggttcctgaccctccacattcacatgaccacgcgctggcctttatcatcgccagtgacagcagctctcccgtaaatacaagtttcaagcaccccactttccagtctctgccttctgtctttccagttcattccctctagtcctccacccacacagtgcttttccccattgacagggaattgctcctggccgcttttcccagccccatcccgttcatgtgccttgctttgtacccagcatggactccatggcctgtcattgtcactccttcacctatacttcctgcctccttgcttctctctctcttcgtcatcctggcatcaccaccccagaactgcttggtttcagttctccaccatggctaggggaacatacctttttgctgactgctctcactttctttttttttttttttcttttttttttttttgacacagagtctcgctctgttgcccaggctggagtgcagtggcacactctcagctcactgcaacctccacctccggggttcaagcagttctctctgcctcagcctcctgagtagctggtattataggcacccgccaccacacccggctaatttttgtattttttttagtacagacagggttttgccatggtggccaggctggtcttgaactcctgacctcaggtgatatgcctgccttggcctcccaaagtgctgggattacaggcatgaaccaccctgcccggccctattgctctcactttgaaatcacgacatgagccacagtgagcctatgatgtggtttgacgtctttctgcatttctctgttcacccctctcccagaaggcatgcctccttccctcccctcagcctgcagccccttcccctccacgcttactctcagctgatagccctgctgctgtctcgctgagaaaatagaaatagccagaggagaattccctctaccccatgcacacacctctgtccccgcctactccacattccctgttgtcagcaccgatgtgtttagctgagggtggtccccccattcaaggccatcatctcctgtcatctacttcttgacaccatttgaacaattatctcccctctttcctacataacactttccccttttctactatatattttttgctatggattgaaagtatccccccgaaatcatatgttgaagccccaatccctcgtgtgatggtattaggaggtagagcactatgggggtgattaggtcatgaggatggagccctcatgaatgggattagtgcccttagacgaagaggcaagaaagagatgatctgtctctgccatgtgagggcacaacgagaagatagccatctgcaaaccaggaagtgaaccctcatcaggaactctatcagccagcaccttgatcatagacttcctagcctctagaactgtgagaaataaaggttgtttaagcctcccagtctgtagttttctgttataatgtcctgacctaagttattttccatcgctatacaatgggttatttttttctttaaaaaaaaattatttcttgactctactttttcctccagagactgcttatattccactgtcttcattcttctcctcctgttttctctctttaaacttttcaaaaatagcaaaatataacacatatagagaaaatgatatacagctcagtgatttatcacaaacacctgtgtaaccaccactcgaatctagagataggacattacagcaccccagaagccctccttttgtcccctcttcccaaagaagggtaaccaataacttgccttttatgataaaggctttttttttttgagatggagtctcactgtgttgcccaggttggagtgcggtggcgcaatctctgcttactgcaagctctgcctcctgggttcacgccattctcctgcctcagcctcctgagtagctgggactacaggtgcccgccaccacgcccggctaattttttgtattttagtagagacgaggtttcaccgtgttagccaggatggtcttgatctcctgacctcgtgatccacctgcctcagcctcccaaagtgctgggattacaggcgtgagccaccgcccccggccaagataaaggcttttctatctggcttctttgttagcattttgttggcgagattgatacgttttgtgtgcagctgtctgtcattttcattgcaatagaattccattgtctactatatcacagttactcattctactactgatgaaaatttgggttatttctagtttttttggtgcatacatgcatacatttctggtagacatacctagaagtgaactggctgcattatgggccataacttgtcttcaacgttagtaaataataccgcccgtctgttttccaagcagcagtaaatggcactttctgttacttcatatcttctgttacttggtactgtcaggttttaaaattttagtcattctgtcgggtgtctagtagtatgttattgtggttttattttgcatttgcctgattgcaaatgaagttgagcactttttgatacagtgattaaccatttggatatcctcttcagtgaagtatcagctcaattctcttgactatttaaaaaataaagttgtttatctttttcttacagagttttaggaggagttttttggtacatgtgcagtccaaatacacaccttttgtcagtgatacgtgttcagctgcacacacggtgttttgcctttttattcttttaatggtatctattgataaacatgagttcttagttttaatgaagtcaaatttgttcatcttctttacggtgtactttttgtgtcttgtttaaggaagtccttctctatcttaaagctttgagaagcattccttctttctcctattttctaaaaattgttgaagatctccttccttccttccttccttccttccttccttcctttcatctatctctctctcacccaggccaaacttcagtggcatgatcatggctcactgcagcctcaacttcccaggctcaagtgatcctcctgcctcagcctcctgagtagccaggactacaggcacgcaccaccatacctggctaattttaaaaattttttgtagagacacggtctcatcaagttacccaggctggtcttgaactcctgggctcaaacaatcctcccacctcagcctcccaaagtgctgggattacaggcatgagtcacatgtctagcctgtattctttctttcttaaatgtttggaagaattcatgggtaaaaccatgtgaccctggagtttatttgtgggaagcttttaaaacatggattcgatttctttaacaaatataggactatgagattttcatctcatgtcggtttgggtatgttgtgttttcaaggaatttttctattttatcgaagttgtcaaatttgtctgcaggtccccttatttcctttttaatgtatggaggatctgaagggatggtactttgtgttgtctctatttcttgtttggttttgctagtgatttgccaatttaaaaaatctttccaaagaaccaacttttggctttgtttattttttgaaaacctgagtagctgggattacaggcgcccaccaccacacccggctaatttttttatttttagtagaggtggggtttcaccatattggccaggctggtctcgaactcctgacctcagatgatccacccgcctcggcctcccaaagtgctgggattacaagtgtgagccagtgtgcctggcaagccgctttttaaatggcaccaatcccattcatgagggcagagccctgatgatcgaattacctcctaatggccccatttcttaatactatcacactgagaattaagttttaacataagaattttaggaagacacaaacattcagaccatggaacatatataaaacagttgtcctaccaactaacagaatacacattcttttcaagaacacctatataaaaattatagacactgacctatgctggccataaagcaaatatgaacaaatttcagatacctgaagagatttagactatgttctccaactacagtgcaattaagctagaaatcaatagcaaaaatgtaactataaatgagcccgtatgtttgaattttaagcaagatatatgtaaattatctatggttcaaaaaagaagtcacagtgaaatttagaaaatatcttgacgtggcgggttgcagtggctcacgcctgtaatcccagcactgtgggaggccaaggcgggtggatcacctgaggtaaggagtttgagaccagcctggccaacatggtgaaaccctgtctctactaaaaatacaaaacattagccaggcgtggtggtgggcacctgtggtcacagctacttgggaggctgaagcgggagaatcacttgaacccgggaggcagaggttgcagtgagccgagattgcaccactgcactccagcctgggcaacatgagtgaaacttcatctcaaaaaaaaaaaaaaaagaaaagaaaaagaaaatatcttgacccaatgatgatgcaaatactacgtatcaaacttgtaggatgaacttccacttctggccatgacagaggagcctgtatcagactagccttcctatttatatatttatttttgagatggggtgtcgctctgttgcccaggctggagtgcggtggtgcaatctcagctcactgcaacctccacctcctgagttcaagtaattctcctgtcccagccttccaagtagctggaattacaggcgcccaccaccacacccagctagttttttatatttttagtagagacggggtttcaccatgttggccaggctggtctcgacacctgacctcaggtgatccacctgcccctgcctcccaaagtgccgggattacaggtgtgagccactgcgcctggccgtgagtgacctttttaatgtgttgttgaatttgatttgctggtattttgttgagaagttttgcatcaatatccatcagggatactggcctgtagttttctttttttatatgtctttgtctggttttggtgtcagggcaatactggcctcatagaatgagtttggaagttttctctcctctgtttttcataatagtttgagtagggttggtattagtttttgtttaaatgtttggtaaaattaagcagtgaagccactgggtcccaggcttttctttgctgggagacttttcattacagctttgatctcattacttgttattggtctatttaggttttggatttcttcacggttccatcttggtaggttgtgtatgcctaggaatttatccatttcttctagggttttcaatttattggcatataattgttcacagtaacctctaataatcctttgagtttctgtgatattggttgtaatatctcttttgtcatttctgatttttttgtttgggttttctctctttttttgttagtctagttaaagatttattgattttgtttatcttttcaaaaaactttattttgttgatcttttgtattgttttgtttcaatttcatttatttctgctatgatctttattatttcttttcttctactaattttgggtttggtttgctcttttctagttctttaagagacatcattagattattttgaagtttttctacttacttgatgtaggtgcttataggtacaactttcctcttagtacttctttccctgtatctcacaggttttgatatgttgtgtttccattatcatttgtttcaggatgtttttaaatttccttcttaatttcttcattgaccattcaagagcatattatttcatttccatgtgttcgtatggtgtgcaaaataccttgtttttgatttgtagttttatttcattgtgatcacagaagatacttgatatgatttcaaatttaaaaagtaatttggctgggagaagtggctcatgcttgtaatcccagcgctttgggaggccgaggcaggcagatcacgaggtcaggagatcgagaccatcctggctaacacagtgaaaccccgtctctactaaaaatacaaaaaattagccaggcatggtggcaggtgcctgtagtcccagctactcaggaggctgaggcaggagaatggtgtgaacccgggaggcagagctggtagtgagccgagatcgcgccgctgcactccagcctgggtgacagagcaagactctgtctcaaaaaaaaaataataacaataataataatttaagacttgttttgtggcctaccatatggtctatccttgagaatgatccatatgctgaggagaagaatgtgtattctgcagccgttggatgaaatgttctgtaaatatctaataggttcatctgatctatactgcagactaaggctggtgtttctttgttgattttctgtctggatgaactgtctaatgctgaaagtggagtattgaagtctccagctattattgtattgaggtctatctctctctttagctctaagaatacttcctttatatatctgggtgttccagtgttgagtgcatatgtatttaaaattgttacattatcttgctgaattgacccttttatataatgaccttctttgtctctttttatagtttttgtcttgaagtctgttttgcctcatagaatagcatagctattcctgctcttatttggtttccatttgcatggaatatctttctccatccctttagtttcagtctatgtgtgtctttacaggtaaagtgtgtttcatgtaggcaacagatcactgggtcttgtttttctatccgttctgccactctgtgtcttttgattggagagtttagtccatttatgttcaatgttattactgacaagtaaggacttactcctgccactttattaattattttcttgttgctttgtgatcttctttctttccttcctgttctccttttagtgaaggtgattttctctggtggtatgttttaatttcttgctttttatttttttgtgtgtatctgctgtatgttttttgatttgaggttaacatgaggcttgcaaataatatcttataacctaatattttaaactgatgacaccttaacactgattgcataaacagacaaacaagcaaagagaaaactaataaaaactctacattttaactttgtccccccactttttaacttattgtactgtttatgtctgaaaagttgtagttattatttttgattggttcctcttttagtctttctactcaagatatgagtggtctacatatgacagtgttataatattctatatgtttctgtgtacttgctattaccattaagttctgtactttcaagtgatttcttattgctcattaatgtccttttctttcagattgaaaaactccctttagcatttagcagtatgtgaactgcatttttcaagtccagaatttctgcttgattcttttttttttttttgagatggagtcttgctctgtcgcccaggctggagtgcagtggcgcgatttccgctcactgcaagctctgcctcccgggttcacaccattcttctgcctcagcctcccgagtagctgggattacaggcgcccgccaccacgcctggctaattttttgtatttttagtagagatgggatttcaccatgttagccaggatagtctcgatctcctgaccttgtgatccgcctgccttggccttccgaagtgctgggattacaggcgtgagccactgtgcccagcctgcttgattcttttaaattatttcaatctctttgctaagtttatctgttaggattctgaattccttctctgtgttagcttgaatttcactgagttccctcaaaacagctattttgaattctctgtctgaaaggtcacatatctctgtctctccagaattggccactggtaccttaattagttcatttggtgaggtcatgttttcctgtatggtcttgatgcttgtgatgttcgtcagtgtctgggcattgaagttaggtatttattgtagtctttgcagtctgggcttgtttgtatctgttcttcttaggaagactttccaggtaataaaagggacttgggtattgtgatctaagtttttggtcactgcagccatatctgcattagggggcaccccaagcctactaatactatggctcttgcagactcgtaaaggtaccacttgggtggtcttggataagatctggaagaattctctggattaccaggcagaggctcttgttctcttcccttactttctcccctaaaagtggagtctctctctctgtgctgggccgcctggagctaggagaggggtgacacaggcacctctgtggccactatcactaggactatgctggctcagacctgaagccagcacagcactgggtctcacccaaggcctacagtctccactgcctggctactgcctacgtttgcttaaggcactagggctctacagtcagcaggtggtgaagccagtgagattatgtccttcccttcaaggcagcaagttccccctacccccatcctgggaaggtccttagatgccatctgggaggcagggcctgcagtcagaaaccttagtaatctccccagtgctctattctattacagcctggctgatacccaagccataaggcaaagtccttcctgctcttccctcccctttccacaagcagagaagtctctctccatggccaccactgccccagccctgtggcagtgctgccaggccactgccaacgttcattcagggcctaagggctcttgaagcaactgaacactgccaggcctgggactctccctttagggtagtgggctcccctctgacccagggcaggtccagaactgccaccccacagccaacacttagaatctgggaccccaagagccctcttggtgctctgccacactgtagctgagctggtacctaggctgatttttgctttttatgaaggtacttttttgtgtgtatagttcaatttggttttcctccagggaggacaattggtggaggtttctatttgggcatcttttttttttttttttgagacggagttttgctctttcacccaggctggagtgcagtggcgcgatctcggctcactgcaacctctgcctcctgggttcaagcgattctccagcctcagcctccccagtagctgggattacaggtgcctgccaccatgcttggctactttttttttcaattaaaaagtaaactttaatgtcgaaaatgcaaacttggggaaggcagaaagatcacacacaaggctgtcgcttcacacttggaaggttgcacggcggccaggagaggcactcctcacttcccagacagggcgggggccgggcagaggcgctcctcacttgccagacggggcggcggccacatgcctggctaatttttgtatttttagtagggacggggattctccgtgttggccaggctggtctcaaactcctgacttcaggtgatccacgcacctcggcctcccaaagtgctgggattacaggcatgagccaccgcgcccagccctatttggccatcttgctttgcctccaccttcatttgataacagaacacccccatgtaaccaccaccacaatcaagatataagacatttctgttattctccaaatttccttcaccctcctttatagtccatggcacccaccccatccctgggcaacacctatgtgcttcctttttttttttccccgcaggaggacgtcttcctatacctatgtgcattccatcactgctgcttttaatcatatagcgtgtagtcttatgagtctgactttttcacttagcataatgcttttgcaatttgtgattgagcgttttcatatgattctgttttttctgtctcttagcttggaagttatacactttttagtagtaactgttgggagatcgttctccaagagtctctctcatatttccatacatcctgctagcagagacattgactacctgtttttgtctgtttagtgttgctataaaggaatacctaagtctgagtattatacatagaaaagaggttttatttgtctcatggctcctcaggccatacaagaaacatggtgccagcatcttaccagtgtcacatggcaagaaaggaagtgaggaagagaaaataagttgttaactggttgttaaaaagtgccaggcacgggccaggcacagtggctcgtgcctgtaatcccagcactttgggtggccaaggcgagtggatcacctgaggtcgggagttttgagaccagcctgaccaacatggagaaaccctgtctctactaaaaaaaatacaaaaaaattagctgggcatggtggtgcatgcctgtaatcctagctactcgggaggctgaggcaggagaatttcttgaatccaggaggtggaggttgcagtgagccaagatcacctgggcgacaagagcgaaactctgtctcaaagaaaaaaaaagtgccaggctctttttaacaaccagttcttacaggaactaatagagtgaaaactcactcacccccaccccacagggagggcattcattcatgagggatccacccctatgacccaaacacctcccattagccccccacctccaacattggaatcaaaatttaacatgaggtttggggggcagaaatccaaattatagcactacctttgttccaggctaccttcaaaggatgtttatacagcaaacagccttggaaaatagagttagggtctccttgtagagcacagggtaagtttgcttacttttcagcataatcaagattgtgtcttcttctggagcaaaactttgacaacaacaagcggggcaaagtctgaaaccttttgcacatcttgacagaaccttagagattacgagatttatctctgccttactcaaggtccattagtatcttccagaacaataagttggtcttagaatcctttagctatgtattcccttccaggcttcgatgctgtgtgctgttgttttatttagtttttattttaaacccaacaagacgctataccatcaatacttatttagatccccccacatatttaacttgccatggtgcttcattctttcatgcctctttaagcatccatctaggatcgtgttcattccacatgaagagaaagcttttggcccagcacgatggctcacacctgtaatcccagcactttgggaagcctaggcgggaggatcgcttgagcccaggatttccagaccagcctgggctacgtggcaaaaccctgtctctactgaaaatacaaaaaattagccaggtgtggtggttcacgtccctgctactcgggaggctgaggtgggaggattacttaaacctgggaggttgaggctgcagtgagcgttgattgcaccactgcactccagcgtgggtgacaggagtgagaccatgtctccaaaaaaaaaaaagaaggaaagaaaaagcttttgtatttcctttcgtgtaggtctgctaatgacaaagtctctgggttttttgtttgactagagaaatgttttaattttaaccttattcttgaaggttttgtttttgttttcattttgttttgtgtgctaagtacagaattctcattggcatttatttatttagagacagagtcttgctctgtggcccaggctagagtacagtggcacgatctccgcctcccaggttcaagcgattctcctccctcaacctcctgagtagctggggctacaggcatgcaccactacacctgactaatttttgtatttttagtagagacggggtttcaccgtgttgcccaggctgatctcaaactcctgagctcaagtgatttgcctgccttggcctcccaaagtgctgggattataggcatgagccgccgtgcctggccagcatttattttcttttcagctctttaaggaagtcattccattatctctgggttccattgttgagaagccagctgtcattctaatggttgccctttgaagataacttttttccctctgctattttaaatatttcctccttgtattttattttcaacaggtgtaatgtggcacatatatcagcaattgttatgttacatacaatacatattgtgcaacatatgtatcattatcagttattgctgtgtaacaaactactccagaacacagtggcttataaaaggaatcatttatttagtccttaaatctgcaatttgagcagagctcagtgggaaagcctcagctttactttatatggcaccatataaggtaactcgcaactggcaagttggtgctggctgttggctggtagttcattcagggctcagggcccaggaccaagagtcgtcaccatggcttgcttcagcctccttgaggcatgatggctgggtcccaagagaagagaaatagaaacttccagtctcttaaggcattggtctggaagctgggacggcatcacttttgccatattctgttggtaacgcagttacatcgccagattaaagggtaaagagatacaaattcccactgctcagtgcaaggaatatcagtgattttagggggccctgttttaaaacccctacaaggtgctaagcgtggatttctggggctttcttgttttttgtttttttctatgtgtttttttttttttttttggtggtggggtcagggagggcttatagggtatgttaaatcagcagaataattttatttatttatttggagatggagtttcactcttttgcctaagctggagtgaagtagcgtgatcagagatggagtttcactcttttgcctaagctggagtgaagtagcgtgatctcggctcactgcaacctccgccccgctggttcaagcaattcccctgccttagcctcccaagtagctgggattataggcacccaccgccacgcccggctaatttttatatttttagtagacatggggtttcgccatggctagtctggaattcctgacctcaggtgatccacccaccttggcctcccaaagtggtgggattacaggtatgagccactgtgcctgacctataatgttttttaaaaatcagttttggaaagtttgcagacattaacttttcaaatgtagcttccatttgattctttttctactctgcctctgatcctccacttatgtatgtatgctagatcttttattagatagtctgtgtctcttatgtactctactatattttgtattcttctgtctctccatgctttattctgtttactctttcctgattatattttttaattttgtaatttccatttgatgcttttttgatcattcaaaactcttcaccaaaattctaaatttccttttttaacctctcgaatgttatcacagttactttaaagtctattttggataacttaaatatttacagtcccctcacagatatgtttcttttgtatattgtttctgttggttttctttcatgtcttatctccacatatgcctggtgagttttgattatgtgttggtcattgtatttgcaagtatgctcgtagaaataatctggaatggccgggcgcagtggctcatgcctgtaatcccagcactttgggaggctgaggcaggtggatcacgagatcaggagatcaagaccatcctggctaacatggtgaaaccccatctctactaaaaatacaaaaaattagctgagcatggtggcacgttcctgtaatccctgctactcgggaggctgaggcaggagaatcacttgaaccaggaggcagaggttgcagtgagccgagatcacgccactgcactccagcctgggtgacagagcgagactccgtctcaaaaaaaaaaaaaaaaaaaaaaaaagaaataatctagagcctagtttgatgtttccttacaaagaatgaatttatttttgcttctcccattgcaactaggataacctcagtctagtttctggaactgaaatcacttgaggctgaactgtggtctctgtgagagcgtgtctgtgtatggctcacccttattcctaggctacgtagttctttaggaccctaacccaaagtaagagatgttcatcagggctctcctcttggcagacgcctgggctccagtccctgtgtcctgagccccatgaggctgttactggtgctgctcgtctgcccatcctctccagtaacagccacctgaacactgcaattcctgggtttccatcattccttccagcctggtgagtcatcagtgtcttttgaggtatccagtgcctgccagcagatgttttttaataatttgtccagcatttctggctgtcctcagtaggtggtctgtttcacattccctagtctgctgttaatggaaagtggaagttctgagagagaatcatcgttcccgtcagcattcaaatgcctgattacactttccccattcgctatcctttcctttatttgctcctcaccacagcaaaactcctcaaaaatatctatctttgcaatcttcagattctcacattgtgtccttaaacccactttaatcaggccttggttccctccattccactaaaagtaatgttgtcaaggtcgtgcatgcctccgtgatgctaattccagtgatgagttttcagttgtcattctctgacatatcggcaacacttgatgtggagtaccctgatgttgagaggctggtgagatgaaggaaaaacccagccaagggcaatgaggaatggcttccttccgcctcctccttccctatctttgttgtggtttttgttgtttctgtaacactgattacgttatagtttatttaatgtacttccttattctatgtttttactttagtcattttgttgatctcctccataataacataggctcgggccaagcacagtggctcacgcctgtaatcccagcactttgggagaccaagatgggtggatcacttgaggtgaggagttcgagaccagcctggccaacatggcgaaaccctgtgcctactaaaaatacaaaaattagctgggcgtggtagcaagcgcctgtaatcccagctactagggaggctgaagcaggagaattgcaggagaatcacttgaacccagggggcagaggttgcagtgagctgagatcgcgccactgcactccagcctgggtaacagagtgagactctgtctcaaaaaaaaaaaaaaaaaaaaggcttcaggagggcagagcattttatgcaattgttcattaattgacccctccatttggcacagatcacatgcccagtagttaactgttaatcaacgcactctctgtggaacaacaggctggtcccgttgagccaacactctctgggcactgccttcactagactctggctggctgctgcgcttgtagaggtatgcaagacaaaaccttttggtatgttaaaagccctggtcagaactttaagtaaccatcactgacatataatggttatggttttgaaagtgcttttatagtggtttttcatctgtcctcacagcacctctgggaggtaggtaggacaggtacagttagtctcatgtttcaaatggggctcagagagggaaaaggatttcccaagatcacacagcaccttagtagcaaaacttggactcaacctcaacacttaaaaatgaacaaagctggccgggcgcagtggctcatgcctgtaatcctagcactttgggaggcccaggcaggcaggtcacctgaggccaggagtttaagatcagcctggccaacatgacaaaactctgtctcttctaaaaatacaaaaaattagccgggcatggtggcgggtgcctgtaatcccagctactcaggaggctgaggcaggagaatcacttgaacctgggagatggaggctgcagtgagccgagatcgtgccattgtactccagcctgggcaacaagaatgaaactccatctcaaaaaaaaaaaaaagaaaagaaaagaaaaagaaaagtttccctttttttaaatatctcattttaatgactgcataatagtttattacatagttataccataatttatataatattttgttgctgtacatttaggttaaacaatacttacttagttcctactatgaagaggggccaagtactcgaggctggagctctcacatgtggcaatgaaattagaaagtggatatggcagggctgtggtaaaataaaatataaaaataataaatgatattaccaaagaaaaggaaagtttttcaaaataaaggaaaatctagacaagcatagtggctcacacctgtaatcccagtacttttggaggctgaggcaggaggaacacttgaggccaggagttcaagaccagcctgggcaacatagcaagaccccctgtcaacaaaaataaaaaaaaattaggccaggcacagtggctcacggtggctagtgcctgaaatcctagcactttgagaggctgaggggggtggattgcctgagctcaggagttcgagaccagcctgggcaacatggccaaaccccatctctactaaaaacacaaaaaattagccaggtgtggcagcacacgcctttaatcccagctactctggagactgaggtaggagaattgcttgaacccgggaggtgaaggtcgcagtgaggtgagattacaacactgcactccagcctgggtgacaaaatgagactctatctcaaaaaaaaaaaaaattagctgggcatggtggtgcatgcctgtaatcccagctactcaggaactaaggtaggaggatcccttcagcccaggaattcgaagatgcagtgagtcatgatcacaccaccgcaccccagcctgggttacagagcaagaccttgtctctaaaaaacaaagaaagtctaacctaaacgccattatgtcatttacatgtgtataggggtgtgtgtgtgtgtgtgtgtgtgtgtgtgtgtgtgtgtgtgtgtgtgtgtttgcttgggaggggagtcgggctggagctggccaggccgcagcctggggaccttctgattccagcagggatgtgggccgagggtcccgccttactcatttcgggtcttgctcctctgtcctggctctacagactcttccagctggagttggaggctgacgccctagtgaatttccatcagtattcttcccagctgctacccttctatgagagctcccctcaggtcctgcacactgaggtcctgcagcacctgaccgacctcatccgtaaccaccccagctggtcagtggcccacctggctgtggagctagggatccgcgagtgcttccatcacagccgtatcatcaggtgagcaagggaacaagaccatttggacaacgtgtgtgtacctgcttgtgtgggcagtgggggccgcaggcctcggttcccctccatagtttgacttaaaaaggagcagggcctggcatggtcgctcactaacgcagtcccagcactttgggaggctgaggagggaggatcacttgagactaggagttcaagaccagcctggcaaaatagcaagaccttgtctctacgaaaaaattaaaaaattagcatgtgtctatactcctagctacttgggatgctgaggcaggaggattgcttgagcccaggagttagagtttacagtgagctatgattgcaccactgcacttcagcctgggtgacagaatgagaccttgtctctaggaaaaaaaaaaaaaaaaaaaaaaaggtgctgcgttgctaccagattaaaatgtaagaaggacaatgtaatgtttccagagtccggagtgctcaccaggtgccaggtctgtgggagctgatttctacccaccatgaaattgaattttcccaacccccacaaggtatcgtcattttattttactttattttattttattttattttattttattttattttattttatgttacgttatgttattttattttgagacggagtcttattctgtcacccaggctggagtgcagtggcgcgatcttggctcactgcaccctctgcctcctgggttcaggtgattctcctgcctcagcctccggaatagctgggattacagtaatgtgccatcatgcccgggtaattttttttttttttttttttttttttgagacggagtctcgctctgtcgcccaggctggagtgcagtggcgcgatctcggctcactgcaagctccgcctcccgggttcacgccattctcctgcctcagcctcccgcgtagctgggactacaggcgcccgccaccacgcccggctaatttttttgtgttttttagtagagacggggtttcaccatgttggccaggttggtctcgaactcctaacctcaggtgatctgccctccttggcctcccaaagtgccgggattacaggcgtgagccaccatgcccggcccaggtatcatcattctagagagagctaacaggacttgtgcaggtcactcagccagagagggtgaaagaggggcttggatccttggtgtctgcccaggctgctcttctggaagctgaaggcctccttttgtgaatccattcagccagcagatggagcagctgttgcccctggtgagggcactgtccccacccttgcacagggcaccagttggccatcttgtgcagaggtagccacacctcctctgagtctctatcctagatagctcagttaagctcccaggcccagaactcaaaacctcactgctggccgggcgtggtggctcacacctgtaatcccagcactttgtgaggccgaggcgggtgtatcacttgaggtcaggagtttgagaccagcctggccaacgtggtgaaaccccgtctctactaaaaatacaaaaaattagcaaggcgtggtggcgcacgcctgtaatcccagctactcgggaggctgaggcaggagaattgcttgaacccagaggcggaggttgcagtgagccgagattgtgtcactgcattacagcctgggcaacaagagtgaaactccacctcaaaaaaacaaaacaaaacaaaaaccctcactgcactttagtttccaggcgtgcttttggacagcactgtctcatctcaccatcactctgtccatttcctggggcaggcacagcagcttgtgtcgataaggatattgacgcccagaaaggttaagtgaattgcctgaggctagtgagatatccgtgttctgtgaccctttcctgtgccaccaccctgcccacttcctgctggtgtggccctggggcccatctcttgtacgagtgagcaaactgaacagaaacctgatacaggtcacatcagatataattacattcaaatcagcccaactagctgagtggcgggaatgctcttgagctcaaataaaccagaaagtccgagtttccgagtgcacttccctgcatgtgcacttaggtccccctgccaccttgtaccacacctgctcacctctgctcaccctggccctctcctgcagctgtgccaattgcgcggagaacgaggagggctgcacacccctgcacctggcctgccgcaagggtgatggggagatcctggtggagctggtgcagtactgccacactcagatggatgtcaccgactacaagggagagaccgtcttccattatgctgtccagggtgacaattctcaggtgctgcaggtgagcagggggaggggcagggtgactggtactgatacctcccggtgtccacggttccctttgggcccctaggctcaggtgtcactctcaggcctctcactgtcccccattggtccttgaggcctgagctccttcatggagggtgcagacccctccctggctcttccctcccagcccttttccaggagccacgtcctcagtctctttgcttgataaacctggggacggcctccaacccagcaaaataaaccccaaaaaaggcccagctccagtcagttagttcagttccacttttcctgagcacaaactgtgagccagatgcctgcctggaggggctcgtgggccagcgggacctgggcttaaccttttgcaagcttgtccaatctgtggccctgcaggctgcatgcagcccaggacggctttgaatgtggcccaacacaaattcacaaactttcttaaaacattatgagatccatgcatggaccttttttttagatcagctgttgttagcgttcatgtattttatgtgtgacccaagacaattcttctgatgtggcccagggaggccaaaatattggacaaccctattttacaggaattcaaaccaagcaaaccaaactgtctccagttcctgtaggcatttgtgccagaggccctcctgttaacgtttttgattacctgggcaaaagatgtgattttttaattgtgggcaagcagatggggtgatactattaaatagctatttcatatattagattgaacagaaaaggcaggatgttggattatgttttattgtctagaattagaaaattcttctaaagatcatgttctctctgccttggcatcagaatgcaactacgttataccagaaaatgtggattcctttttttttttttttttttttttttttgagacagagtttccctatgtctcccaggctagagtgcagtggtgcgatctcggctcactgcaacctccacctcctgggttgaagtgatgctcgtgcctcagcttcctgagtagctgggattacaggcatgtgccaccatgcctgggtagtttccgtatttttagtagggatggggttttgccatgttgcccaggctggtctccaactcctggccttaagtgatccacctgcctcagcctcccaaaatgccgggattacaggtgtgagccactgtgcccggcccagaaaatgtggattcatatcttatgcttcttgctctcagggaagggaattctccacccactgttgaactccactttcaccgagaatcctctgcgcacccagcatggtgccgcgcagaccctgcctccatgcgggggtgtgcacacccgcttctcgatagtcatgcacgactgcagctgtcctttatccggtgctgattggtgcctgaccttgaactgagtgttgtatgtgttccagttaattcttagaatacactcatggggtggaggtcattattcccctttcctctccgaagaaactgaggttcagtgttgttaattaagaagcgtgcccagggagggccacaaagctgagagagtggggcttgaccttacattggcctcgatgccagccctttgctcttcctgctgtgtctctggcctgccttcaggtccagtgggactgctgtgaggtgaccctggtgtcacatgggtacactgtggttgtaatgaacctcatggggacagcactgagccaaaagtgagacagtaaaaccctcctagcactttcttttttttgagacagcatctagctctgtcgcccaggctggagtgcagtggtgtgattgtggctcactgcagcctcaacctcctggactcaggtgatcctcccacctcagcctcctgagcagctgggactacaggctcgtgccaccacatgggctaattttttttttttttgagacggagtcttgctctgtcgcccaggctggagtgcagtggcgcgatcttggctcactgcaagctctgcctcccgggttcatgccatcctcctgcctcagcctccagagtagctgggactacaggcgcccgccaccacacccggctaattttttttgtatttttagtagagacagggtttcaccgtgttcgccaggatggtcttggtctcctgaccttgtgatccgcctgcctcggcctcccaaagtgctgggattacaggcgtgagccaccacacccaggccacgccagctaatttttaaaatttttttggtaaagatggggtctccctatgttgccgaggctggtatcacactcttggtctcaagtgatcctctcacctcccagtgtgttggaattacaagcatgagccactgcgcctggcccctggctctctttttaatactgctgttctttcattgaaaacatagtacctgcatgtagaaaaaaatcagtcaggacagaatgaaaagcaagaatcattcccacctggacccccagtgcccatcctgagatacagctaccttttaagttccttgactcagaaatgtttcatgtgagccacagtcatgccaggtcgaccccttccctcccatccacactggcacttggctttcctggtgcttctctttacgttctttttttttagacagagtttttgctctattgcccaggctagagtgcaatgatgcaatctcagctcactgcaacctctgcctcctgggttcaagcgattctctttcctcaggttcctgagtagctgggattacaggtgcctgccaccatgcccggctaatttttgtatcgttagaagagacgacatttcaccatgttggccaggctggtctcaaactcttgacctcaggtgatccacccaccttggcctcccaaagtgctaggattacaggcatgagccactgcgcccggcctctttacgttcttatcagcatcctatggagtcaaacttcccttcctctttcatcagctccttggaaggaacgcagtggctggcctgaaccaggtgaataaccaagggctgaccccgctgcacctggcctgccagctggggaagcaggagatggtccgcgtgctgctgctgtgcaatgctcggtgcaacatcatgggccccaacggctaccccatccactcggccatgaagttctctcagaaggggtaagacctcctcccctccccatctgctggcctgctgggctccagctctcctgtcacctgtcccgtgcctgaggcaagcagtatccaccatagatcttagcatctccagcctcagagcagaggccccgggttcacaagcctcattaggccccgcctggcccaaagaaggtgctccatcattgtatcatgggtaggaatctcggttcacaagttcagctgtgcaaggaggagactttaaaatttttctggctgggcgcggtgtctcacgcctgtaatcccaacactttgggaggctgaggtgggcagatcacctgaggtcgggagttcgagaccagcctgaccaacatgaagaaaccccatctctactaaaaaatacaaaattagctgggcgtggtgacacatgcctgtaatcccagctacttggaaggctgaggcaggagaatcggttgaacccgggaggcggaggttgcagtgagccgagatcgcaccgttgcactccagcctgggcaataagagcgaaactgtctcaaaaaataaataaataaataaataaataaataaataaaaataaatttatttaatgtaccttaattcctaggagtgaatctccctctataaaactggagacaaccaatcttagccctctttggggtctcctctttccagctcccctccaggtggtgctccagttctggagtctgatgcaaccccaaggcccacctggcccctcctctaacccagcccagcctgatctgaacagccccccgatggcttcagtgctccttggtttcttgtgtgcccagctcaaagcctgggaaatgcttggtaaggtggccgagtgcccgtccacctagatgcctctttcctttctggctggtggcacgttgggaggcaggtacaggctcatgttttgggagcctgggaacccctggtgtcaggaaaattgtcttcaaaggggtaggggatgagataaaaagataaatgaatatctcaaatctcaaaatactatctaggccaggcgcggtggctcacacctgtaatcccagcagtttgggaggccaaggtgggtggatcacctgaagtcaggagttcgagaccagcctgaccaatatggtgaaaccctgtctctactaaaaatacaaaaattagccaggtgtggtggtgtgtgcctgtagtcccagctactcaggaggctgagacaggagaattgtttgaaactgggaggcagaggttgcagtgatttgagattgtgccacagcactccagccagggcgacagaacaagactccatctcaagaaaaaaaatactatctaacaggaacaacatctagaatgaatgaatgagccaatgagtccttcgatcctggcactgtgctaaagcaccagcctcaccgaaatgaataagccactccaggacaggagacaccccagccacccagaatctcatagcgcagtgccagacaagcagtgagaaggcatggacgggcagcactcaggcagggaggctggcacttgtgcctgtcctcaggttgttccttcctctgggagctgcatccaccttgctagccccatggggcattgctagcccttctaagggctggaccaagcctggacaaaccctcctttccttgaatctcccaagcacagccagaatgagctagagctttcagaaatacttgaccaaacagagaagataccaacacccccagccccgcagtcaggttccccatttgcaggttgtgacctgagtggacaccaggtgatgctcttctctacccagagggctggcacatggccccactcttgcttgtctccagccaccctgagctgtactgggcaggagctgtaattgaccagttttctctctcttcaaacaacctcagccctcaccggtccctctgtccccacacaggccatcctgggtgggtccagcgtcccatcacataagaggatctttgcacagaagacaaaggaagaggctcctaccttgagtggagcagggagatcccttatcgacttggcagccagcacagccctactccaagaatcccacggcctcagtgttactgacaagtggttccctcacagctcagactaggagctccctcgctgtttttctttttcttttcttttctttgttttgtttttgagacagagtttcactctgtcacccaggctggagtgcaatggcatgatcttggctcactgcaacctctgcctcccaggttcaactgattctcctgcctcagcctcccaaggagctgggattacaggtgtgcgccactatgcccagctaatttttgtatttttagtagagatggggtttcatcatgttgaccaggctagtcttgaactcctgacctcaggtgatctacttgcctcgccctcccaacatgctgggattacaggcgtgagccaccgcgcctggccacctctgctgtttttcaatgcagctgacctttcccacaaagctcggtttgtgcctgcggttctcagatggttaagcccctgctgaggaagggaaacagataatcccagacagtgagatggaggctgagactgaggatgcctgggggctgcactaggagctcagagacggcatcaggcagctggagttcagggaaggtttgggggcagcagagcccgagccaagccatggacactagccggagctggccactcgggtgaagacttggggggctccagagggcccagggaaagaagctgggcctgactccatgtgcctagtgctgagcaccaagcgctggcataagggctgtagggagctgggcagcataaatcctgggcctgtgctgggcacccctaataatagagaacagcagctgaacactaacgctgtcccagccaccggcttagccttcatgtgggctatttcactatagcccagagagctgatgtattttattccccctctaaagctgagggccaagtgtggtggctcatgcctctaatcccagcactttgggaggctgaggcaggaggatcgcttgagcctaggagtttgaggctacagtgagctatgatcatgccattgccctccagcctgggtgacaaagggaaatcctgtctcaaacaaacaaacaaaaaacagatgaggaaaccagggcttagagagattaagtaatttgctcaaagtcaggcagtcagtaagtgccagacctgggaattaaacccatgtgggctgtcctagtaattgcactaaaaaaaaaaaaaaaaaaaagctttattgagatatagttcctattccatacaatccacctattgaaagtatacaatgattctgatatattatgtttattttttccaactgtgatagattatatataacataaaatttgccattttaaccacttttgttttttgtttttgagacagagtttcgctctcgttgctcaggctggagtgcaatggtgtgatctcggcttaccgttacctccacctcccgggttcaagtgattctcctgcctcagcctcccgagtagtagctgggattacaggcatgcaccaccatgcccagttaattttgtattttttagtagagacagggtttctccatgttggtcaggctggtctcgaactcccgacctcaggtgatccacccaccttggcctcccaaagtgctgggattacaggcgtgagccaccacacccggcccattttaaccacttttaagtgtacaattcggtggttttaatcacatttacaatgttgtccaaccattacccctttctaaaacttttcttatcacctcaaacagaaactgtaaccattaataactcccgattctcccctccccacagcccccgataagtcccatatcctctctgtctctcagaacttgcctgttctagaacctcgtatcagtgaaatcatacagcgtttgtccttttgtgcctggcttatttcacttagcatgatgtcttcaaggctcatccatgttgcagcacgtatcagaatttcctttctttttaaggcagaatactattttgtttatccattcagtccttcactgatagacgcctgggttgtttccaccttttgtctgttgtgaagaatgctgctgtgtacatgggtctgcaaatgtccattcaagtccctgcattccgtcctttgatacttccgacctcaggtgatccgcctgcctcagcctcccaaagtgttgggattacaggcgtgagacaccgcgcccagccagaaaaattttaaagtcttctccttgcacagctgaacttgtgaaccgagattcctacccatgatacaatgatggagcactttctttgggccaggcggggcctaatgaggcttgtgaacccggggcctctgctctgaggctggagatgctaagatctctggtggacactgcttgcctcaggcaccgagtagaaagcaattgtgctctttcccactctgtcatactgcttcctatagcatgcaggtcactgtgtgactcactgacagtgtggtaaggaggtggagggtggctgtgtgccaggcacagaactgggctctgaaatgcctggtcttccttacaccccagccactcctctcagcactctctccatgttgctcagcttctggaggccaccagtgaggaagctggggcttgacttcaagcccatctgactctaaagccagtaccagggagggtgatcattgctggtggcagcatcaggaaggcttcctggaggagggggttagttgtgccttgaggggctcagtacagccttaaccatggtgagtgtgctggttgggtttgctgaactttgtttgcagtgatgctctctgtaagcagtagatgaagctccaagtcctggcttcatcccacgccacgcagaccctagcttctgctcaccaaccggggcccctctctcaccaggtgtgcggagatgatcatcagcatggacagcagccagatccacagcaaagacccccgttacggagccagccccctccactgggccaagaacgcagaggtgagtggatcctgaggtgggtgggtggggcagggggccgggccccgcaggtcctcagggccctcaggaagcaggttcccgagaggaccctgaggctagcacttgggggctgaccttgcagtgggtgtgcaggcagagaagtccatgaagagctgggatcctggcagggctctgctgctctctggctgggcggggggatccgccctgtgcctcagtttcctcatccatgaattctgctttggcgatgtgatgaagtcagcaaggcagtgtgtgacaaaactcggcacaaattgtaaagtgcttcccaaatagaaggtggcgtgatgatgattgtattattagtcaggattctctagagggccagaactaacaggagatatatatatagagagagaggggggtttatttttttattttattttttttgagacggagtctcgctctgtcgcccaggctggagtgcagtggcacaatcttggctcactgcaagctctgcctcccaggttcatgccattctcctgcctcagcctcctgagtagctgggactacaggcgcccgccaccacacccggctaatttttttgtatttttagtagagacgaggtttcaccgtgttagccaggatggtctcgatctcctgacctcgtgatctgcctgccttggcctcccaaagtgctgggattataggcgtgagccaccgtgcctggcctaaagggggatttattaaggagcattaactcacacgatcacaaggtcccacaataggccatcgcaagctgaggagcaaggaagccagtccaagtcccagagctgaaggacttggagtctgatgtttgagggcaggaagcatccagcacgggagaaagatgtaggctgggaggctaagccagtctagccttttcacatttttttctgcctgctttatattctggccgtgctggcagctgattagatggtgcccacccagattaagggtaggtctgccttcccctactgactcaaatgttaatctccgttagcagcaccctctcagacacacccagggtcaatactttacatccttcaatccaatcaagttgacactcattattaaccatcaagatgatgatgatgatgatggatgatgatggtggtggtggtggtgctgggcctagctgcacacacagggagcctggctgggcatctcctctgagttcttcccctaagctaagctctgtcctcctgggaggatggaggcctctggtctcatcaccaggaagcacagcttgacagagaatgggatgccccagagttcatggcctacttctcaatgtgatgggccaggagggagggcactgccagcctcagggtacctctgcattccaggagccggacaccgagtcaggcccttccgtgtaggtttggtcactcattgtcatcacatgctgtgaggtggggacttgcattcccatcttcacagaagccctgaagtgcacatggctacagtgacccatccaagcgcaggcagctgggatgagtgaagctgggctttgggctcaggtctgtgactccaaagccaggctcccctccctgttcccaaggctctgccagggatgtgcattgccaaggcccagtgagaggtgatacctttgcagggttccagggagggatgcagggagcggggtgcttcaggacaggccccagaggagcctttgcaaggagagtgggttctgttggcactaggaaaggaccagaagcctcttaaaacagtcagcacatctttggctttttgtccctagtcttgggatgctgatgggatgggaggcagtctaggcccccctagaactggggcctgcccctggaatcctcttgctagcgctttccaacatcccagtacctgtaggcctctcagagcagaagtggcagtgcccacgtgtcccggggtgcggcagctccccgagtgcctgtgctaactcagcctgaccgtctcccgcagatggcccgcatgctgctgaaacggggctgcaacgtgaacagcaccagctccgcggggaacacggccctgcacgtggcggtgatgcgcaaccgcttcgactgtgccatagtgctgctgacccacggggccaacgcggatgcccgcggagagcacggcaacaccccgctgcacctggccatgtcggtgagcccaggaccgcgtgtcctgccctgtggggccccggtgggaatgcaggagggctgtccggactggagccctcctccccactgtctccctcctatcgtcagctgctccaaatcatcttcccacccaaagctcagttcagaccctgactcctccctcaggaagccttccaagtccccctctcagcccaaaataacaccacctcctgtgtgctgtggtaccttttccacctgtgcccccatttggcacttgcatggcacgagagggaaaaatgacagctctggccatagactggccctgagcaagccatgtcacctgtcagcctcgatttcctcatctggaaaatggtggtgtcaatacttatctggaagagttgtggaaaagttatggtggacacttggtcaccctctacagaatgtctaagtgacacacgcagtacctggcccgagtgagcatcctgcttcccttcactggtccgcgtgttgctctcatcttccctgggaggctgtaagatcctggcaggcaaagcctgagtgtgcagcccagcagcctgtggcaggtgccaggcatattcgttggtttattatagaacacagttcctgccctcaaagcccttactgtctggttacacatctagagtatgaacatattaaacctagcagaggaggacgttactgtgttacagacatatgtgtgtgcatgtattcttttttttcgagatggagtctcgcactgtcgcccaggctggagtgcagtggcgcgatctcggctcaccacaacctccgcctcccaggttcaagcgattctcctgcctcagcctcccaagtagctgggactgcaggcacgtgccaccatgcccagctaatttttgtatttttagtagagacggggtttcaccacgttggccaggctggtctcgaactcctgtgttggccaggctggtctcaaactcctgacctcatgatccacccgccttggcaccccaaagtgctgggattacaggcgtgagccaccgcgccccaccgtgtgcacgttttctatagcaataccgtatgtacagaagtctgtttactgagtctcagtgacagaacatgagagacccccgggactctaaaagctgattcaggacacattcagagacatcctgttttataccaaaggtcaaaacttggaagagatgttgttgcccaaaaggctgaaactataaatagtttcatttttgaaactgtggacatttttagcactgggtgggcccttggaatgatctaactcagcagttctcaagttttttggcctatttgatccctttatactctgaaaaattattgaggatcacaaagattttttaatcatctggattttctttatctatatttaccattttagaaatttaaagtgtgaaaatttcaaaatattaattcatttaaaaataacaataataaatatatatgcctactatgtacccacaaaaattaaaattaaaaattttttaaaaaacttaaaaaataactggccagctgcagtggctcgtgtacaccagcactttgggaggccaagatggtcagatcacctgaggccaggagttcgagaccagcctggccaacatggcgaaagcccatctctactaaaaatgcaaaattagctgggtgtgagacctctgaaagggtatcacgtgttcacaggggtccccaggtcttactttaagaactgctgatagactttggtcatcttcatcccatcttcacagtttttggcatattcatcaaccacctttacaattatgtacttaatcacctcttcaaattggcttacttttatttatttattttgagacagagtttcgcttttgttgcccaggctggagtgcaatggcacgatcttggctcaccgcaacctctgcctcctgggttcaagcgattctcctgcctcagcttcccgagtagctgggattacgttcatgcgccaccacacctggctaattttgtatttttagtagagacggggtttctccatgttggtcaggctggtcttgaactcctgacctcaggtgttccacctgcctcagcctcccaaactgctgggattacaagcgtgagccaccgtgcccggcctggcttacttttaaactgacttaaatttattttgagagaaatgttgcatcactaccataaatggccatccatccatccagtgccaaccataaaaggtaaccaatgcagggcgcggtggctcacgcctgtaatcccagcattttgggaggccgaggtgggcgaatcacgaggtcaggagttcaagaccagcctggccaacatggtgaaaccctgtctctactaaaaatacaaaaaattagctgggcgtagtggtgggcacctgtaataccagctactctggaggctgaggcaggagaattgcttgaactcggtaggtagaggttgcagtgagctgagatcacgccactgcactccagcctgggtgacagagtgagactccgtctcaaaaaaaacaaaacaaaacagtaacaacaacaaaaaatcacagttaatgctgaaaacacacacatatctgtagccatagaagtcctaatagaatgtgaagaactgtttggaaaaccccattctagacccacagcttcattctctaggcagggaaatcgggtcccaagaagaggaaggtgacaaggccagagcccacagttccaggtggccagtgtgtcctctgaaaccatgccatgctctgcgcccctgcccggcctccaggtgtggaaatgtgtgacgttcttcgtggggacactcccccgaaggctgccattaggggcacgtgtgttcggttacccctcagggatgacaccctggactgggtgggcaagatggccttccctgccctcacccaccctctccttgctactcctgaaagccatcagcagctgacctactgtgtccccatggctcctgggtcggggtcacagatgcactgcatctttggaggcggagctggcagagcaggggcgagtcacttctagtttctgcctgggttcttacaccctcccctgtgggtgcttttaagcctgtttgtcaggtccccagccatcaaatggcagactttggactaccagattgacttgggtgggggtgaggagggttccagtgtctccccgtgctgaggagaggcccgctgggtgagttgacaggttggggctggcagccaggggcccctttgttcttcacttccccggcagttgcacgtcttatcctctctccatctccaacagaaagacaacgtggagatgatcaaggccctcatcgtgttcggagcagaagtggacaccccgaatgactttggggagactcctacattcctagcctccaaaatcggcagacgtatgtgctctgcactctggggctggagtggggtgagggttgggtggatacagggaccgaggaggagggaagtcccaggcatcaggtgccagcatcctgtgctgacccgccctgctcagagctgccaggagcacctcgtactcagagagggggcttccttacccaagcacaagggccctgagcagtagatgcaggcccaccacggggcttgctataccagcatcctctcccgtgcagcgccccccacctcagggagctaagattcccagcaggggtggggacaggagagccagcagcagccttctttccccaccgttggggaattcactgatggaaccactggctagaatgaccaagggtgcatgcactacactgcacgagctctgggcatgcctgtgtgggcagagtgcatggccatgtgctgcacgctcgcacagtgagccttagcttcagagctggacagagcagatcctcctcaccagaggcctggagcccgctctggagggtttcagcagctgtgggggtcactgtgggcaggtacctgatggcagcagtgtgtgtgtgccagtgcacacgtgtgtgtctgcatgcaccgcatctatgacctccttttcagcaatcccatccatcaaatggagtaggtgccccctggctggctcattagtccctttggaaccctgaactatcacttagcatttttgagaatcactgaatgtggccatgggattcctgctttcttggctggagtagaaggaaagaaggggttcccacaggcatcgggcagggtgacactgacctcctcctcccatatcctccttccctggccttaggaagctgcttgggatgtaccagcctgggggcagcactccctgtcagggtgggctgaggcctctggagcagcccacgtgcccagggcctgggagctgggacaggggacggagtgtggaaaggaggggcctctcctttgcatgttgacatcatttctgatcctgtgccatctccccttccccaaaccatgacaagttgtcaccaggaaggcgatcttgactctgctgagaaccgtgggggccgaatactgcttcccacccatccacggggtccccgcggagcagggctctgcagcgccacatcatcccttctccctggaaagagctcagcccccaccgatcagcctaaacaacctaggtaggcctcgcctcccgactccctcttctccagctggttcccaggcccctggatcacagcaggccccaccaaagcaacaggatccctaggacggaagtcactaaaggaagccggggaggatggggccggagttgtcagcctctaggcagccagcaacccacagatcccagaggcctagggtgtccctggctgatgtcccatgctccgttgcccctgagaggatgtgtcctgcacacagtctcaggcctgggcatttccagtggcacccatgaggtggctgctgttactgccctcctgtccccagggcgttcagggtgggcagtgaggagtgctgtcgggggactgggggcccgggccctctggcttcacctgtccctctggcttcacctctatcacactgtttgaatctcggttgggcctgagacctgtgtgcccccttcctggccccgtggtgactttcagacgttgaatgtggccaggcagccagcatctgccccggtgcattccttggtgcccagggagacatccccagactagacaggacccttctctggactttctgtgggctggcccactcagggacctccattgtttgggagcggggtcccctgaacagagggcagccaggagccagtccttggtgagccagacttcactgtggaggcggcagcaccttcagccagggtagcccgaccaagcctggaactctggagaggcaccgtgactgtggcttctagtcctggctccacctctctctcccctcccaggaactccccctccacctcccatctttatctctcaattttgcaggcagtcacccaagccaggccggatggtgggcctggggtgcggcgtcagatgggtaacgccctgggcctggagaggccaccgagcctagccatgcggcattagctctagctctcactccctaatccgtccttcttagctgcgcacacaccacacgccccctcccctgcaccctgtccccggcctctctcagccactcttctgcttcccttgttcactgtggagccgtgtgccctggggagggggagacaccgcttcgcagccctcggttctgctttgctgcttctagactctgcacagtggtggggggctgtcagagttggggtcacgcgggctgctgcaccaggcacctggggactgggctgcttgtcaggaggggcagctagtcagttgggtggacgtcaggcaggccttggacacaaaggaagacatggacagagtggatggtgggcctgatcccggaggccactgggatttccagacctgggatcaggacgagggatgtctcctttcatccatggacttaaaccccgaggaacgtcctgactcagccttttgactaaatgaccttgggtgaattatggaccctcttagagcctcacctgtcaatagggaataagaattcttaggccccaggtggttattgcagcatcggctccgatgcaagaagaagcactttgtctgaagaggacacgcaagggtattcatgccttggggtttcaagaggaagagattgaggggaacctgggagctggctgggcagggtggggagcccttcccagagcagtgggcccccctttccactccagcccatttctctcctgtggcctgtggctcagctttctcctgggacagagtccttcctgtggggaagggacagatgacagggggagtggggggatgagggcgtggccgtgggcgaggcacagcccaggtttgatctagggacctctggggtagcagggcttggggacccacctgaccacagcatgccctgctctgtgcctcacagaactacaggatctcatgcacatctcacgggcccggaagccagcgttcatcctgggctccatgagggacgagaagcggacgtaagtggatcgagatcgggggcagagcggggaacgtgtgcgctttcctgcccctcacccaccccctgttgtgggctcagggctttactctctgcaccctcacagccggcgaagtggctctgctcctagtcttatagttctcagcagagacagaacatggagagcctgtgtcgctcgttcattaatgctgggcggtgcaggctctggagaccagcccagggtgccaggcttcttggacttggtggggctggcgcagtgttctggcctccctccctgatctccttatggctagaagagggggagatgcctgggtcccccctggggagatctcagcagctgcttcccactgctcctactggcttccttaaccacctcccactgcagaatagtggcgtgggctgccttccccagcacctgctgtatacctagtcccattgtaagaggcgggcctgggtgacaggatgcaaagagaagacgcccaggccttgcccttcaggcataatcccgggtgcttgaactcagtgccagctggcacggcaaggtaccaggacaaatgcgtttccagccactgtgctgtcgccacctcccttgattgctgcagttgattcatttattctttattagtctctcatgttcctaatagccttcccagggaggaatttgtaaccttgttttacagatgcagaacctgagcccctgagaggtgaagtgacttgctcaaggtcacacggagtgagtgtcagggtggcaactcacagccgggtcttccgaacccacgtcctttgtgctaccgcaggctctctctgggttctctgtggactctatacctagtgccagccctctgcagggaaagctctcttctcagaatcagaggcagctccactcccagggccaggcagtgatcgtgcagctctgtgggtcctctcacttcgcactcacttccatgctaccctgttgtgtgccctggaggttcccctgccccatcagcattccctcccctgtgccccctgcatgctcttgcacgcgggcacacgcacacacacacgcacacatgcacgcacacacacccacatgcacatgcctgcgggttgcccacatgcatgtgttgcccacatgcaaacacatggacacgcacacacatgcacacatgcaaacacacgtgcatgcacacacatacacatgcgcacacatacacatgcatgcatgcacatggacacccacacacatgcacacacatgtacacacatgcatgtacatacacacacctgtgcaggggctgaggtgaggcagctgcacctgaaggggggacccacatttcccaagggaggaaaagcagattccccagattctggagcctcagaaccctgcctggagcggggctgaggcaagagtcaggagacccctcggtagctccccacttgggccttccaagctacagagccctgcgccctctgggttgatctctgtcgccagccccgcatcttcgggagtttgctttggcctccagcaacagtgtagtctctcccctgccacctctaggcttgctgtggggctgggtacctggtccaggaaaagacccctagaggtgggacccgggcctcctccatttatcagccctcttgggcacctcctgcatccccttgacacacagcgctgcccagagcagaggcggcttctgccctggtggagcttccaggtcagcgcaggagagagtaaaagaaagattgcgaatggaatggaagcagcctccaccaggaagcaggtggagcagcaggcgggctgtgagggagggtctcgatggcatcagggcaggcttctctcagcttcatcaagctgagatgggaagatgagaagatcagaggaaggttccagactgaaccaaccacaaaggcattcccccagggcatggccaatgaggacaggcaggatgtggggagacgtgtcagggcgcgctggagagcatgtgactcaggaggcggcagacctgggtccaggtccagtccgcatccatatgacttggttcccgtcacctaacctctgagctacactccctccgtcactcaaaaatatgcacagagagtaggcgcagtggctcctgcctgtagtcccagctactcgggaggatcacttgagctcagaaggttgaggctgccgtgaactgtgattgcaccaccacacaccagcctgggtgacagagtgagaccctgtctctataaataaataaataaataaataaggctgggcacggtggctcgtgcctgtaatcccagcactttgggaggccgagacaggcggatcacatgaggtcgggagttcaagaccagcctggccaacatggagaaaccccgtctctattaaaaatacaaaattagctgggtgtggtggcgggcacctgtgatcccagctactcgggaggttgaggcaggagaatcgtttgaacccgggaggcagaggttgcggtgagccgagatcgcgttattgcactccagcctgggcaacaagagtgaaactccgtctctaaataaataagcacagggatgtcagggagggtctgcctcagaggcgtttgggacaatgacatgagctaatgctggtagcacccctcccatagcccctggcatgaacctctcccttcctccctgccccctcctcccctgcttcttccaccttgtgtggaggccctgatactctgtcactgcccattcctggcctggctgtagggtccccgcccctccttccccagccttatttaattccaacagactttatcaggcacctgctttggatcaggcctgatactgaccaaaatcaggtgtcccaagttggggagactggccgagatcctgctgggatggcgcctggtcagtgatgctatcccccgaccttcctttccctttctctgttgcactctccagcccctgaaatactagacatttgttcctttactgccctcacccccaccctcgctgtcctgcataggacagaagttcctcgggtccgtctgggtctgtctgccaggacacagctgcaggggacaagggctatgagggtggatgtaaagtactgggctgtggcaggaccctcctctctcccactgctgttcccactgcagccacgaccacctgctgtgcctggatggaggaggagtgaaaggcctcatcatcatccagctcctcatcgccatcgagaaggcctcgggtgtggccaccaaggacctgtttgactgggtggcgggcaccagcactggaggcatcctggccctggccattctgcacagtgagggcggcccctggggatggggccaggcggggctgagacctgtgtcctcaaggggccgagtttgtcttcagggctttgcaaaaagagagtggaggagtagaggagggctataagcactttgaggaggcaggggcggggctgcaggtgctgaggtcccaggctggaaggagaagggctgggcccatgggcttgggtttggggatcccccgccctctggccacagagggtagagctggctgtgtgaaattttggcataggaagcgtttcctatcgactgccttaacccctcctcccctcacccctgcaaagcaggcaccaggggccacacagcctgctgcacataaggaatcccattcccagggtgcacgcagcaggcagtctcaggaatgaggagccactgagcctcaggatgccagagccctcgcctgcacacttcattttactgggaaattttactgggaaattaagttcccaggtggggagggatgacgtgaagtcacatagctcatccatggggtcgctgggctggagcacagtcccctagactcccagcctggcacctcctaggccacagggcactgtgtagtctcctttcactgccgctttgcgaaggcgcctggcttgctggacagatagccgggtggtcagtgttgtgacggctcctctgtggagctgtctgagcttctaggtgctgacaggtggggaggggcactgccagatcagggtcctcagctccccccaaccccctggacattgtcctgggactcaacatgtctgactggtgcccctgcccctgtgctggtcagattccattttctccagagcgcccccacatctggatcctggtcatgcaaagtcttggaggtgcccggggaggactccccaccctagggtgggtatcagggcctgtgggccaggcctgtgttggatgctggggatgcagagctgagccaggcataccccagcctcaggagcagggggctcagccagtccaggaggtgctggggacagagtcccatgggcggaggaggagagtcatctgtcaagttgccgggacgttagtgtccacggcggtttattgactggtatttcatttccttttgatgattctcaccatagccctgcggggtgagcagatggggaaactgagaaccagagaggatcagccagtgaattgggcagtcaggactgggtctccagcagtgtgcccagctctctaccccagcctcagggtcccagcatcccctctctggtcttccacagggtccaagggcgggcacgaggtctgagcaggcagactgggcagagtcctagcttcttctccaaaagggccacgtccttcttcagggaccatttcttccccatccggggtcttgagactcccaggggccatggaggggatttgagaggtctcctggctgatcctccggtgtgggcagatggcctcctttcagctaccctctgcttgtacatccctggccctggggaactcactgcctcacgggggaagtggggcagcttctccttcctggaggtgcagccggccccttggccctgtctgttctgaaggctcaaaggacagggctattccttgttttctgtgacaaacaacgtgggtctagcttttataagcttttactcttgaggggctcttctttaaggaaaataatacaaaatcatgaatacaagatgaagtgcagagccgtggggcttcagtggtttttgagtctctccgttgcccaggctggagtgcagtggtgcatcttggctcactgcaacctccgctcccgggttcaagcgattctcctgcctctcagcctcccgagtagctgggactacaggcgcccgccaccacacctggcgaatttttgtatttttaatagacggggtttcaccatgttgggcaggctggtctcaaactcctgacctcaagtgatccacctgcctcagcctcccaaagtgctgggattacaggcgcgagccaccatgtccagccggaaggaggtttctctctgtctgtctgggaggttgcaaaggaagggcccagaatttgggtttgcttaggcctcggtaaacccgcttcctcctgccacctcctgcgttcaggcgctctgcaggctgttctacgggagccctgcgtgtggccgctgcatctccccgcctctgacccctttgttcctaggtaagtccatggcctacatgcgcggcatgtactttcgcatgaaggatgaggtgttccggggctccaggccctacgagtcggggcccctggaggagttcctgaagcgggagtttggggagcacaccaagatgacggacgtcaggaaacccaagtaagccctggcgcactggggccgtggccgcagctgtgcccactgtggctgttccctggggacagagggctccctgtcctgctgagggagggggaagagcgccccacgcttgaggggagcagagggaacccccttcccagggaggcagagggctggggtgtggctctcacttgggcatgcagacacctgctgagcgcaggaggggcgtggcctggtgggcctggctctgccctgcctggctctgccctgcccggctctgccctgccggctctgccctgcctggctctgccctgcccggccaggggtctggggcttgcctggagagagcctgggccacccttctctgagaccacctgggcagaggctgggtttttgctgcccaggcaaaaggaacccactggcctttcaaatgacacggctaaacattttctcacatttcagacagcactcgctcccaggatcggactactaggttataatcagagggcttcagtcttacctttaatttaaggcctacaagacttgaactaatttaagtcagactgaaggagaaagtcacatttccaggaaacatttgtttgggaagcccaaatcctaggactaagcaatgcatcccgttcggggctggatgaatggtgtgttccaagaggagtgttttgagcatttctgagtgattttttcatattttgaaagtgagtgtcccccagtcttaggggcccggcatcccctctgcggtcttccctagggtccaaggccagggaccttcaatcttttttcccactctgtggcttgtctttctgctctgtggtgtttctaggtttttgttttttgttttttgttttggttttggttttggtggcccatgttcttaatgaggtagataatatttataaatatttttcttcttgtagtttgtgattttttcctttctttctttcttttttttgaaacagggtcttgctgtggggcccatgctggagtatattgctgtgaacacggcttactgcagcctcgacctcctgggttcaagcagtcctcccatctcagccgcctgagtgcctgggactactagcatgtgccaacacatgtattttttgtagagatggggtttcaccatgttgtccaggctagtcttgaactcctgagctgaggcgatcctcccgccttggtttcccattacaggcatcagccaccatgcccagcctagtttgtgctttttatttctcgttcataaacccctttgctgcccccaagcagcacacgattctcctgtgtcgagctggaaagctctctagatctgccttttacattgaggtcttttatcaacctggaattgatttttgtatgagggtgaaatccaagatccaatttaatgttttccacgtgattggccaatttttcccagccccatctgtgaagtctgtccttccctccgcttcctcagcagtgggtcaagcatccctctgctcttggatctgctccaggctgtgttttgttccactggttggaaagctgtctctgtgcccggaccacagagcataaaaaactaccgctgtgtggtgagtcctggtgtctgggtggcagatcctccaccttggccttcttcaaaaacatcatggctattcttgggggcagtagagagaagtggatacaagcatagaccctgaagtttctacctcttctcaaaaataggaatatgccaggcatggtggctcaagcctgtaatcccagctctttgggaggctgaggcaggaggatcacttgaggccaggaggtcgagaccagcctgggcaacatagtgagaccctcatctctacaaaaaatttaaaactaacaattagctgggcatggtggcactatggctgtagtcccagctaattgagaggctgaggtgggaggatcacttgagccccggaggctgaggctacagtgggctgtgatcccatcactgcactccagcctgggcaatagagtgagaccctgtcttaagacaaaaaaaaaaaaacaaaaacaaacaaactcacaaactataaaaagaaaaaatatttataaattctactccattaagaacatgggtccatccaaataaataaataaaacaaaaacaccataaagggagtaaaaagacaagccacagagtgggagaaaagatttcgaatccatacatccatcaaaggactcattttcaaaatatgaaaagatcattcagaaatgctcaaaatagtaaccaccattttactttctcttcctatgagtttaactgctccaggtactgttaagtaaaatttttaggggataattgatttggaccaggattctgtaccaggcccaacagaagaaacgaatatggagtcattcatgccaagtgaacctagttagcttaggcgtatacccatgtaacaaatagctgagttctggttagctacaacagctaagctttaatcaatcatagatggccacctgattcaaacaaggcaaaccaattaagctccacacctcactttggttttcagcccatcaacactgcctgaccacgttgcaggccagagttctttgaacctattctggttttgtggcctgcctgactctcagttcatcaataaaagccaattaacatctttaaatttgttgcaattttatctttgaccgtaccttatgtaagtggaatcatacagtatttgtctttttgtgactggcttatttctttctttttttttttttttgagatggagtcttgctctatcacccaggctggagtgcagtggcgcgatctcggctcactgcaatttctgcttcccaggttcaagtgattctcctgcctcagcctccggagtagctgggattataggcgtgcaccaccatgcccggctaattttttgtattttagtagagacagggtttcaccatgttggccaggccagtctcaaactcctaacctcgtgatccacccacctcggcctcccaaagtgctgggattacaggggtgagccaccgtgcccggccatgactggcttatttcacttggcatccatgttgtagcgtgtgtcagaatttccttcctttttaaggctgaaaaactccattgtctgttggatacacgttttgcttctccattcatccattgatggatattttagttgtaaattgactgctgtcaatgtcggatgtgcaaatacctgtttgaggcctactctctcttactggtgccttctctagagagaattctgatgggttcagtttgatcatattttgtttaagatttttggccaggcgcagtggctcacgcttgtaatcccagcactttgggaggccgaggtgggcggatcatgaggtcaggagatcaagaccacagtgaaaccccatctctactaaaaatacaaaaaattagccgggcgtggtggcgggcgcctgtagtcccagctactcagagaggctgaggcaggagaatggcgtgaacccgggaggcagatcttgcagtgagccgagattgcgccactgtactacagcctgggcaacagagtgagactccgtctcaaaaaaaagatttttgtgtccacgctcgtgggcgaacttgacccgttttttcctattttgggttttgaggaaatatttcctctttttatttttcttggaagagttagtataatagtttattttgaatttatggtagaacttgatagtaaattcttctaggcctggagtttgcttggtgggaggatttttgatgatggaattaatttctatagtggttgtgagactgaccactcggggtttctaaatacctttttgagttagttttggttaagtgaggtttttctaggaatgtgtccatttcatctaaatctttaagcttattggcttagagttgttcaaaatattctgtttttttttttttttttttttttttgagacggagtttcactcttatcgcccaggctggagtgcaatgacgtgatctcggctcactgcaacctctgcctcctgggttcaagcaattctcttgcttcagcctcccaagtagctgggattacaggcatgcgcaaccacacctaatttttgtattattagtagagacggggtttccccatgttggccaggctggtctcgaactcctgacctcaggtgatccacctgcctcggcctcccaaagtgctgggattacagacatgagccaccatgcccagccgattctcctttttctaacgtctgcagtgtgtgttggtgcggcccccttttctttcctgattttgataacagataacagccatgttttatcagtcttgcaacaggtttttccattggattagcctttcaaaaaaaccaacttttgctgaattgtgcccccaaggttggaccaatctgacactcctccagcactgccggagagagcctgttttgcggggatggtgcggggagaagcccacctatcccgaacagaggttggagtgggcactctgctacccaaggccctggggtgtgaattgtggggaaagggaaaggtggatgggcgggtggctcagccgtcctcctgcctcatttctctccagggtgatgctgacagggacactgtctgaccggcagccggctgaactccacctcttccggaactacgatgctccagaaactgtccgggagcctcgtttcaaccagaacgttaacctcaggcctccagctcagccctcaggtttaaaccatgtttgatgcatccatgggaagcgactggcccgagaggctgtggggtggtgggtgggagtcgtgcacttgccatcaggcaccctcaccgtgccaccagcccacccgctgcactggtctttattggctgaggacagggattgcgggggagctgtcaggcccctggcaggttagaaaagtccctggaaagtcctcagctgtacctgccttccaccaggacgaactagccagagagtgtggcttcgtgggtcctgcttctgaagagttcccagcctcccctcttcccgcacccccagcccccaacacgcacaccctgagatctggagtgcatgggttttatgccagtcccttgtgccactgggccgccctccttccccgcccctagaccagctggtgtggcgggcggcccgaagcagcggggcagctcctacttacttccgacccaatgggcgcttcctggacggtgggctgctggccaacaaccccacgctggatgccatgaccgagatccatgagtacaatcaggacctgatccgcaaggtgagtgccgtaggccagagggcctggacccactgctccctggagccaatcctgtgtcagcaaaccatgctagggaccgacccccaggacagcaggtggcttttacacacgcactcattcatatgtgcacacagggcaaattgatctcactggaacctgttccatgggtgggatctgcctgaagcactgtgctaagggggatctgaggaccactgtgctctaagtgtgcatgagtggggagggcggcatgcataccatgaacgtgccactcgagccagcctggggacaggacacatgcttgcccttgagctcacctctgtggatagacagtcccacaggaatgcctgtccccacgggttgccggtgctgtggtggaggaccgtgaggcctctgctaaaaggcctgggggctcggaaagggctccatggaacaggggacccatcctgaggcccttggggacagagcagtgcagaatcagtgatctggaggaagagcagcagccctctctctgcagaggtacagcagaggctggcaggacccagcatgctaggggaggccctgtggcgtggcgggcggtgggtgaccggggtgggcgagcgcggtggctgagctcagaccctggagccagggcgcctctgggggtccccgttctgcctgcactcactgcagctacctaatggggccatcatagcgcctgcctggggaggctgcgaggccttggcatgctgttgtctgtgaaatgttcacagcactgccgggagcctgagctgcatccttgctgctgtggtttcccgaagccccagggcgtcctgggcagcgcagcagaggctctgggcagacagagaagcgccctctaggggccagatcgggcagggcgggcttcctgcaggcggcagagaccgtcagactgtcagacactagccagtctaactctcctattgcgtgcggatggggagcctgggacccagagtgggaggcatcacccaagatcatccagcaaatcggcagcagagcttgttcggaagcaaataagagaggcagcggccgggcgcagcggctcacgcctgtaatcccagcactttgggaggccgaggcaagtggatcatgaggtcaggagatcgagaccatcctggctaacacggtgaaaccctgtctctactaaaaatacaaaaaaattagccaggcgggcatagtggcaggagcctgtagtcccagctactcgggatgctgaggcaggagaatggtgtgaacccaggaggcggagcttgcagtgagccgagatcgcgccactgcactccagactgggagacagagcgagactccgtctcaaaaaaaaaaaaaaaaaggcagcacccagggctcaggttcaagccttagcccctacttccctaccacgtggcccctgcagctgcttcccggcctgagcttcgctgagagccctcatttgcaaactgggtgatcagtgccctctccacagactggctggagattaaatgaagtaatgatgcaaatacctggcaaatcaccaacaccaaggaacaccgtctgcctttcctcccctggccacgacttgacttgggccagcatcagatggggtgggcgggatccttcttgcagctggtgtatgtgtggtcctgttggtacacagatgctgtcctgagcagatggcatgtgatgcccgcaccagccgttctggggtcacgtgcaagaggctggctggaaatcatgccaggcatgctcttgccaccagagacctcttgccctgttctcatgtgccccagagcccagtcttgggcctccccttgacgctccccttcgtgccccctacctgtggaaggtctcttctgactgcccctgtcctgttcccaacagggtcaggccaacaaggtgaagaaactctccatcgttgtctccctggggacagggaggtccccacaagtgcctgtgacctgtgtggatgtcttccgtcccagcaacccctgggagctggccaagactgtttttggggccaaggaactgggcaagatggtggtggactgtgtgagtgtgggcccctcccccaggccacttccctcagggtctgtagcccaggtcgatggcttcccctcatcctgtggggcctttggtgttggaggagacagcagggctctgtccatcgcctttagccagctggagggagagagagtccacagttcagagtctcagtgcggggcagggaccctcagtgaccaccagcaggggggttttcaaacgctttttagctgcggatccctttctgcaaacatagcgcagtgtagaagcccagaatggacaaaggctccagagcgggctgggcgctcaccctgtaatcccagcactttgggaggccaaggcaggcggaccacttgagcacagcagtttgagaccagcctgagcaatataatgagactttgtctctaccaaaaaattaaaaactagctggacatggtggtgtgtgcctgtggtcccagctactcaggaggctgaggtgggaggattgcttaagcccaagaggcagaggctgcagtgagctgtgatcatgccactgcactccagcctgagcaacagaaggagaccttgtctcaaaaagaaagaaagaaagagagagagagagagagaggagggagggagggaaacttcagggagaggggacatggaggcctgtcgactcagccgctaccctttcccccactcatcatccctgaaagggcactgctgagacctctgcccctctgattgcacagctgggacagtccctgcagtcccaggaaggggttttgcccgagccgctctgctgctgtgtggctcagcctgactcgaaagagcctggggctccccaggctggggctccgagagtgcagggcagggccgggcggggtgcgggccgggcggggtgtgggcccggcactcaccaaggctgcttctcaccagtgcacggatccagacgggcgggctgtggaccgggcacgggcctggtgcgagatggtcggcatccagtacttcaggtgagggctcagccgccccagcccttggccccgtgccctggcgtggtcggactcaccgaccttcccctcccagccctagtgtggactttcccttccccaagggtctgctctgttccccaagcccaccctggtcctagctggcgtcccctgcccagcctgagcatcctagggtgaccccctcctccctggcccgaacagattgaacccccagctggggacggacatcatgctggatgaggtcagtgacacagtgctggtcaacgccctctgggagaccgaggtctacatctatgagcaccgcgaggagttccagaagctcatccagctgctgctctcaccctgagggtccccagcctctcaccggccccagctgacctcgtccattcagcccctgccaggccaagcccagccactgccctcccgggcagatctgggcccaggcacctctgagtccatagaccaggcctgggagaatgccaagctgcctgcccgaggctggtcctgaaggcctgtctcccactaaccccgccttccagcactttctgtcattccaggctgggaaagtctagagccccctttggcccctttccctgactgtcaaggacaactgactcccccatcagctcaaacattaagggtacccgggcacaaccgtacccctgcccccagccccagcctccctgagggcctgccgggctgcctctgccccagcccccagcaagggcactcccaggcttcctggtgggtgcagcccactccctctgccctctgctccgttccctgggggctgggactaaagaaatgggtgtcccccaccccatcagctgggaaagcccaggccgcaggagtgggatgcccgttggactttgcccctcacactggcccagcccctcacactgccccaccccgagaaccctcagctctcaaaggtcactcctgggagtttcttcttcccaatggaagtggcttaagagccaaaactgaaataaatcatttggattcaagttc

SEQ ID NO: 15710 - DNA, 70330 bp, Homo sapiens
tttgtttgcggaagtaggaggaagtagaagtgctgagtaagccgaggtgagtgacctcgcgggtgggcggggcctgggggtccgttccccaacttcctcggcgctccggactcccaagtctccgccggaccctcctttggatattcctcgtgtctccgattctgaggcatgtcctccattaacccttatgtgactccctgagtgcccccaccttccatcttttcatccccctgcgtccccaattcccatcccgagaccgcccgtgtctcatctcgaacttgtggaccccagggaccccagcttcgaccctgagtttctcccctgaaccccagtctcctccgtgtgtctccctcagtatccctaacttcccgagtcaatccatctcttctctttccccgaccctcagtgcctctttaggccccattggccgtcctaattttccttcctgtgctcctctaagtgctcacttgattccccacttcacgtccgtctccacctttcgtggtgcctctactcatttctcactccctgcttctcctgcctttcctccctgctttttttccttgcctttcctctctcgcgtgcctccagacctgcccccgacatgctccctccttcccctcagcctggccaccccagagtctcccacccctaatcctgtgtccacctcctgctcccacagatgacttggaagctggtgacagggagcatgtgaccagggtgatcatgggactgggtcggggcaagcctgtgggtgtgggacagggagggcacagggcaaggggacctgtggccgtatttttaatgggctacccacatgaccccaacgaatacctccccctagcttctgggtctttccctcacctgcctcttacccgcccaacaggatgtcaggcaggttcggtttggcaacgttgaggctgcacccttgggctgaatgcattgtttttgaatgcattgtttttgttagagtttctgcctggagtttggaacctgttttctgtccaagtctcagtttcctcatctgtgacaggggaactgtacctcctgccctcgtaagtctgccatgaggttcaaaatttgaatgagaaaatgtagaaggtaaagctttataaccagtatggccctgtacaaatacatgattttactgttgggtcataggcagaattgaaaggagtggaaagggaaagggctagaatgagaagacaaggagagaaggatgagcaggaggtcccttgtctttcagtgtatcatttggcagtgtttgttcatcacctcttgtgagtcaggctcttctgtatatgttctcttcaccattcattcagtcatcgtttatctaacaaatatttacggactgtctgatgttctaggctacccttggtgtggccaatgatattctcacttcacatgagaaaaagagggcgcatgagttgcttgaggtcacaccgatgaggttgaagctggaatctgacaccagagcctgtgtgattgtcctgatgtgtaaggtttgctactgtttaggacacttcttgttccttccgtggattactttcttgttacatgagagactccccaaaagggagtttccctcttactcagcagaatgacatcactaagagatacagaaaggagaaatttaaatactctgtgtgtgtgtgtgtgtgtgtgtgtgtgtgtgtgtgtgtgtgtctgcagacatctattgggtgtgtgtgctgggggaagtaggtaggcaaggagtaaggggccgtagtgaagagtgtgttacaaacttcactttgtagagggtggctccctgggagaatatgttctgtgtctttcacagtggattttgatagggtcatgtcttaaatgcctcttctcgttttcggatggtgatctcatccagtcttatttctttaagtgccgtctctattctgtcagcccacaaatttatatccccagtccagtccagacctttccctggaatgacatactcaaatctagttgcttactcagcacctcaaacttaggcttttcaaacttgaagtatttatttattgatttatttattttttgagacagagtctcactctgtcacccaggctggaatgcaatggcacgatctcggctcactgcaacctccacctcctgattctcctgcctcagcctcccaagtagctgggattacaagcatgcgccatcatgcccaactaatttttgtatttttgtagaggcggggtttcaccgtgttggccaggctggtctcgaactcctgatctcaagtgatccacctgccttggcctcccaaagtggtgggattacaggtgtgagccaccgcgccaggcctcaaacttaagagtttagaattgagctcctgttagttctgccctccatccctgaccccactcttcaccaaaacatgtccctcccactctctttctcatcttaggacataggagtattgttcattcagttgctcaggtcaaagctgtgagattatctatgatgcctctctgtttcttaccccacacccagccagagtgatcttgttaaaatgttgtttctttgcagtggcctctcctctcatggcacatgcctggccccctgttgcctctctgatgtcactggcttccttgcttttcctggaactcgctaaacatgttccagccccatggcctttgcacacgctctctttgcctagctattcatatgactttcatctctctccatcaggtatttatttaagatcaatttcttggtgaagacttctctcctcacccaatctaaaatttcactctccacctcagcacttcctatccccattctctggtttttctcctcagtagttaattgtcatctaaaacctttgtaaatatttacctgtttatcttctttattattagtagctctgtctaaaatataagttccaggatgtcagggattttgtggggttttttttggttggttggttgttttggttttgagacagggtctcactctgttgcccaggctggagcgcagtggtgcgatctcagctcactgcagcctccgcctcctgggtttgagtgattctcccacctcagtctcccaggaagctggaattacaggtgcacgccaccacacccagctaatttttgtattttttggtagagatggggtttcactatgttggccaggccggtcttgaactcttgacctcaagtgatccacccgcctcggcctcccaaagttctgggattactggtgtgagccaccgcgcccggccttgttttgttttaagacagggtctcactgtcgctcaggctggattgcagtggcacaatcacagctcactgcagcctcgacctgctagacttaagcaatccccccacctcagccaccttagtagctgggacttacaggcatgagagataccatgcctgggtaattgttaagtttttgtagaggtgaggtctcactatattacccaggctggtctcaaagtcctgagcttaagtgatcctccttccttggcctcctaaagtgctgggattacaggagtgaactgccgtgcctgaccagtctgttttgtttacgattgtatcctcagcggttagaacaatgcctgccacaatccatctcagtaaatatttgtggagtgagtcataacatgggccacactgtaccgtgccaccagcccaaagatctcttaaagtcacccctgtctcatgtgcttgggagctccagtgacagtttcggggcagtttgcttccagctgtggtccagccaagcggagtgaatgaaagagatgctttttccttttgtgaaaggacgttttgctctggctcacgtgagcagcagtgcattttgagacgagggccttggcttttggaatctaagagcctgttgagcaagcctcgctcagccaccttctttcagctttctcctgaaggcagtttgaggattaagagcctgatgctctggattccacctaattgggttcagatcctggcaaactgtgtaacctgtgccccagtttcctgtgtaatgtggagagacctggaccttttcttacaggtgtttggagggttaaatgtggcaattcggccgggcgcagtggctcatgcctgtaaccccagcactttgggaggtggaggtgggcggatcaccggaggtcaggagttcaagaccagcctggttaacatggtgaaaccccgtttctactaaaaatacaaaaaattagccgagtgtggtggtgcgcgcctgtaatcccagctagtctggagactgaggcaggagaatcgcttgaacccgggaggcagaggttgcagtgagccaagatcacgccattgcactccagcttgggcaacaagagtgaaactctgtctcaaaaaaaaaaaaaaaaaaaaagtggcaatttacccgaaactgtggtgaagcgtctggcgccctgtgggtgctgggcagcagtgggtgctgatggggtgtgaggggatgggatcaagccctttcccactaacttaggaaagaggttggaatgagctggggtcagagggaacatttgcggggacattttgccgggaggctgccttggaggttcagaggctcagatgacccctgtgttcattcagtgttttctcacccacagattgagcacctgctgtgtggccagccctttgcctagtgctgttcaagagtcagaggacataggcaggcaatcccccaccacaacctgccaccccatttcctctcttggggccttgatttctccacatgccaaacagggagaatgattgcaccttccttgtttctttttttttttttttgagacagtctcactttgtcatccaagctttagtgcagtggcatgatctcggctcactgcagcctctgcctctcgggttcaaagattctcctgcttcagcctcccaagtagctgtgattataggcacccaccatcacgccaggctaattttttttgtagttttagtagagatggggtttttttctcacacgttggccaggctggtcttgaacttctgacctcaggtgatctgcccatctcaccctcccaaagtgctgggattacaggtgtgagccaccgcgcccggctgcgccttccctgtttctttgtgagcttggaggtggatcacaagtgtgaaaccctttgccaaccgtgaggcatggtggccttgtgagaggacggaggccggtgtgtggtggcatgctcccgtgctgtgtggcacagacggagctacaggaaggaagttggggcagcttggcactctgagtggaccctgagtttccagcctgctctgtcttgactgggtgggaggagggtgctcaggagggtgtcactgctgccaggttctgctgccaggaccatccaacagttgttccaatcatgggacatcctgtcgtcagcagctggggctcgtgaggcctgatttccacctcgggcagttctgtgtgtgctcctggaatcccccacgtggccaagcctgtgaggtctgcttcctggcctgctgcctgtgggttcctgtcacgcacctctcgggcagctgtccggctcctctgctctcggcttagtcaagaaggaagcagaaggcttggagtctttcctgcttggactaggagtgagctcagcctaagtgccctgactatatataaagctgaactttccagaccgaagcctggggatggatcagtccgatcacttagggccgctcctgaaggagtgcaggtgctagatacaggttctcccggtggaggagcgaaccccttgtgggccgttagctactggtgggatttgagcatggtatttccctatccgttgtggagaggagcatggcagctcagagtgggtgggaacagtgtgtggtccctgttatcaccttcaagggaataaagtgtgtctgggggcttcagaggtgctggccccatgggcttataggtggttcattcattcattctcattcattcattcaccaaacttattaaacacccactgtgagtcaggaacatcatgccaggtgcttagggaaacaaatcaaagcgggttgggtgagcagcccaagccaacagatgcacccccattctcacatggtgtgtgttcctgtgggctgggccctgggtggtgtggggtgctggggagaagaggaaggcacaccaggctgcagggcggaggtgcgggtatgaattttcagaggagatggcacctgagctgtatcttcatggataagaagagatttgttcatttgtcctttgtggagcacacattcaggttaagaaagtggggaggatgggctacgctgatggagcgtatgtgtggtatccccaagtgcactgagacacgagtttgacgtgttctgggaagatcgatggtgcggcgtggctggagtagaggtgagggatgagttggaggggtgagttgggccagctctcatggatgctggagtctgggctttccctgggaggtcatggggcgccactggccagggtcagcagggagacctgcagctggatttgcatcgtacagtgggcatggaggggtgtcaggctgggttgggaaccgtgcaggctggaagggcactctggtgctctgagcattcagagggggcagctgggccttgaaggatgagcaggggctccagcaggaactggagagcgcattccagggaggacgcaagtgcaggcccctttcactacagaaaagcagttttcacacagaccttccaaaggggaggagaggggactgcctgggcctggcagctgcggcaggtagcagcaatcagagggcagggaccgctcctcccgtgcctgagacctgcccagggtccttcagggaattcgtagctgaggaggaaccagatttttgggactgagttctccctcaccacccgctctgagccaccctcttggtcccttgtcctctactgcacttcttccggggcttggctcctcgtcatgagaggagcttccctgggcatggcgaggggcgtgactgacatagcagccctggacaagtggctccaggtgacctgtgttcacgttgatcacagcactaaccacggcccctcctctcagcaccttcccctctcgagccgtccagtcccagtgaaaatgctcaccgttcatgggtgggctgagcaagcccctgatctctgccttcctccgtgttctgatctgcttcatctgctgtgaaggcctctcgccatttcccccgctggcaaactcctgttcttcctggaaagttcagctaaaaagtcatcccctttaggggtccttccctcaggggaccgtgcacttggcgagacagggactggtcttgggtctctctgttgactgttttatgaacccaggtagtcacttccagggaactcatcagagatgctaccattggctccaatctccctctgttcccactcgaggttttttgtttcttcgtttgtttttctttctttctttttttttgagacagagtctcgctctcgcccaggctggagtgcagtgacatgatctcggctcactgcaagctccgcctcccgggttcacgccattctcctgcctcagcctcccgaatagctgggactacaggcacccgccaccacgcccagctaattttttttgtatttttagtagagacggggtttcaccatgttagccaggatggtctcaatctcctgatttcgtgatccgcccgccttaacctcccaaagtgctgggattacaggcgtgagccactgcgcccagcccgtttgtttttgttttttggtggacatcaactttaatttgccctttgttttgttttgtttttgaggcagggtcttgctctgtctcccaggctggagtgcagtagtgcaatcttggctcactgcagtctcgacctcaagaggatcaagcaatcctcttgccttagcctcccgagtagctgggaccacaggcgcacaccaccatgcccagctaattttattttatattttgtagagacagggttttgccatgttccccaggctggtctcaaattcctgggctcaagcaatccgtctgcctcagcctcccaaaatgctggaattacaggcacgagccactgtgcccggccttaatttgccctttgaacatgtacaattcagggcctctctgggcctcagtttcttgatctctgagatgggaagatgggataataatacttgttcctcccgtccttcagctcctccaggggaccctcacaccagcacactctctgtcagtcttccctcaatgaacccagcaggcaagcttggttttgacagaggatgggtgagcagagataaggaaaacggccagaaatatctggcttccctcagcaggggcaccaaaattggtacctggaaattgcctggcttggacaggcagaattgtcactgtcaacccccaccaccaaaggtcttgggtctttgtctttctgcttgtggtgtttgagagagctgcttgacacagccgaggtgcggtctgtgtcaggtgacctgggcatcctgggggtgcagggagaagcccaggtaaggaggaggaggggccggtcatcagtggggaaaagtgattgtctaccccacgggaaggtcaagggtaggacgctgtgagaagccagggggagagatgaagtgaggcatgatgcggggggccctcatccaccatccccctcttgcagctgtgctgggaagagcctaggctccagggtccaaggtggcagggacagaaggaagcacgtgtgagcactttctccctgctggcccgccttcctggttggcaatgccgtgagtgttccaggatgtggccccgtggctgtcatttcctttcttccacctagtgataacaatggccactgtttgtgtgcccacagtcggcctgtgtcccagacaccttccctccattgcgtcatctcgtcctcctgcctaccctgaaggctggatgccagccaagcctgtcgtttctgtggccatgctgtcgtgggtgtgtggggggcatcccctagccccaggctctggtggggggtacacaggctgggccattgacgaaggggtgtgtggaatctttctttgatttcactgcacccctggtgactttctccctcaatctgaggctcatgggtgctggatgctcttgactctctgcccttcctgggcgcacccctccgcgtccctgtgggcccgtcctcggggtagcctctctgcgctcttccaggccaggcctgagtcccacaggtccccatcttcccggctgcagcccccagaggctcagcctatactgctacttcctttgaaaactataatcgctttacatagcatctggaaaatagggaaaaggaaaaaacaaaagcccataaacccagcaccctcatctactcaatggcatgttttctgtcagtctatcttggtttgttttctatcaggctttgttttttctatgcataatatttactcagttaaatttttgttttgacaaactttctgtgagccaagcttgtggacggagatgaaaagacgagcagctgcctttgagaaactcagactctgggccagcccatctgggtgccagctttcactgctccacccactagctgggtgaccctgggcccgtgactttacccctctgttctttggtgttctcatatgtaaaatgaggataataatagtaaccagttcatagagtggttgtcagacagaatgattaatgtacgtaaagctttcaggatggtgccagcaagatgcacaggagtgtttggtaggaggatgacgaagcttaccgtctggcaggaggggcagttgtaacatgctgggctgtgatagtacagatgtgtttaaagtgagggagagcccagagcaaggagagagaacctggcatctggtgatggtgtatcaagaacattttaggccagacacggtgactcacacctgtaatcccagcactttgagaggctgaggcaggcagatcgcttgaacccgggcgttcgagaccagcctgagcaacgtggtaagaccctgtctttataatttttttttttttttttctgagacggagtcttcactctgtcacctaggctggagtgcggtggtgctatcttggctcactgcaacctccacctcccgggctcaagtgattctcctgcctcagtctcccaagtagctgggattataggtgcccaccaccatgcccagctaatttttttatatttttagtagagacggagtttcaccatgttggtcaggctggtctcaaattcctgacctcaagtgatctgccctcctcagcctcccagagtgctgggattacgggcatgagccaccatgcctggcctctataaaaattgtttggaagaaattacctaggcctggtgatacacacctgtagtcctagctactcaggaggctgaggtggaaggaggtagaggctgcagtgagccatgattgagccactgtactccagcctgggcaacagagccagaccctgtttcaaaacaacaacaacaaaaacatttttaaggaggaggctgagaaccacgagaaccaagcttggatttgaagaaggatcagggctttctcagacagaaaaggagaggaagaacattccagatagacatcattgagagatggcactgagccttgtaatgggacactgcgaacttttcttcagttgttatgatctttttttttttttttttgagacggagtttcgctcttgttgcccaggctggagtgcaatggcgccatctcagctcaccgcaacctccgcctcccaggttcaagcgattcttctgcctcagcctcccaagtagctgggattacaggcatgcgccaccatgcctggctaattttttgtatttttagtagagacggggtttctccatgttggtcaggctggtctcaaactcctgacctcaggtgatccgcccgagtcggcctcccaaagtgctgggattacaggcgtgaaccaccgtgccttgttggtataattattagtattgatcttttttccttttcatgtgcctcttagtgggccccttgcttttgtcttccttctgtccccagggttgatcctgtgctcagcacataggccagggaagaatgtggctgtgacccagtgtccactcagatgtcctctctcccccagggcacccatactctgtccttagtgtcttttgtctggtgacatcttggcacagaggcagagggcggcctccgtctgattggcgcctggctttggtgacagtaccttaggaaggcagtgtattttctgggaacctaggaaataacaaggtatctaattccatcatcaacactggggacaatttccatggcagaaactatgactctgaatatgcagcgtaaagttaccacccagacactgctgctcctgagtctcgaatggcatcttctgcaggggctcccccacctgcccctgcagaaggtgcagttcgttcatttccaaggagcttgcttttgtgtgctgtctctcggagctctttgggaaacctgtggtagcaggaaacaaaggatttagaccaatgccgatgatccccttgctccgatagagtgtgacatgatgctggtcaccttttggtatctaggaggggggacattgattttgtttgcggaagtgaaatgatccatgctggcctctttttttttttttttttttgagacagagtcaccctatcgcccaggctggagtgcagtggcgcgatctcagctcactgcaacctctgcctcccgggttcaagtgattctcctgcctcagcttcccgggcagctgggactacaggcgcctgccaccacatctggctaatttttgtatttttagtagaggcagggtttcgccatgttggccaggctggtctcgaatttctgacctcaaatgatccgcccgcctcagcctctcgaagtgctgggattacatgcctgagccactgtgtctggtccatactagcctctttgagtgctgaaaggttatctctgtaacttatttagtgagaaccctccatttgcccagggcattactgcctataatgtatgttcacatgtgctatctcctttggtcaataccacacactacaggtgaggaaactgagtctctgctgggacactgggtcaggaagcaggcagttaaggtcacctgtgcacagtggcagcacagggggacagccttctaggtagccagcctggcctgagggttctgtcacttttacctcccactcagtgttgtttctctttctttcccctccttttaagatccctccaggcccaggatctggggacaacgctggtggggagtgatctgggtgtctgtgcaggaaaccgctgcactgggtgagatgggcatgggagactgtgcctggctgaccagagacctcgttttcttccagacagagggggaagacggtggggcctccccacctgccccgcagaagatgcagttctttggccgcctggtcaataccttcagtggcgtcaccaacttgttctctaacccattccgggtgaaggaggtggctgtggccgactacacctcgagtgaccgagttcgggaggaagggcagctgattctgttccagaacactcccaaccgcacctgggactgcgtcctggtcaaccccaggaactcacagagtggattccggtgggtgatgctcagcgggaacatacttctctcctttcactcccccacgtctcggattggaggtcttattggccgagaagcagtttctttgagtctctgtctgaggggtctggagaggggtgggagagaggggagactgtactcttggaccagagggaagggcttccgagactccacacttctggcccatcagtgtcccagcacgaggctgaggatggaagcctgggttgtttctggcctggaggctcgacctatatggacaaagggaagaaggaaggacagggagactgagagtgtccacatcagataaggcccatggggagaacctttagccctggctctttatttttggttttggtttttgttttttgagacagtcttgctctgttgcccaggctggagtgcagtggcgcaatctcggctcactgcaacctctgcctcccaggttcaagcgattctcctgcctcagcctcctgagtagctgggattacaggcacccaccaccacgcccagctgatttttgtatttttagcagagacggggtttcatcatattggccaggctggtctcaaactcctgacctcaggtgatctgcccaccttggcctcccaaagtgctgggattgcaggcgtgagccactgcacctggcctagccctggctctttaagggcatggccgttctcataggggctgcccagggtttgcttaggaaggctggacagagctgttgcctcttggggcatgctgggactcccctgggcctgaagagaaggctcaaaagccaggacaggcctgagggaaccgggccaacggcagagctggttgggaaaaggggagaagcagccaaggttccaaatgcaggccccagcagtgcttggcagactggcatctagttgggctcagacagatatccctgtttccgctcacctatccatctggctgtcctgtcagccatccattcaacatgcaccaagcacctccagtgtctccagagtcctgggcttcgggccagtcctggctggcctgtgagatgacaaacatgtcctgtgtctttaaggaacgtacagtctggtgggggaggtccggtgcaaacaggcgtcatagcaccccttgaggagtgctgtgacagagggagagcctaggaaacagtgtggatcacaaggaggtgattgagagctactctgcgtctggaagagtgaggaggagcctgtgtggcagaacaaaatggataaggtcgttccagccgtgcagaagtgtggaggtgtgagcctgcaggcaggtggctctggttggatcccaggtgcatgcagggctttggtgagagtgaggctgaaggaagcagctggggactcattctgactaaagaggcatggcaggaggggtctctgaaagtgtcaggctgggggccaggggctgccaccaacagaagagcaaggcaggtatcagggccccatccaatcaggtgagaattcagagcctggctccacaaggaacctgaggcagaggcacccacagcaggtgcttgggctaaatgcagctcagtggccagtgcaggcaccagttttaatacagtggggccattccagattctgagtgcagatggggctgagcagaccgccttccagctggactcgatcaggactgaccctggacggggcaggcttgcacttgtagcttcagagctccactgcaggcacagctgaccagggcagcgggtccactccttggagagctggacagccccacttttgaggtacacggccctggggataccactaatctccacgtaccaataatcaccaagttctgtcagttgtaaaatcccttgacaggattccagatttgtctcagccagcttaagccccagtgtgggcagacctccatcccaggaggatttagtcctttgtcagcagcttcttagctacacgtaagctattctgtggtactttatagtttacaggattttttgttttcttttttttttttttttgagacagagtctcgctctgtcacccaggctggagtacagtgacgcgatctcggcttactgcaagctccgcctcccaggttcacgccattctcctgcctcagcctcccaagtagctgggactacaggcacccgccaccacgcctggctaatattttgtatttttagtagagatggggtttcaccatgttagccaggatggtctcaatctcctgacctcgtgatccgcctgcctcggcctcccaaagtgctgggattacaattttacaggatgtttttaagtatgttgggttagcacattctctgccaatccgtggaggtgggcaaggaaggcagtattccattttatgcatgagaaaatagccttgggatgataagtgattcatcccacttatacacaggaagcagtgaagaaacagaatcagtgtcttctggttcccaattcatttctctgtgctgctgtgttgtttccatgtatgtatgtatgtatttatttttttgagacgttaagtcttgctctgttgcccaggctggagtgcagtggcatgatcttggcttacagcaacctctgcctcctgggttcaagctattcttctgcctcagcctcccgagtagctgagactacaggtgcgtgccaccatacctggctaatttttgtgttttttagtagagacagggtttcactgtgttagccaggatggtcttgaactcctgacctcgtgatctgcctgccttggcctcccaaagtgctgggattacaggcatgagtcaccatgcccggctttgtttgtcttatttctaaattttattgatttatttattttcacagtcatagctctggagtcttttttatcttctcccctctaacctgctcccacccgaacctttccatttcagcagatagcatcattgcaacgggctgtgccagatccagccatcacatccacctttccagccaaagggagggtggaagggcaggatgcagaaggtcaatctccccctcctcagggacatttcatggaagttgcacgcattggccagaacccggtcacatggccacagctaactgcaaaggatgctgggaagtgttgcctgtgttgcagacagccacgtgccagtcgaaaatcagaggttctttctccctccgtcttgctgctggctcgcttctccagaccacagtcattgtgcacgtgtctcctgctgctccggctgtggcctgcactcctctcatcctcttccaagctgctgtcacagcgctgtttccagagggcaaatctgattggtcactcccctgctttactccccaagggcttcctgttttcttttatttttatttttattttcattttttgagatggagtctcgctctgtcgctcaggctggagtgcagtggcacaatgtcagctcactgcaagatctgcctcctgggttcatgccattctcctgcctcagcctcccaagtagctgggactacaggcgcccgccaccacgcccagttaattttttttgtatttttagtagagacggggtttcaccatctactcttagccaggatggtctcgatctcctgaccttgtgatctgcccgcctcagcctcccaaagtgctgggattacaggagtgagccaccgcgcccggccagcttcctgttttcttaacacatcaggtgcttaatgacttaaaagggcccagtgtgatcaagtttctgcctctgtgttctcagctcatgccgccttgtgctcctggcctttgcccaggctcttgctgtggcctggaatactcccctttctttgcctgccttccttcctcttgccctcccctgacctgcaggctggattaggagtttctgctgggcatcccatggcacccgtccctgcactggggatcctgctttcctggtaggccacagaccttgtgaggggagggactgtgtctgttgggttcatgacagtgtgcccagcccccagcaggtgcctggcgtagatcaggtttgtggaacaaatgaatgtgatatattaatttagctttagagtattcattgagggctgctgtgtgccaggccctctgtgccacctgggtggagggtggaggactgttgcattgagggcagttgaaggagtgagctgggaagtgggaggtggaggatggggactgggatgcagggtttgaggttatcaggggtcccagaagcagtaatgccaaggcctaggctgtgacctggagtgagggctgcgatggggtggggtggggtcgaggctgtggaggagggtcatcagggcactgctggagccctggggttctccagggccgggggtggtcattgcagtgttctcccagctcctctcaacaccctgcggtctgtggagagcaggcctggtgcactggacttgcctctggccagggctgagtttctgccttctaaacgatcttcctcctgtgttgccctagaggcctctggactgtcctgagtacttgacgcgtgttagagtgagcatgggctgctagccttccgctccaggtggaggagtttctgttgttcttttgctgctgttgctgcagtgagctgccaggctgagcttctggatggacctgggggatggaattaggagcttctgaattcttgggttgtataacctaaggccggagagtcccacagcactgctgctgggcggagagactggaccctgctgatacagacagcgacagcagcaggagcatctgcagtttcccagcaggtcctgcatgcctgggcttggcactagtctaagtagtaactcatgttatcctcacgacagtcccacgaggtggggtcattactgacctcctattacagatgaggaaacagaggcttgcagaatttgagatcacacagctggtcagcgtagcgattattcagaccctgtcacctggctccagaacccactcgtttacctttcttacatcagggctgctttgtagtgtggcgagctgagtggagctccacccgcctgggctgatcctggcccttcctgcctgacctatggtgcgggggccctggctctccccgtgtgagcccccaggggtcacttgtaatatgcctgtgtacactatgatagcatagatacttctgttcctggtacagattaatcatttacggctggcattgacttgtaacagatgacatttgatgaaatcaaccagcctctcactggtatctcagcagaaacagggctgtacctcccaggcatcctgggaaggatgatagaagtgtgtgatctgtgcttccctaccgggagctgacttttgaggctctctggactgggactttgccataaaactgcttatcagaaacctcagataagtggagtgccctgtgtcctggccacgtactctggggccagctcctccatccattcagtcctcccacatcccatcttcaccaagcagagtggaaagcggcaggtctctgcgagaaaaggaggctctgtacccagccttcagtgagataactttagagtggggccttgtattccctacacaggccttgtccccgacacggcctctttgcccttgcttctccttctgctaagaatgctccttcccaactccttggctggacacacggctcctgctctgtgggcctgtcctgttcccactcagagcctcagcaccccccatgtggccaagacacagcccctcttgccttaggttgccgtgggtctgtttccacatctgtttcccctccagactgcagggctcctgagggacagggcctggggccaagtctcctctgcgttcctgatgcctggtggtgtgccacgctctccgtgggtgcacggtaaatatctgccgagtggctagatgtatccatggttgctgaaggccaagtgtgttgaccagagggcgtgggaaaggctccactggggtggctggggtagagatagaccttaaggggtccagaagactccaccagctggagggaaaggccctacagagacaaggtactaggaaaggcccagaggacagaggaggggccctgtggggagcctgtgggcaggaagggcctgtgctgggctttgaaactggggactcaggtactgctctagcgtgagggtccttggcattttttttggtccaggaccccctgaggtccctggggaatgagaacaggctcacacagccactttcaagaggtttgcaggtcccctgaggcttagccacagacccctcccaccccagcagagacacagcagaggcttctgagtggaggccaggtggcttcagcctggggttctagaagggagggaagagacacacccccgtgtgtcctccagagcctcagccttctccctgaatctcccctttgcctcctcactgtaacccacacctggctctccttgaaggacccgcttgccccgcagcctcctgagagttttctctcccagtccctctcccactgggcctggaggtggggtagggtcctccttgcccccagccttgaatcttctgtcaccctacaataccacttgctgtcaccccggtgataggtatctacgagcctggggtgctcccccacatcctcaaagatgtgagcccctgactcagcgttgcctctggttcctgaccctccacattcacatgaccacgcgctggcctttatcatcgccagtgacagcagctctcccgtaaatacaagtttcaagcaccccactttccagtctctgccttctgtctttccagttcattccctctagtcctccacccacacagtgcttttccccattgacagggaattgctcctggccgcttttcccagccccatcccgttcatgtgccttgctttgtacccagcatggactccatggcctgtcattgtcactccttcacctatacttcctgcctccttgcttctctctctcttcgtcatcctggcatcaccaccccagaactgcttggtttcagttctccaccatggctaggggaacatacctttttgctgactgctctcactttctttttttttttttttcttttttttttttttgacacagagtctcgctctgttgcccaggctggagtgcagtggcacactctcagctcactgcaacctccacctccggggttcaagcagttctctctgcctcagcctcctgagtagctggtattataggcacccgccaccacacccggctaatttttgtattttttttagtacagacagggttttgccatggtggccaggctggtcttgaactcctgacctcaggtgatatgcctgccttggcctcccaaagtgctgggattacaggcatgaaccaccctgcccggccctattgctctcactttgaaatcacgacatgagccacagtgagcctatgatgtggtttgacgtctttctgcatttctctgttcacccctctcccagaaggcatgcctccttccctcccctcagcctgcagccccttcccctccacgcttactctcagctgatagccctgctgctgtctcgctgagaaaatagaaatagccagaggagaattccctctaccccatgcacacacctctgtccccgcctactccacattccctgttgtcagcaccgatgtgtttagctgagggtggtccccccattcaaggccatcatctcctgtcatctacttcttgacaccatttgaacaattatctcccctctttcctacataacactttccccttttctactatatattttttgctatggattgaaagtatccccccgaaatcatatgttgaagccccaatccctcgtgtgatggtattaggaggtagagcactatgggggtgattaggtcatgaggatggagccctcatgaatgggattagtgcccttagacgaagaggcaagaaagagatgatctgtctctgccatgtgagggcacaacgagaagatagccatctgcaaaccaggaagtgaaccctcatcaggaactctatcagccagcaccttgatcatagacttcctagcctctagaactgtgagaaataaaggttgtttaagcctcccagtctgtagttttctgttataatgtcctgacctaagttattttccatcgctatacaatgggttatttttttctttaaaaaaaaattatttcttgactctactttttcctccagagactgcttatattccactgtcttcattcttctcctcctgttttctctctttaaacttttcaaaaatagcaaaatataacacatatagagaaaatgatatacagctcagtgatttatcacaaacacctgtgtaaccaccactcgaatctagagataggacattacagcaccccagaagccctccttttgtcccctcttcccaaagaagggtaaccaataacttgccttttatgataaaggctttttttttttgagatggagtctcactgtgttgcccaggttggagtgcggtggcgcaatctctgcttactgcaagctctgcctcctgggttcacgccattctcctgcctcagcctcctgagtagctgggactacaggtgcccgccaccacgcccggctaattttttgtattttagtagagacgaggtttcaccgtgttagccaggatggtcttgatctcctgacctcgtgatccacctgcctcagcctcccaaagtgctgggattacaggcgtgagccaccgcccccggccaagataaaggcttttctatctggcttctttgttagcattttgttggcgagattgatacgttttgtgtgcagctgtctgtcattttcattgcaatagaattccattgtctactatatcacagttactcattctactactgatgaaaatttgggttatttctagtttttttggtgcatacatgcatacatttctggtagacatacctagaagtgaactggctgcattatgggccataacttgtcttcaacgttagtaaataataccgcccgtctgttttccaagcagcagtaaatggcactttctgttacttcatatcttctgttacttggtactgtcaggttttaaaattttagtcattctgtcgggtgtctagtagtatgttattgtggttttattttgcatttgcctgattgcaaatgaagttgagcactttttgatacagtgattaaccatttggatatcctcttcagtgaagtatcagctcaattctcttgactatttaaaaaataaagttgtttatctttttcttacagagttttaggaggagttttttggtacatgtgcagtccaaatacacaccttttgtcagtgatacgtgttcagctgcacacacggtgttttgcctttttattcttttaatggtatctattgataaacatgagttcttagttttaatgaagtcaaatttgttcatcttctttacggtgtactttttgtgtcttgtttaaggaagtccttctctatcttaaagctttgagaagcattccttctttctcctattttctaaaaattgttgaagatctccttccttccttccttccttccttccttccttcctttcatctatctctctctcacccaggccaaacttcagtggcatgatcatggctcactgcagcctcaacttcccaggctcaagtgatcctcctgcctcagcctcctgagtagccaggactacaggcacgcaccaccatacctggctaattttaaaaattttttgtagagacacggtctcatcaagttacccaggctggtcttgaactcctgggctcaaacaatcctcccacctcagcctcccaaagtgctgggattacaggcatgagtcacatgtctagcctgtattctttctttcttaaatgtttggaagaattcatgggtaaaaccatgtgaccctggagtttatttgtgggaagcttttaaaacatggattcgatttctttaacaaatataggactatgagattttcatctcatgtcggtttgggtatgttgtgttttcaaggaatttttctattttatcgaagttgtcaaatttgtctgcaggtccccttatttcctttttaatgtatggaggatctgaagggatggtactttgtgttgtctctatttcttgtttggttttgctagtgatttgccaatttaaaaaatctttccaaagaaccaacttttggctttgtttattttttgaaaacctgagtagctgggattacaggcgcccaccaccacacccggctaatttttttatttttagtagaggtggggtttcaccatattggccaggctggtctcgaactcctgacctcagatgatccacccgcctcggcctcccaaagtgctgggattacaagtgtgagccagtgtgcctggcaagccgctttttaaatggcaccaatcccattcatgagggcagagccctgatgatcgaattacctcctaatggccccatttcttaatactatcacactgagaattaagttttaacataagaattttaggaagacacaaacattcagaccatggaacatatataaaacagttgtcctaccaactaacagaatacacattcttttcaagaacacctatataaaaattatagacactgacctatgctggccataaagcaaatatgaacaaatttcagatacctgaagagatttagactatgttctccaactacagtgcaattaagctagaaatcaatagcaaaaatgtaactataaatgagcccgtatgtttgaattttaagcaagatatatgtaaattatctatggttcaaaaaagaagtcacagtgaaatttagaaaatatcttgacgtggcgggttgcagtggctcacgcctgtaatcccagcactgtgggaggccaaggcgggtggatcacctgaggtaaggagtttgagaccagcctggccaacatggtgaaaccctgtctctactaaaaatacaaaacattagccaggcgtggtggtgggcacctgtggtcacagctacttgggaggctgaagcgggagaatcacttgaacccgggaggcagaggttgcagtgagccgagattgcaccactgcactccagcctgggcaacatgagtgaaacttcatctcaaaaaaaaaaaaaaaagaaaagaaaaagaaaatatcttgacccaatgatgatgcaaatactacgtatcaaacttgtaggatgaacttccacttctggccatgacagaggagcctgtatcagactagccttcctatttatatatttatttttgagatggggtgtcgctctgttgcccaggctggagtgcggtggtgcaatctcagctcactgcaacctccacctcctgagttcaagtaattctcctgtcccagccttccaagtagctggaattacaggcgcccaccaccacacccagctagttttttatatttttagtagagacggggtttcaccatgttggccaggctggtctcgacacctgacctcaggtgatccacctgcccctgcctcccaaagtgccgggattacaggtgtgagccactgcgcctggccgtgagtgacctttttaatgtgttgttgaatttgatttgctggtattttgttgagaagttttgcatcaatatccatcagggatactggcctgtagttttctttttttatatgtctttgtctggttttggtgtcagggcaatactggcctcatagaatgagtttggaagttttctctcctctgtttttcataatagtttgagtagggttggtattagtttttgtttaaatgtttggtaaaattaagcagtgaagccactgggtcccaggcttttctttgctgggagacttttcattacagctttgatctcattacttgttattggtctatttaggttttggatttcttcacggttccatcttggtaggttgtgtatgcctaggaatttatccatttcttctagggttttcaatttattggcatataattgttcacagtaacctctaataatcctttgagtttctgtgatattggttgtaatatctcttttgtcatttctgatttttttgtttgggttttctctctttttttgttagtctagttaaagatttattgattttgtttatcttttcaaaaaactttattttgttgatcttttgtattgttttgtttcaatttcatttatttctgctatgatctttattatttcttttcttctactaattttgggtttggtttgctcttttctagttctttaagagacatcattagattattttgaagtttttctacttacttgatgtaggtgcttataggtacaactttcctcttagtacttctttccctgtatctcacaggttttgatatgttgtgtttccattatcatttgtttcaggatgtttttaaatttccttcttaatttcttcattgaccattcaagagcatattatttcatttccatgtgttcgtatggtgtgcaaaataccttgtttttgatttgtagttttatttcattgtgatcacagaagatacttgatatgatttcaaatttaaaaagtaatttggctgggagaagtggctcatgcttgtaatcccagcgctttgggaggccgaggcaggcagatcacgaggtcaggagatcgagaccatcctggctaacacagtgaaaccccgtctctactaaaaatacaaaaaattagccaggcatggtggcaggtgcctgtagtcccagctactcaggaggctgaggcaggagaatggtgtgaacccgggaggcagagctggtagtgagccgagatcgcgccgctgcactccagcctgggtgacagagcaagactctgtctcaaaaaaaaaataataacaataataataatttaagacttgttttgtggcctaccatatggtctatccttgagaatgatccatatgctgaggagaagaatgtgtattctgcagccgttggatgaaatgttctgtaaatatctaataggttcatctgatctatactgcagactaaggctggtgtttctttgttgattttctgtctggatgaactgtctaatgctgaaagtggagtattgaagtctccagctattattgtattgaggtctatctctctctttagctctaagaatacttcctttatatatctgggtgttccagtgttgagtgcatatgtatttaaaattgttacattatcttgctgaattgacccttttatataatgaccttctttgtctctttttatagtttttgtcttgaagtctgttttgcctcatagaatagcatagctattcctgctcttatttggtttccatttgcatggaatatctttctccatccctttagtttcagtctatgtgtgtctttacaggtaaagtgtgtttcatgtaggcaacagatcactgggtcttgtttttctatccgttctgccactctgtgtcttttgattggagagtttagtccatttatgttcaatgttattactgacaagtaaggacttactcctgccactttattaattattttcttgttgctttgtgatcttctttctttccttcctgttctccttttagtgaaggtgattttctctggtggtatgttttaatttcttgctttttatttttttgtgtgtatctgctgtatgttttttgatttgaggttaacatgaggcttgcaaataatatcttataacctaatattttaaactgatgacaccttaacactgattgcataaacagacaaacaagcaaagagaaaactaataaaaactctacattttaactttgtccccccactttttaacttattgtactgtttatgtctgaaaagttgtagttattatttttgattggttcctcttttagtctttctactcaagatatgagtggtctacatatgacagtgttataatattctatatgtttctgtgtacttgctattaccattaagttctgtactttcaagtgatttcttattgctcattaatgtccttttctttcagattgaaaaactccctttagcatttagcagtatgtgaactgcatttttcaagtccagaatttctgcttgattcttttttttttttttgagatggagtcttgctctgtcgcccaggctggagtgcagtggcgcgatttccgctcactgcaagctctgcctcccgggttcacaccattcttctgcctcagcctcccgagtagctgggattacaggcgcccgccaccacgcctggctaattttttgtatttttagtagagatgggatttcaccatgttagccaggatagtctcgatctcctgaccttgtgatccgcctgccttggccttccgaagtgctgggattacaggcgtgagccactgtgcccagcctgcttgattcttttaaattatttcaatctctttgctaagtttatctgttaggattctgaattccttctctgtgttagcttgaatttcactgagttccctcaaaacagctattttgaattctctgtctgaaaggtcacatatctctgtctctccagaattggccactggtaccttaattagttcatttggtgaggtcatgttttcctgtatggtcttgatgcttgtgatgttcgtcagtgtctgggcattgaagttaggtatttattgtagtctttgcagtctgggcttgtttgtatctgttcttcttaggaagactttccaggtaataaaagggacttgggtattgtgatctaagtttttggtcactgcagccatatctgcattagggggcaccccaagcctactaatactatggctcttgcagactcgtaaaggtaccacttgggtggtcttggataagatctggaagaattctctggattaccaggcagaggctcttgttctcttcccttactttctcccctaaaagtggagtctctctctctgtgctgggccgcctggagctaggagaggggtgacacaggcacctctgtggccactatcactaggactatgctggctcagacctgaagccagcacagcactgggtctcacccaaggcctacagtctccactgcctggctactgcctacgtttgcttaaggcactagggctctacagtcagcaggtggtgaagccagtgagattatgtccttcccttcaaggcagcaagttccccctacccccatcctgggaaggtccttagatgccatctgggaggcagggcctgcagtcagaaaccttagtaatctccccagtgctctattctattacagcctggctgatacccaagccataaggcaaagtccttcctgctcttccctcccctttccacaagcagagaagtctctctccatggccaccactgccccagccctgtggcagtgctgccaggccactgccaacgttcattcagggcctaagggctcttgaagcaactgaacactgccaggcctgggactctccctttagggtagtgggctcccctctgacccagggcaggtccagaactgccaccccacagccaacacttagaatctgggaccccaagagccctcttggtgctctgccacactgtagctgagctggtacctaggctgatttttgctttttatgaaggtacttttttgtgtgtatagttcaatttggttttcctccagggaggacaattggtggaggtttctatttgggcatcttttttttttttttttgagacggagttttgctctttcacccaggctggagtgcagtggcgcgatctcggctcactgcaacctctgcctcctgggttcaagcgattctccagcctcagcctccccagtagctgggattacaggtgcctgccaccatgcttggctactttttttttcaattaaaaagtaaactttaatgtcgaaaatgcaaacttggggaaggcagaaagatcacacacaaggctgtcgcttcacacttggaaggttgcacggcggccaggagaggcactcctcacttcccagacagggcgggggccgggcagaggcgctcctcacttgccagacggggcggcggccacatgcctggctaatttttgtatttttagtagggacggggattctccgtgttggccaggctggtctcaaactcctgacttcaggtgatccacgcacctcggcctcccaaagtgctgggattacaggcatgagccaccgcgcccagccctatttggccatcttgctttgcctccaccttcatttgataacagaacacccccatgtaaccaccaccacaatcaagatataagacatttctgttattctccaaatttccttcaccctcctttatagtccatggcacccaccccatccctgggcaacacctatgtgcttcctttttttttttccccgcaggaggacgtcttcctatacctatgtgcattccatcactgctgcttttaatcatatagcgtgtagtcttatgagtctgactttttcacttagcataatgcttttgcaatttgtgattgagcgttttcatatgattctgttttttctgtctcttagcttggaagttatacactttttagtagtaactgttgggagatcgttctccaagagtctctctcatatttccatacatcctgctagcagagacattgactacctgtttttgtctgtttagtgttgctataaaggaatacctaagtctgagtattatacatagaaaagaggttttatttgtctcatggctcctcaggccatacaagaaacatggtgccagcatcttaccagtgtcacatggcaagaaaggaagtgaggaagagaaaataagttgttaactggttgttaaaaagtgccaggcacgggccaggcacagtggctcgtgcctgtaatcccagcactttgggtggccaaggcgagtggatcacctgaggtcgggagttttgagaccagcctgaccaacatggagaaaccctgtctctactaaaaaaaatacaaaaaaattagctgggcatggtggtgcatgcctgtaatcctagctactcgggaggctgaggcaggagaatttcttgaatccaggaggtggaggttgcagtgagccaagatcacctgggcgacaagagcgaaactctgtctcaaagaaaaaaaaagtgccaggctctttttaacaaccagttcttacaggaactaatagagtgaaaactcactcacccccaccccacagggagggcattcattcatgagggatccacccctatgacccaaacacctcccattagccccccacctccaacattggaatcaaaatttaacatgaggtttggggggcagaaatccaaattatagcactacctttgttccaggctaccttcaaaggatgtttatacagcaaacagccttggaaaatagagttagggtctccttgtagagcacagggtaagtttgcttacttttcagcataatcaagattgtgtcttcttctggagcaaaactttgacaacaacaagcggggcaaagtctgaaaccttttgcacatcttgacagaaccttagagattacgagatttatctctgccttactcaaggtccattagtatcttccagaacaataagttggtcttagaatcctttagctatgtattcccttccaggcttcgatgctgtgtgctgttgttttatttagtttttattttaaacccaacaagacgctataccatcaatacttatttagatccccccacatatttaacttgccatggtgcttcattctttcatgcctctttaagcatccatctaggatcgtgttcattccacatgaagagaaagcttttggcccagcacgatggctcacacctgtaatcccagcactttgggaagcctaggcgggaggatcgcttgagcccaggatttccagaccagcctgggctacgtggcaaaaccctgtctctactgaaaatacaaaaaattagccaggtgtggtggttcacgtccctgctactcgggaggctgaggtgggaggattacttaaacctgggaggttgaggctgcagtgagcgttgattgcaccactgcactccagcgtgggtgacaggagtgagaccatgtctccaaaaaaaaaaaagaaggaaagaaaaagcttttgtatttcctttcgtgtaggtctgctaatgacaaagtctctgggttttttgtttgactagagaaatgttttaattttaaccttattcttgaaggttttgtttttgttttcattttgttttgtgtgctaagtacagaattctcattggcatttatttatttagagacagagtcttgctctgtggcccaggctagagtacagtggcacgatctccgcctcccaggttcaagcgattctcctccctcaacctcctgagtagctggggctacaggcatgcaccactacacctgactaatttttgtatttttagtagagacggggtttcaccgtgttgcccaggctgatctcaaactcctgagctcaagtgatttgcctgccttggcctcccaaagtgctgggattataggcatgagccgccgtgcctggccagcatttattttcttttcagctctttaaggaagtcattccattatctctgggttccattgttgagaagccagctgtcattctaatggttgccctttgaagataacttttttccctctgctattttaaatatttcctccttgtattttattttcaacaggtgtaatgtggcacatatatcagcaattgttatgttacatacaatacatattgtgcaacatatgtatcattatcagttattgctgtgtaacaaactactccagaacacagtggcttataaaaggaatcatttatttagtccttaaatctgcaatttgagcagagctcagtgggaaagcctcagctttactttatatggcaccatataaggtaactcgcaactggcaagttggtgctggctgttggctggtagttcattcagggctcagggcccaggaccaagagtcgtcaccatggcttgcttcagcctccttgaggcatgatggctgggtcccaagagaagagaaatagaaacttccagtctcttaaggcattggtctggaagctgggacggcatcacttttgccatattctgttggtaacgcagttacatcgccagattaaagggtaaagagatacaaattcccactgctcagtgcaaggaatatcagtgattttagggggccctgttttaaaacccctacaaggtgctaagcgtggatttctggggctttcttgttttttgtttttttctatgtgtttttttttttttttttggtggtggggtcagggagggcttatagggtatgttaaatcagcagaataattttatttatttatttggagatggagtttcactcttttgcctaagctggagtgaagtagcgtgatcagagatggagtttcactcttttgcctaagctggagtgaagtagcgtgatctcggctcactgcaacctccgccccgctggttcaagcaattcccctgccttagcctcccaagtagctgggattataggcacccaccgccacgcccggctaatttttatatttttagtagacatggggtttcgccatggctagtctggaattcctgacctcaggtgatccacccaccttggcctcccaaagtggtgggattacaggtatgagccactgtgcctgacctataatgttttttaaaaatcagttttggaaagtttgcagacattaacttttcaaatgtagcttccatttgattctttttctactctgcctctgatcctccacttatgtatgtatgctagatcttttattagatagtctgtgtctcttatgtactctactatattttgtattcttctgtctctccatgctttattctgtttactctttcctgattatattttttaattttgtaatttccatttgatgcttttttgatcattcaaaactcttcaccaaaattctaaatttccttttttaacctctcgaatgttatcacagttactttaaagtctattttggataacttaaatatttacagtcccctcacagatatgtttcttttgtatattgtttctgttggttttctttcatgtcttatctccacatatgcctggtgagttttgattatgtgttggtcattgtatttgcaagtatgctcgtagaaataatctggaatggccgggcgcagtggctcatgcctgtaatcccagcactttgggaggctgaggcaggtggatcacgagatcaggagatcaagaccatcctggctaacatggtgaaaccccatctctactaaaaatacaaaaaattagctgagcatggtggcacgttcctgtaatccctgctactcgggaggctgaggcaggagaatcacttgaaccaggaggcagaggttgcagtgagccgagatcacgccactgcactccagcctgggtgacagagcgagactccgtctcaaaaaaaaaaaaaaaaaaaaaaaaagaaataatctagagcctagtttgatgtttccttacaaagaatgaatttatttttgcttctcccattgcaactaggataacctcagtctagtttctggaactgaaatcacttgaggctgaactgtggtctctgtgagagcgtgtctgtgtatggctcacccttattcctaggctacgtagttctttaggaccctaacccaaagtaagagatgttcatcagggctctcctcttggcagacgcctgggctccagtccctgtgtcctgagccccatgaggctgttactggtgctgctcgtctgcccatcctctccagtaacagccacctgaacactgcaattcctgggtttccatcattccttccagcctggtgagtcatcagtgtcttttgaggtatccagtgcctgccagcagatgttttttaataatttgtccagcatttctggctgtcctcagtaggtggtctgtttcacattccctagtctgctgttaatggaaagtggaagttctgagagagaatcatcgttcccgtcagcattcaaatgcctgattacactttccccattcgctatcctttcctttatttgctcctcaccacagcaaaactcctcaaaaatatctatctttgcaatcttcagattctcacattgtgtccttaaacccactttaatcaggccttggttccctccattccactaaaagtaatgttgtcaaggtcgtgcatgcctccgtgatgctaattccagtgatgagttttcagttgtcattctctgacatatcggcaacacttgatgtggagtaccctgatgttgagaggctggtgagatgaaggaaaaacccagccaagggcaatgaggaatggcttccttccgcctcctccttccctatctttgttgtggtttttgttgtttctgtaacactgattacgttatagtttatttaatgtacttccttattctatgtttttactttagtcattttgttgatctcctccataataacataggctcgggccaagcacagtggctcacgcctgtaatcccagcactttgggagaccaagatgggtggatcacttgaggtgaggagttcgagaccagcctggccaacatggcgaaaccctgtgcctactaaaaatacaaaaattagctgggcgtggtagcaagcgcctgtaatcccagctactagggaggctgaagcaggagaattgcaggagaatcacttgaacccagggggcagaggttgcagtgagctgagatcgcgccactgcactccagcctgggtaacagagtgagactctgtctcaaaaaaaaaaaaaaaaaaaaggcttcaggagggcagagcattttatgcaattgttcattaattgacccctccatttggcacagatcacatgcccagtagttaactgttaatcaacgcactctctgtggaacaacaggctggtcccgttgagccaacactctctgggcactgccttcactagactctggctggctgctgcgcttgtagaggtatgcaagacaaaaccttttggtatgttaaaagccctggtcagaactttaagtaaccatcactgacatataatggttatggttttgaaagtgcttttatagtggtttttcatctgtcctcacagcacctctgggaggtaggtaggacaggtacagttagtctcatgtttcaaatggggctcagagagggaaaaggatttcccaagatcacacagcaccttagtagcaaaacttggactcaacctcaacacttaaaaatgaacaaagctggccgggcgcagtggctcatgcctgtaatcctagcactttgggaggcccaggcaggcaggtcacctgaggccaggagtttaagatcagcctggccaacatgacaaaactctgtctcttctaaaaatacaaaaaattagccgggcatggtggcgggtgcctgtaatcccagctactcaggaggctgaggcaggagaatcacttgaacctgggagatggaggctgcagtgagccgagatcgtgccattgtactccagcctgggcaacaagaatgaaactccatctcaaaaaaaaaaaaaagaaaagaaaagaaaaagaaaagtttccctttttttaaatatctcattttaatgactgcataatagtttattacatagttataccataatttatataatattttgttgctgtacatttaggttaaacaatacttacttagttcctactatgaagaggggccaagtactcgaggctggagctctcacatgtggcaatgaaattagaaagtggatatggcagggctgtggtaaaataaaatataaaaataataaatgatattaccaaagaaaaggaaagtttttcaaaataaaggaaaatctagacaagcatagtggctcacacctgtaatcccagtacttttggaggctgaggcaggaggaacacttgaggccaggagttcaagaccagcctgggcaacatagcaagaccccctgtcaacaaaaataaaaaaaaattaggccaggcacagtggctcacggtggctagtgcctgaaatcctagcactttgagaggctgaggggggtggattgcctgagctcaggagttcgagaccagcctgggcaacatggccaaaccccatctctactaaaaacacaaaaaattagccaggtgtggcagcacacgcctttaatcccagctactctggagactgaggtaggagaattgcttgaacccgggaggtgaaggtcgcagtgaggtgagattacaacactgcactccagcctgggtgacaaaatgagactctatctcaaaaaaaaaaaaaattagctgggcatggtggtgcatgcctgtaatcccagctactcaggaactaaggtaggaggatcccttcagcccaggaattcgaagatgcagtgagtcatgatcacaccaccgcaccccagcctgggttacagagcaagaccttgtctctaaaaaacaaagaaagtctaacctaaacgccattatgtcatttacatgtgtataggggtgtgtgtgtgtgtgtgtgtgtgtgtgtgtgtgtgtgtgtgtgtgtgtgtttgcttgggaggggagtcgggctggagctggccaggccgcagcctggggaccttctgattccagcagggatgtgggccgagggtcccgccttactcatttcgggtcttgctcctctgtcctggctctacagactcttccagctggagttggaggctgacgccctagtgaatttccatcagtattcttcccagctgctacccttctatgagagctcccctcaggtcctgcacactgaggtcctgcagcacctgaccgacctcatccgtaaccaccccagctggtcagtggcccacctggctgtggagctagggatccgcgagtgcttccatcacagccgtatcatcaggtgagcaagggaacaagaccatttggacaacgtgtgtgtacctgcttgtgtgggcagtgggggccgcaggcctcggttcccctccatagtttgacttaaaaaggagcagggcctggcatggtcgctcactaacgcagtcccagcactttgggaggctgaggagggaggatcacttgagactaggagttcaagaccagcctggcaaaatagcaagaccttgtctctacgaaaaaattaaaaaattagcatgtgtctatactcctagctacttgggatgctgaggcaggaggattgcttgagcccaggagttagagtttacagtgagctatgattgcaccactgcacttcagcctgggtgacagaatgagaccttgtctctaggaaaaaaaaaaaaaaaaaaaaaaaggtgctgcgttgctaccagattaaaatgtaagaaggacaatgtaatgtttccagagtccggagtgctcaccaggtgccaggtctgtgggagctgatttctacccaccatgaaattgaattttcccaacccccacaaggtatcgtcattttattttactttattttattttattttattttattttattttattttattttatgttacgttatgttattttattttgagacggagtcttattctgtcacccaggctggagtgcagtggcgcgatcttggctcactgcaccctctgcctcctgggttcaggtgattctcctgcctcagcctccggaatagctgggattacagtaatgtgccatcatgcccgggtaattttttttttttttttttttttttttgagacggagtctcgctctgtcgcccaggctggagtgcagtggcgcgatctcggctcactgcaagctccgcctcccgggttcacgccattctcctgcctcagcctcccgcgtagctgggactacaggcgcccgccaccacgcccggctaatttttttgtgttttttagtagagacggggtttcaccatgttggccaggttggtctcgaactcctaacctcaggtgatctgccctccttggcctcccaaagtgccgggattacaggcgtgagccaccatgcccggcccaggtatcatcattctagagagagctaacaggacttgtgcaggtcactcagccagagagggtgaaagaggggcttggatccttggtgtctgcccaggctgctcttctggaagctgaaggcctccttttgtgaatccattcagccagcagatggagcagctgttgcccctggtgagggcactgtccccacccttgcacagggcaccagttggccatcttgtgcagaggtagccacacctcctctgagtctctatcctagatagctcagttaagctcccaggcccagaactcaaaacctcactgctggccgggcgtggtggctcacacctgtaatcccagcactttgtgaggccgaggcgggtgtatcacttgaggtcaggagtttgagaccagcctggccaacgtggtgaaaccccgtctctactaaaaatacaaaaaattagcaaggcgtggtggcgcacgcctgtaatcccagctactcgggaggctgaggcaggagaattgcttgaacccagaggcggaggttgcagtgagccgagattgtgtcactgcattacagcctgggcaacaagagtgaaactccacctcaaaaaaacaaaacaaaacaaaaaccctcactgcactttagtttccaggcgtgcttttggacagcactgtctcatctcaccatcactctgtccatttcctggggcaggcacagcagcttgtgtcgataaggatattgacgcccagaaaggttaagtgaattgcctgaggctagtgagatatccgtgttctgtgaccctttcctgtgccaccaccctgcccacttcctgctggtgtggccctggggcccatctcttgtacgagtgagcaaactgaacagaaacctgatacaggtcacatcagatataattacattcaaatcagcccaactagctgagtggcgggaatgctcttgagctcaaataaaccagaaagtccgagtttccgagtgcacttccctgcatgtgcacttaggtccccctgccaccttgtaccacacctgctcacctctgctcaccctggccctctcctgcagctgtgccaattgcgcggagaacgaggagggctgcacacccctgcacctggcctgccgcaagggtgatggggagatcctggtggagctggtgcagtactgccacactcagatggatgtcaccgactacaagggagagaccgtcttccattatgctgtccagggtgacaattctcaggtgctgcaggtgagcagggggaggggcagggtgactggtactgatacctcccggtgtccacggttccctttgggcccctaggctcaggtgtcactctcaggcctctcactgtcccccattggtccttgaggcctgagctccttcatggagggtgcagacccctccctggctcttccctcccagcccttttccaggagccacgtcctcagtctctttgcttgataaacctggggacggcctccaacccagcaaaataaaccccaaaaaaggcccagctccagtcagttagttcagttccacttttcctgagcacaaactgtgagccagatgcctgcctggaggggctcgtgggccagcgggacctgggcttaaccttttgcaagcttgtccaatctgtggccctgcaggctgcatgcagcccaggacggctttgaatgtggcccaacacaaattcacaaactttcttaaaacattatgagatccatgcatggaccttttttttagatcagctgttgttagcgttcatgtattttatgtgtgacccaagacaattcttctgatgtggcccagggaggccaaaatattggacaaccctattttacaggaattcaaaccaagcaaaccaaactgtctccagttcctgtaggcatttgtgccagaggccctcctgttaacgtttttgattacctgggcaaaagatgtgattttttaattgtgggcaagcagatggggtgatactattaaatagctatttcatatattagattgaacagaaaaggcaggatgttggattatgttttattgtctagaattagaaaattcttctaaagatcatgttctctctgccttggcatcagaatgcaactacgttataccagaaaatgtggattcctttttttttttttttttttttttttttgagacagagtttccctatgtctcccaggctagagtgcagtggtgcgatctcggctcactgcaacctccacctcctgggttgaagtgatgctcgtgcctcagcttcctgagtagctgggattacaggcatgtgccaccatgcctgggtagtttccgtatttttagtagggatggggttttgccatgttgcccaggctggtctccaactcctggccttaagtgatccacctgcctcagcctcccaaaatgccgggattacaggtgtgagccactgtgcccggcccagaaaatgtggattcatatcttatgcttcttgctctcagggaagggaattctccacccactgttgaactccactttcaccgagaatcctctgcgcacccagcatggtgccgcgcagaccctgcctccatgcgggggtgtgcacacccgcttctcgatagtcatgcacgactgcagctgtcctttatccggtgctgattggtgcctgaccttgaactgagtgttgtatgtgttccagttaattcttagaatacactcatggggtggaggtcattattcccctttcctctccgaagaaactgaggttcagtgttgttaattaagaagcgtgcccagggagggccacaaagctgagagagtggggcttgaccttacattggcctcgatgccagccctttgctcttcctgctgtgtctctggcctgccttcaggtccagtgggactgctgtgaggtgaccctggtgtcacatgggtacactgtggttgtaatgaacctcatggggacagcactgagccaaaagtgagacagtaaaaccctcctagcactttcttttttttgagacagcatctagctctgtcgcccaggctggagtgcagtggtgtgattgtggctcactgcagcctcaacctcctggactcaggtgatcctcccacctcagcctcctgagcagctgggactacaggctcgtgccaccacatgggctaattttttttttttttgagacggagtcttgctctgtcgcccaggctggagtgcagtggcgcgatcttggctcactgcaagctctgcctcccgggttcatgccatcctcctgcctcagcctccagagtagctgggactacaggcgcccgccaccacacccggctaattttttttgtatttttagtagagacagggtttcaccgtgttcgccaggatggtcttggtctcctgaccttgtgatccgcctgcctcggcctcccaaagtgctgggattacaggcgtgagccaccacacccaggccacgccagctaatttttaaaatttttttggtaaagatggggtctccctatgttgccgaggctggtatcacactcttggtctcaagtgatcctctcacctcccagtgtgttggaattacaagcatgagccactgcgcctggcccctggctctctttttaatactgctgttctttcattgaaaacatagtacctgcatgtagaaaaaaatcagtcaggacagaatgaaaagcaagaatcattcccacctggacccccagtgcccatcctgagatacagctaccttttaagttccttgactcagaaatgtttcatgtgagccacagtcatgccaggtcgaccccttccctcccatccacactggcacttggctttcctggtgcttctctttacgttctttttttttagacagagtttttgctctattgcccaggctagagtgcaatgatgcaatctcagctcactgcaacctctgcctcctgggttcaagcgattctctttcctcaggttcctgagtagctgggattacaggtgcctgccaccatgcccggctaatttttgtatcgttagaagagacgacatttcaccatgttggccaggctggtctcaaactcttgacctcaggtgatccacccaccttggcctcccaaagtgctaggattacaggcatgagccactgcgcccggcctctttacgttcttatcagcatcctatggagtcaaacttcccttcctctttcatcagctccttggaaggaacgcagtggctggcctgaaccaggtgaataaccaagggctgaccccgctgcacctggcctgccagctggggaagcaggagatggtccgcgtgctgctgctgtgcaatgctcggtgcaacatcatgggccccaacggctaccccatccactcggccatgaagttctctcagaaggggtaagacctcctcccctccccatctgctggcctgctgggctccagctctcctgtcacctgtcccgtgcctgaggcaagcagtatccaccatagatcttagcatctccagcctcagagcagaggccccgggttcacaagcctcattaggccccgcctggcccaaagaaggtgctccatcattgtatcatgggtaggaatctcggttcacaagttcagctgtgcaaggaggagactttaaaatttttctggctgggcgcggtgtctcacgcctgtaatcccaacactttgggaggctgaggtgggcagatcacctgaggtcgggagttcgagaccagcctgaccaacatgaagaaaccccatctctactaaaaaatacaaaattagctgggcgtggtgacacatgcctgtaatcccagctacttggaaggctgaggcaggagaatcggttgaacccgggaggcggaggttgcagtgagccgagatcgcaccgttgcactccagcctgggcaataagagcgaaactgtctcaaaaaataaataaataaataaataaataaataaataaaaataaatttatttaatgtaccttaattcctaggagtgaatctccctctataaaactggagacaaccaatcttagccctctttggggtctcctctttccagctcccctccaggtggtgctccagttctggagtctgatgcaaccccaaggcccacctggcccctcctctaacccagcccagcctgatctgaacagccccccgatggcttcagtgctccttggtttcttgtgtgcccagctcaaagcctgggaaatgcttggtaaggtggccgagtgcccgtccacctagatgcctctttcctttctggctggtggcacgttgggaggcaggtacaggctcatgttttgggagcctgggaacccctggtgtcaggaaaattgtcttcaaaggggtaggggatgagataaaaagataaatgaatatctcaaatctcaaaatactatctaggccaggcgcggtggctcacacctgtaatcccagcagtttgggaggccaaggtgggtggatcacctgaagtcaggagttcgagaccagcctgaccaatatggtgaaaccctgtctctactaaaaatacaaaaattagccaggtgtggtggtgtgtgcctgtagtcccagctactcaggaggctgagacaggagaattgtttgaaactgggaggcagaggttgcagtgatttgagattgtgccacagcactccagccagggcgacagaacaagactccatctcaagaaaaaaaatactatctaacaggaacaacatctagaatgaatgaatgagccaatgagtccttcgatcctggcactgtgctaaagcaccagcctcaccgaaatgaataagccactccaggacaggagacaccccagccacccagaatctcatagcgcagtgccagacaagcagtgagaaggcatggacgggcagcactcaggcagggaggctggcacttgtgcctgtcctcaggttgttccttcctctgggagctgcatccaccttgctagccccatggggcattgctagcccttctaagggctggaccaagcctggacaaaccctcctttccttgaatctcccaagcacagccagaatgagctagagctttcagaaatacttgaccaaacagagaagataccaacacccccagccccgcagtcaggttccccatttgcaggttgtgacctgagtggacaccaggtgatgctcttctctacccagagggctggcacatggccccactcttgcttgtctccagccaccctgagctgtactgggcaggagctgtaattgaccagttttctctctcttcaaacaacctcagccctcaccggtccctctgtccccacacaggccatcctgggtgggtccagcgtcccatcacataagaggatctttgcacagaagacaaaggaagaggctcctaccttgagtggagcagggagatcccttatcgacttggcagccagcacagccctactccaagaatcccacggcctcagtgttactgacaagtggttccctcacagctcagactaggagctccctcgctgtttttctttttcttttcttttctttgttttgtttttgagacagagtttcactctgtcacccaggctggagtgcaatggcatgatcttggctcactgcaacctctgcctcccaggttcaactgattctcctgcctcagcctcccaaggagctgggattacaggtgtgcgccactatgcccagctaatttttgtatttttagtagagatggggtttcatcatgttgaccaggctagtcttgaactcctgacctcaggtgatctacttgcctcgccctcccaacatgctgggattacaggcgtgagccaccgcgcctggccacctctgctgtttttcaatgcagctgacctttcccacaaagctcggtttgtgcctgcggttctcagatggttaagcccctgctgaggaagggaaacagataatcccagacagtgagatggaggctgagactgaggatgcctgggggctgcactaggagctcagagacggcatcaggcagctggagttcagggaaggtttgggggcagcagagcccgagccaagccatggacactagccggagctggccactcgggtgaagacttggggggctccagagggcccagggaaagaagctgggcctgactccatgtgcctagtgctgagcaccaagcgctggcataagggctgtagggagctgggcagcataaatcctgggcctgtgctgggcacccctaataatagagaacagcagctgaacactaacgctgtcccagccaccggcttagccttcatgtgggctatttcactatagcccagagagctgatgtattttattccccctctaaagctgagggccaagtgtggtggctcatgcctctaatcccagcactttgggaggctgaggcaggaggatcgcttgagcctaggagtttgaggctacagtgagctatgatcatgccattgccctccagcctgggtgacaaagggaaatcctgtctcaaacaaacaaacaaaaaacagatgaggaaaccagggcttagagagattaagtaatttgctcaaagtcaggcagtcagtaagtgccagacctgggaattaaacccatgtgggctgtcctagtaattgcactaaaaaaaaaaaaaaaaaaaagctttattgagatatagttcctattccatacaatccacctattgaaagtatacaatgattctgatatattatgtttattttttccaactgtgatagattatatataacataaaatttgccattttaaccacttttgttttttgtttttgagacagagtttcgctctcgttgctcaggctggagtgcaatggtgtgatctcggcttaccgttacctccacctcccgggttcaagtgattctcctgcctcagcctcccgagtagtagctgggattacaggcatgcaccaccatgcccagttaattttgtattttttagtagagacagggtttctccatgttggtcaggctggtctcgaactcccgacctcaggtgatccacccaccttggcctcccaaagtgctgggattacaggcgtgagccaccacacccggcccattttaaccacttttaagtgtacaattcggtggttttaatcacatttacaatgttgtccaaccattacccctttctaaaacttttcttatcacctcaaacagaaactgtaaccattaataactcccgattctcccctccccacagcccccgataagtcccatatcctctctgtctctcagaacttgcctgttctagaacctcgtatcagtgaaatcatacagcgtttgtccttttgtgcctggcttatttcacttagcatgatgtcttcaaggctcatccatgttgcagcacgtatcagaatttcctttctttttaaggcagaatactattttgtttatccattcagtccttcactgatagacgcctgggttgtttccaccttttgtctgttgtgaagaatgctgctgtgtacatgggtctgcaaatgtccattcaagtccctgcattccgtcctttgatacttccgacctcaggtgatccgcctgcctcagcctcccaaagtgttgggattacaggcgtgagacaccgcgcccagccagaaaaattttaaagtcttctccttgcacagctgaacttgtgaaccgagattcctacccatgatacaatgatggagcactttctttgggccaggcggggcctaatgaggcttgtgaacccggggcctctgctctgaggctggagatgctaagatctctggtggacactgcttgcctcaggcaccgagtagaaagcaattgtgctctttcccactctgtcatactgcttcctatagcatgcaggtcactgtgtgactcactgacagtgtggtaaggaggtggagggtggctgtgtgccaggcacagaactgggctctgaaatgcctggtcttccttacaccccagccactcctctcagcactctctccatgttgctcagcttctggaggccaccagtgaggaagctggggcttgacttcaagcccatctgactctaaagccagtaccagggagggtgatcattgctggtggcagcatcaggaaggcttcctggaggagggggttagttgtgccttgaggggctcagtacagccttaaccatggtgagtgtgctggttgggtttgctgaactttgtttgcagtgatgctctctgtaagcagtagatgaagctccaagtcctggcttcatcccacgccacgcagaccctagcttctgctcaccaaccggggcccctctctcaccaggtgtgcggagatgatcatcagcatggacagcagccagatccacagcaaagacccccgttacggagccagccccctccactgggccaagaacgcagaggtgagtggatcctgaggtgggtgggtggggcagggggccgggccccgcaggtcctcagggccctcaggaagcaggttcccgagaggaccctgaggctagcacttgggggctgaccttgcagtgggtgtgcaggcagagaagtccatgaagagctgggatcctggcagggctctgctgctctctggctgggcggggggatccgccctgtgcctcagtttcctcatccatgaattctgctttggcgatgtgatgaagtcagcaaggcagtgtgtgacaaaactcggcacaaattgtaaagtgcttcccaaatagaaggtggcgtgatgatgattgtattattagtcaggattctctagagggccagaactaacaggagatatatatatagagagagaggggggtttatttttttattttattttttttgagacggagtctcgctctgtcgcccaggctggagtgcagtggcacaatcttggctcactgcaagctctgcctcccaggttcatgccattctcctgcctcagcctcctgagtagctgggactacaggcgcccgccaccacacccggctaatttttttgtatttttagtagagacgaggtttcaccgtgttagccaggatggtctcgatctcctgacctcgtgatctgcctgccttggcctcccaaagtgctgggattataggcgtgagccaccgtgcctggcctaaagggggatttattaaggagcattaactcacacgatcacaaggtcccacaataggccatcgcaagctgaggagcaaggaagccagtccaagtcccagagctgaaggacttggagtctgatgtttgagggcaggaagcatccagcacgggagaaagatgtaggctgggaggctaagccagtctagccttttcacatttttttctgcctgctttatattctggccgtgctggcagctgattagatggtgcccacccagattaagggtaggtctgccttcccctactgactcaaatgttaatctccgttagcagcaccctctcagacacacccagggtcaatactttacatccttcaatccaatcaagttgacactcattattaaccatcaagatgatgatgatgatgatggatgatgatggtggtggtggtggtgctgggcctagctgcacacacagggagcctggctgggcatctcctctgagttcttcccctaagctaagctctgtcctcctgggaggatggaggcctctggtctcatcaccaggaagcacagcttgacagagaatgggatgccccagagttcatggcctacttctcaatgtgatgggccaggagggagggcactgccagcctcagggtacctctgcattccaggagccggacaccgagtcaggcccttccgtgtaggtttggtcactcattgtcatcacatgctgtgaggtggggacttgcattcccatcttcacagaagccctgaagtgcacatggctacagtgacccatccaagcgcaggcagctgggatgagtgaagctgggctttgggctcaggtctgtgactccaaagccaggctcccctccctgttcccaaggctctgccagggatgtgcattgccaaggcccagtgagaggtgatacctttgcagggttccagggagggatgcagggagcggggtgcttcaggacaggccccagaggagcctttgcaaggagagtgggttctgttggcactaggaaaggaccagaagcctcttaaaacagtcagcacatctttggctttttgtccctagtcttgggatgctgatgggatgggaggcagtctaggcccccctagaactggggcctgcccctggaatcctcttgctagcgctttccaacatcccagtacctgtaggcctctcagagcagaagtggcagtgcccacgtgtcccggggtgcggcagctccccgagtgcctgtgctaactcagcctgaccgtctcccgcagatggcccgcatgctgctgaaacggggctgcaacgtgaacagcaccagctccgcggggaacacggccctgcacgtggcggtgatgcgcaaccgcttcgactgtgccatagtgctgctgacccacggggccaacgcggatgcccgcggagagcacggcaacaccccgctgcacctggccatgtcggtgagcccaggaccgcgtgtcctgccctgtggggccccggtgggaatgcaggagggctgtccggactggagccctcctccccactgtctccctcctatcgtcagctgctccaaatcatcttcccacccaaagctcagttcagaccctgactcctccctcaggaagccttccaagtccccctctcagcccaaaataacaccacctcctgtgtgctgtggtaccttttccacctgtgcccccatttggcacttgcatggcacgagagggaaaaatgacagctctggccatagactggccctgagcaagccatgtcacctgtcagcctcgatttcctcatctggaaaatggtggtgtcaatacttatctggaagagttgtggaaaagttatggtggacacttggtcaccctctacagaatgtctaagtgacacacgcagtacctggcccgagtgagcatcctgcttcccttcactggtccgcgtgttgctctcatcttccctgggaggctgtaagatcctggcaggcaaagcctgagtgtgcagcccagcagcctgtggcaggtgccaggcatattcgttggtttattatagaacacagttcctgccctcaaagcccttactgtctggttacacatctagagtatgaacatattaaacctagcagaggaggacgttactgtgttacagacatatgtgtgtgcatgtattcttttttttcgagatggagtctcgcactgtcgcccaggctggagtgcagtggcgcgatctcggctcaccacaacctccgcctcccaggttcaagcgattctcctgcctcagcctcccaagtagctgggactgcaggcacgtgccaccatgcccagctaatttttgtatttttagtagagacggggtttcaccacgttggccaggctggtctcgaactcctgtgttggccaggctggtctcaaactcctgacctcatgatccacccgccttggcaccccaaagtgctgggattacaggcgtgagccaccgcgccccaccgtgtgcacgttttctatagcaataccgtatgtacagaagtctgtttactgagtctcagtgacagaacatgagagacccccgggactctaaaagctgattcaggacacattcagagacatcctgttttataccaaaggtcaaaacttggaagagatgttgttgcccaaaaggctgaaactataaatagtttcatttttgaaactgtggacatttttagcactgggtgggcccttggaatgatctaactcagcagttctcaagttttttggcctatttgatccctttatactctgaaaaattattgaggatcacaaagattttttaatcatctggattttctttatctatatttaccattttagaaatttaaagtgtgaaaatttcaaaatattaattcatttaaaaataacaataataaatatatatgcctactatgtacccacaaaaattaaaattaaaaattttttaaaaaacttaaaaaataactggccagctgcagtggctcgtgtacaccagcactttgggaggccaagatggtcagatcacctgaggccaggagttcgagaccagcctggccaacatggcgaaagcccatctctactaaaaatgcaaaattagctgggtgtgagacctctgaaagggtatcacgtgttcacaggggtccccaggtcttactttaagaactgctgatagactttggtcatcttcatcccatcttcacagtttttggcatattcatcaaccacctttacaattatgtacttaatcacctcttcaaattggcttacttttatttatttattttgagacagagtttcgcttttgttgcccaggctggagtgcaatggcacgatcttggctcaccgcaacctctgcctcctgggttcaagcgattctcctgcctcagcttcccgagtagctgggattacgttcatgcgccaccacacctggctaattttgtatttttagtagagacggggtttctccatgttggtcaggctggtcttgaactcctgacctcaggtgttccacctgcctcagcctcccaaactgctgggattacaagcgtgagccaccgtgcccggcctggcttacttttaaactgacttaaatttattttgagagaaatgttgcatcactaccataaatggccatccatccatccagtgccaaccataaaaggtaaccaatgcagggcgcggtggctcacgcctgtaatcccagcattttgggaggccgaggtgggcgaatcacgaggtcaggagttcaagaccagcctggccaacatggtgaaaccctgtctctactaaaaatacaaaaaattagctgggcgtagtggtgggcacctgtaataccagctactctggaggctgaggcaggagaattgcttgaactcggtaggtagaggttgcagtgagctgagatcacgccactgcactccagcctgggtgacagagtgagactccgtctcaaaaaaaacaaaacaaaacagtaacaacaacaaaaaatcacagttaatgctgaaaacacacacatatctgtagccatagaagtcctaatagaatgtgaagaactgtttggaaaaccccattctagacccacagcttcattctctaggcagggaaatcgggtcccaagaagaggaaggtgacaaggccagagcccacagttccaggtggccagtgtgtcctctgaaaccatgccatgctctgcgcccctgcccggcctccaggtgtggaaatgtgtgacgttcttcgtggggacactcccccgaaggctgccattaggggcacgtgtgttcggttacccctcagggatgacaccctggactgggtgggcaagatggccttccctgccctcacccaccctctccttgctactcctgaaagccatcagcagctgacctactgtgtccccatggctcctgggtcggggtcacagatgcactgcatctttggaggcggagctggcagagcaggggcgagtcacttctagtttctgcctgggttcttacaccctcccctgtgggtgcttttaagcctgtttgtcaggtccccagccatcaaatggcagactttggactaccagattgacttgggtgggggtgaggagggttccagtgtctccccgtgctgaggagaggcccgctgggtgagttgacaggttggggctggcagccaggggcccctttgttcttcacttccccggcagttgcacgtcttatcctctctccatctccaacagaaagacaacgtggagatgatcaaggccctcatcgtgttcggagcagaagtggacaccccgaatgactttggggagactcctacattcctagcctccaaaatcggcagacgtatgtgctctgcactctggggctggagtggggtgagggttgggtggatacagggaccgaggaggagggaagtcccaggcatcaggtgccagcatcctgtgctgacccgccctgctcagagctgccaggagcacctcgtactcagagagggggcttccttacccaagcacaagggccctgagcagtagatgcaggcccaccacggggcttgctataccagcatcctctcccgtgcagcgccccccacctcagggagctaagattcccagcaggggtggggacaggagagccagcagcagccttctttccccaccgttggggaattcactgatggaaccactggctagaatgaccaagggtgcatgcactacactgcacgagctctgggcatgcctgtgtgggcagagtgcatggccatgtgctgcacgctcgcacagtgagccttagcttcagagctggacagagcagatcctcctcaccagaggcctggagcccgctctggagggtttcagcagctgtgggggtcactgtgggcaggtacctgatggcagcagtgtgtgtgtgccagtgcacacgtgtgtgtctgcatgcaccgcatctatgacctccttttcagcaatcccatccatcaaatggagtaggtgccccctggctggctcattagtccctttggaaccctgaactatcacttagcatttttgagaatcactgaatgtggccatgggattcctgctttcttggctggagtagaaggaaagaaggggttcccacaggcatcgggcagggtgacactgacctcctcctcccatatcctccttccctggccttaggaagctgcttgggatgtaccagcctgggggcagcactccctgtcagggtgggctgaggcctctggagcagcccacgtgcccagggcctgggagctgggacaggggacggagtgtggaaaggaggggcctctcctttgcatgttgacatcatttctgatcctgtgccatctccccttccccaaaccatgacaagttgtcaccaggaaggcgatcttgactctgctgagaaccgtgggggccgaatactgcttcccacccatccacggggtccccgcggagcagggctctgcagcgccacatcatcccttctccctggaaagagctcagcccccaccgatcagcctaaacaacctaggtaggcctcgcctcccgactccctcttctccagctggttcccaggcccctggatcacagcaggccccaccaaagcaacaggatccctaggacggaagtcactaaaggaagccggggaggatggggccggagttgtcagcctctaggcagccagcaacccacagatcccagaggcctagggtgtccctggctgatgtcccatgctccgttgcccctgagaggatgtgtcctgcacacagtctcaggcctgggcatttccagtggcacccatgaggtggctgctgttactgccctcctgtccccagggcgttcagggtgggcagtgaggagtgctgtcgggggactgggggcccgggccctctggcttcacctgtccctctggcttcacctctatcacactgtttgaatctcggttgggcctgagacctgtgtgcccccttcctggccccgtggtgactttcagacgttgaatgtggccaggcagccagcatctgccccggtgcattccttggtgcccagggagacatccccagactagacaggacccttctctggactttctgtgggctggcccactcagggacctccattgtttgggagcggggtcccctgaacagagggcagccaggagccagtccttggtgagccagacttcactgtggaggcggcagcaccttcagccagggtagcccgaccaagcctggaactctggagaggcaccgtgactgtggcttctagtcctggctccacctctctctcccctcccaggaactccccctccacctcccatctttatctctcaattttgcaggcagtcacccaagccaggccggatggtgggcctggggtgcggcgtcagatgggtaacgccctgggcctggagaggccaccgagcctagccatgcggcattagctctagctctcactccctaatccgtccttcttagctgcgcacacaccacacgccccctcccctgcaccctgtccccggcctctctcagccactcttctgcttcccttgttcactgtggagccgtgtgccctggggagggggagacaccgcttcgcagccctcggttctgctttgctgcttctagactctgcacagtggtggggggctgtcagagttggggtcacgcgggctgctgcaccaggcacctggggactgggctgcttgtcaggaggggcagctagtcagttgggtggacgtcaggcaggccttggacacaaaggaagacatggacagagtggatggtgggcctgatcccggaggccactgggatttccagacctgggatcaggacgagggatgtctcctttcatccatggacttaaaccccgaggaacgtcctgactcagccttttgactaaatgaccttgggtgaattatggaccctcttagagcctcacctgtcaatagggaataagaattcttaggccccaggtggttattgcagcatcggctccgatgcaagaagaagcactttgtctgaagaggacacgcaagggtattcatgccttggggtttcaagaggaagagattgaggggaacctgggagctggctgggcagggtggggagcccttcccagagcagtgggcccccctttccactccagcccatttctctcctgtggcctgtggctcagctttctcctgggacagagtccttcctgtggggaagggacagatgacagggggagtggggggatgagggcgtggccgtgggcgaggcacagcccaggtttgatctagggacctctggggtagcagggcttggggacccacctgaccacagcatgccctgctctgtgcctcacagaactacaggatctcatgcacatctcacgggcccggaagccagcgttcatcctgggctccatgagggacgagaagcggacgtaagtggatcgagatcgggggcagagcggggaacgtgtgcgctttcctgcccctcacccaccccctgttgtgggctcagggctttactctctgcaccctcacagccggcgaagtggctctgctcctagtcttatagttctcagcagagacagaacatggagagcctgtgtcgctcgttcattaatgctgggcggtgcaggctctggagaccagcccagggtgccaggcttcttggacttggtggggctggcgcagtgttctggcctccctccctgatctccttatggctagaagagggggagatgcctgggtcccccctggggagatctcagcagctgcttcccactgctcctactggcttccttaaccacctcccactgcagaatagtggcgtgggctgccttccccagcacctgctgtatacctagtcccattgtaagaggcgggcctgggtgacaggatgcaaagagaagacgcccaggccttgcccttcaggcataatcccgggtgcttgaactcagtgccagctggcacggcaaggtaccaggacaaatgcgtttccagccactgtgctgtcgccacctcccttgattgctgcagttgattcatttattctttattagtctctcatgttcctaatagccttcccagggaggaatttgtaaccttgttttacagatgcagaacctgagcccctgagaggtgaagtgacttgctcaaggtcacacggagtgagtgtcagggtggcaactcacagccgggtcttccgaacccacgtcctttgtgctaccgcaggctctctctgggttctctgtggactctatacctagtgccagccctctgcagggaaagctctcttctcagaatcagaggcagctccactcccagggccaggcagtgatcgtgcagctctgtgggtcctctcacttcgcactcacttccatgctaccctgttgtgtgccctggaggttcccctgccccatcagcattccctcccctgtgccccctgcatgctcttgcacgcgggcacacgcacacacacacgcacacatgcacgcacacacacccacatgcacatgcctgcgggttgcccacatgcatgtgttgcccacatgcaaacacatggacacgcacacacatgcacacatgcaaacacacgtgcatgcacacacatacacatgcgcacacatacacatgcatgcatgcacatggacacccacacacatgcacacacatgtacacacatgcatgtacatacacacacctgtgcaggggctgaggtgaggcagctgcacctgaaggggggacccacatttcccaagggaggaaaagcagattccccagattctggagcctcagaaccctgcctggagcggggctgaggcaagagtcaggagacccctcggtagctccccacttgggccttccaagctacagagccctgcgccctctgggttgatctctgtcgccagccccgcatcttcgggagtttgctttggcctccagcaacagtgtagtctctcccctgccacctctaggcttgctgtggggctgggtacctggtccaggaaaagacccctagaggtgggacccgggcctcctccatttatcagccctcttgggcacctcctgcatccccttgacacacagcgctgcccagagcagaggcggcttctgccctggtggagcttccaggtcagcgcaggagagagtaaaagaaagattgcgaatggaatggaagcagcctccaccaggaagcaggtggagcagcaggcgggctgtgagggagggtctcgatggcatcagggcaggcttctctcagcttcatcaagctgagatgggaagatgagaagatcagaggaaggttccagactgaaccaaccacaaaggcattcccccagggcatggccaatgaggacaggcaggatgtggggagacgtgtcagggcgcgctggagagcatgtgactcaggaggcggcagacctgggtccaggtccagtccgcatccatatgacttggttcccgtcacctaacctctgagctacactccctccgtcactcaaaaatatgcacagagagtaggcgcagtggctcctgcctgtagtcccagctactcgggaggatcacttgagctcagaaggttgaggctgccgtgaactgtgattgcaccaccacacaccagcctgggtgacagagtgagaccctgtctctataaataaataaataaataaataaggctgggcacggtggctcgtgcctgtaatcccagcactttgggaggccgagacaggcggatcacatgaggtcgggagttcaagaccagcctggccaacatggagaaaccccgtctctattaaaaatacaaaattagctgggtgtggtggcgggcacctgtgatcccagctactcgggaggttgaggcaggagaatcgtttgaacccgggaggcagaggttgcggtgagccgagatcgcgttattgcactccagcctgggcaacaagagtgaaactccgtctctaaataaataagcacagggatgtcagggagggtctgcctcagaggcgtttgggacaatgacatgagctaatgctggtagcacccctcccatagcccctggcatgaacctctcccttcctccctgccccctcctcccctgcttcttccaccttgtgtggaggccctgatactctgtcactgcccattcctggcctggctgtagggtccccgcccctccttccccagccttatttaattccaacagactttatcaggcacctgctttggatcaggcctgatactgaccaaaatcaggtgtcccaagttggggagactggccgagatcctgctgggatggcgcctggtcagtgatgctatcccccgaccttcctttccctttctctgttgcactctccagcccctgaaatactagacatttgttcctttactgccctcacccccaccctcgctgtcctgcataggacagaagttcctcgggtccgtctgggtctgtctgccaggacacagctgcaggggacaagggctatgagggtggatgtaaagtactgggctgtggcaggaccctcctctctcccactgctgttcccactgcagccacgaccacctgctgtgcctggatggaggaggagtgaaaggcctcatcatcatccagctcctcatcgccatcgagaaggcctcgggtgtggccaccaaggacctgtttgactgggtggcgggcaccagcactggaggcatcctggccctggccattctgcacagtgagggcggcccctggggatggggccaggcggggctgagacctgtgtcctcaaggggccgagtttgtcttcagggctttgcaaaaagagagtggaggagtagaggagggctataagcactttgaggaggcaggggcggggctgcaggtgctgaggtcccaggctggaaggagaagggctgggcccatgggcttgggtttggggatcccccgccctctggccacagagggtagagctggctgtgtgaaattttggcataggaagcgtttcctatcgactgccttaacccctcctcccctcacccctgcaaagcaggcaccaggggccacacagcctgctgcacataaggaatcccattcccagggtgcacgcagcaggcagtctcaggaatgaggagccactgagcctcaggatgccagagccctcgcctgcacacttcattttactgggaaattttactgggaaattaagttcccaggtggggagggatgacgtgaagtcacatagctcatccatggggtcgctgggctggagcacagtcccctagactcccagcctggcacctcctaggccacagggcactgtgtagtctcctttcactgccgctttgcgaaggcgcctggcttgctggacagatagccgggtggtcagtgttgtgacggctcctctgtggagctgtctgagcttctaggtgctgacaggtggggaggggcactgccagatcagggtcctcagctccccccaaccccctggacattgtcctgggactcaacatgtctgactggtgcccctgcccctgtgctggtcagattccattttctccagagcgcccccacatctggatcctggtcatgcaaagtcttggaggtgcccggggaggactccccaccctagggtgggtatcagggcctgtgggccaggcctgtgttggatgctggggatgcagagctgagccaggcataccccagcctcaggagcagggggctcagccagtccaggaggtgctggggacagagtcccatgggcggaggaggagagtcatctgtcaagttgccgggacgttagtgtccacggcggtttattgactggtatttcatttccttttgatgattctcaccatagccctgcggggtgagcagatggggaaactgagaaccagagaggatcagccagtgaattgggcagtcaggactgggtctccagcagtgtgcccagctctctaccccagcctcagggtcccagcatcccctctctggtcttccacagggtccaagggcgggcacgaggtctgagcaggcagactgggcagagtcctagcttcttctccaaaagggccacgtccttcttcagggaccatttcttccccatccggggtcttgagactcccaggggccatggaggggatttgagaggtctcctggctgatcctccggtgtgggcagatggcctcctttcagctaccctctgcttgtacatccctggccctggggaactcactgcctcacgggggaagtggggcagcttctccttcctggaggtgcagccggccccttggccctgtctgttctgaaggctcaaaggacagggctattccttgttttctgtgacaaacaacgtgggtctagcttttataagcttttactcttgaggggctcttctttaaggaaaataatacaaaatcatgaatacaagatgaagtgcagagccgtggggcttcagtggtttttgagtctctccgttgcccaggctggagtgcagtggtgcatcttggctcactgcaacctccgctcccgggttcaagcgattctcctgcctctcagcctcccgagtagctgggactacaggcgcccgccaccacacctggcgaatttttgtatttttaatagacggggtttcaccatgttgggcaggctggtctcaaactcctgacctcaagtgatccacctgcctcagcctcccaaagtgctgggattacaggcgcgagccaccatgtccagccggaaggaggtttctctctgtctgtctgggaggttgcaaaggaagggcccagaatttgggtttgcttaggcctcggtaaacccgcttcctcctgccacctcctgcgttcaggcgctctgcaggctgttctacgggagccctgcgtgtggccgctgcatctccccgcctctgacccctttgttcctaggtaagtccatggcctacatgcgcggcatgtactttcgcatgaaggatgaggtgttccggggctccaggccctacgagtcggggcccctggaggagttcctgaagcgggagtttggggagcacaccaagatgacggacgtcaggaaacccaagtaagccctggcgcactggggccgtggccgcagctgtgcccactgtggctgttccctggggacagagggctccctgtcctgctgagggagggggaagagcgccccacgcttgaggggagcagagggaacccccttcccagggaggcagagggctggggtgtggctctcacttgggcatgcagacacctgctgagcgcaggaggggcgtggcctggtgggcctggctctgccctgcctggctctgccctgcccggctctgccctgccggctctgccctgcctggctctgccctgcccggccaggggtctggggcttgcctggagagagcctgggccacccttctctgagaccacctgggcagaggctgggtttttgctgcccaggcaaaaggaacccactggcctttcaaatgacacggctaaacattttctcacatttcagacagcactcgctcccaggatcggactactaggttataatcagagggcttcagtcttacctttaatttaaggcctacaagacttgaactaatttaagtcagactgaaggagaaagtcacatttccaggaaacatttgtttgggaagcccaaatcctaggactaagcaatgcatcccgttcggggctggatgaatggtgtgttccaagaggagtgttttgagcatttctgagtgattttttcatattttgaaagtgagtgtcccccagtcttaggggcccggcatcccctctgcggtcttccctagggtccaaggccagggaccttcaatcttttttcccactctgtggcttgtctttctgctctgtggtgtttctaggtttttgttttttgttttttgttttggttttggttttggtggcccatgttcttaatgaggtagataatatttataaatatttttcttcttgtagtttgtgattttttcctttctttctttcttttttttgaaacagggtcttgctgtggggcccatgctggagtatattgctgtgaacacggcttactgcagcctcgacctcctgggttcaagcagtcctcccatctcagccgcctgagtgcctgggactactagcatgtgccaacacatgtattttttgtagagatggggtttcaccatgttgtccaggctagtcttgaactcctgagctgaggcgatcctcccgccttggtttcccattacaggcatcagccaccatgcccagcctagtttgtgctttttatttctcgttcataaacccctttgctgcccccaagcagcacacgattctcctgtgtcgagctggaaagctctctagatctgccttttacattgaggtcttttatcaacctggaattgatttttgtatgagggtgaaatccaagatccaatttaatgttttccacgtgattggccaatttttcccagccccatctgtgaagtctgtccttccctccgcttcctcagcagtgggtcaagcatccctctgctcttggatctgctccaggctgtgttttgttccactggttggaaagctgtctctgtgcccggaccacagagcataaaaaactaccgctgtgtggtgagtcctggtgtctgggtggcagatcctccaccttggccttcttcaaaaacatcatggctattcttgggggcagtagagagaagtggatacaagcatagaccctgaagtttctacctcttctcaaaaataggaatatgccaggcatggtggctcaagcctgtaatcccagctctttgggaggctgaggcaggaggatcacttgaggccaggaggtcgagaccagcctgggcaacatagtgagaccctcatctctacaaaaaatttaaaactaacaattagctgggcatggtggcactatggctgtagtcccagctaattgagaggctgaggtgggaggatcacttgagccccggaggctgaggctacagtgggctgtgatcccatcactgcactccagcctgggcaatagagtgagaccctgtcttaagacaaaaaaaaaaaaacaaaaacaaacaaactcacaaactataaaaagaaaaaatatttataaattctactccattaagaacatgggtccatccaaataaataaataaaacaaaaacaccataaagggagtaaaaagacaagccacagagtgggagaaaagatttcgaatccatacatccatcaaaggactcattttcaaaatatgaaaagatcattcagaaatgctcaaaatagtaaccaccattttactttctcttcctatgagtttaactgctccaggtactgttaagtaaaatttttaggggataattgatttggaccaggattctgtaccaggcccaacagaagaaacgaatatggagtcattcatgccaagtgaacctagttagcttaggcgtatacccatgtaacaaatagctgagttctggttagctacaacagctaagctttaatcaatcatagatggccacctgattcaaacaaggcaaaccaattaagctccacacctcactttggttttcagcccatcaacactgcctgaccacgttgcaggccagagttctttgaacctattctggttttgtggcctgcctgactctcagttcatcaataaaagccaattaacatctttaaatttgttgcaattttatctttgaccgtaccttatgtaagtggaatcatacagtatttgtctttttgtgactggcttatttctttctttttttttttttttgagatggagtcttgctctatcacccaggctggagtgcagtggcgcgatctcggctcactgcaatttctgcttcccaggttcaagtgattctcctgcctcagcctccggagtagctgggattataggcgtgcaccaccatgcccggctaattttttgtattttagtagagacagggtttcaccatgttggccaggccagtctcaaactcctaacctcgtgatccacccacctcggcctcccaaagtgctgggattacaggggtgagccaccgtgcccggccatgactggcttatttcacttggcatccatgttgtagcgtgtgtcagaatttccttcctttttaaggctgaaaaactccattgtctgttggatacacgttttgcttctccattcatccattgatggatattttagttgtaaattgactgctgtcaatgtcggatgtgcaaatacctgtttgaggcctactctctcttactggtgccttctctagagagaattctgatgggttcagtttgatcatattttgtttaagatttttggccaggcgcagtggctcacgcttgtaatcccagcactttgggaggccgaggtgggcggatcatgaggtcaggagatcaagaccacagtgaaaccccatctctactaaaaatacaaaaaattagccgggcgtggtggcgggcgcctgtagtcccagctactcagagaggctgaggcaggagaatggcgtgaacccgggaggcagatcttgcagtgagccgagattgcgccactgtactacagcctgggcaacagagtgagactccgtctcaaaaaaaagatttttgtgtccacgctcgtgggcgaacttgacccgttttttcctattttgggttttgaggaaatatttcctctttttatttttcttggaagagttagtataatagtttattttgaatttatggtagaacttgatagtaaattcttctaggcctggagtttgcttggtgggaggatttttgatgatggaattaatttctatagtggttgtgagactgaccactcggggtttctaaatacctttttgagttagttttggttaagtgaggtttttctaggaatgtgtccatttcatctaaatctttaagcttattggcttagagttgttcaaaatattctgtttttttttttttttttttttttttgagacggagtttcactcttatcgcccaggctggagtgcaatgacgtgatctcggctcactgcaacctctgcctcctgggttcaagcaattctcttgcttcagcctcccaagtagctgggattacaggcatgcgcaaccacacctaatttttgtattattagtagagacggggtttccccatgttggccaggctggtctcgaactcctgacctcaggtgatccacctgcctcggcctcccaaagtgctgggattacagacatgagccaccatgcccagccgattctcctttttctaacgtctgcagtgtgtgttggtgcggcccccttttctttcctgattttgataacagataacagccatgttttatcagtcttgcaacaggtttttccattggattagcctttcaaaaaaaccaacttttgctgaattgtgcccccaaggttggaccaatctgacactcctccagcactgccggagagagcctgttttgcggggatggtgcggggagaagcccacctatcccgaacagaggttggagtgggcactctgctacccaaggccctggggtgtgaattgtggggaaagggaaaggtggatgggcgggtggctcagccgtcctcctgcctcatttctctccagggtgatgctgacagggacactgtctgaccggcagccggctgaactccacctcttccggaactacgatgctccagaaactgtccgggagcctcgtttcaaccagaacgttaacctcaggcctccagctcagccctcaggtttaaaccatgtttgatgcatccatgggaagcgactggcccgagaggctgtggggtggtgggtgggagtcgtgcacttgccatcaggcaccctcaccgtgccaccagcccacccgctgcactggtctttattggctgaggacagggattgcgggggagctgtcaggcccctggcaggttagaaaagtccctggaaagtcctcagctgtacctgccttccaccaggacgaactagccagagagtgtggcttcgtgggtcctgcttctgaagagttcccagcctcccctcttcccgcacccccagcccccaacacgcacaccctgagatctggagtgcatgggttttatgccagtcccttgtgccactgggccgccctccttccccgcccctagaccagctggtgtggcgggcggcccgaagcagcggggcagctcctacttacttccgacccaatgggcgcttcctggacggtgggctgctggccaacaaccccacgctggatgccatgaccgagatccatgagtacaatcaggacctgatccgcaaggtgagtgccgtaggccagagggcctggacccactgctccctggagccaatcctgtgtcagcaaaccatgctagggaccgacccccaggacagcaggtggcttttacacacgcactcattcatatgtgcacacagggcaaattgatctcactggaacctgttccatgggtgggatctgcctgaagcactgtgctaagggggatctgaggaccactgtgctctaagtgtgcatgagtggggagggcggcatgcataccatgaacgtgccactcgagccagcctggggacaggacacatgcttgcccttgagctcacctctgtggatagacagtcccacaggaatgcctgtccccacgggttgccggtgctgtggtggaggaccgtgaggcctctgctaaaaggcctgggggctcggaaagggctccatggaacaggggacccatcctgaggcccttggggacagagcagtgcagaatcagtgatctggaggaagagcagcagccctctctctgcagaggtacagcagaggctggcaggacccagcatgctaggggaggccctgtggcgtggcgggcggtgggtgaccggggtgggcgagcgcggtggctgagctcagaccctggagccagggcgcctctgggggtccccgttctgcctgcactcactgcagctacctaatggggccatcatagcgcctgcctggggaggctgcgaggccttggcatgctgttgtctgtgaaatgttcacagcactgccgggagcctgagctgcatccttgctgctgtggtttcccgaagccccagggcgtcctgggcagcgcagcagaggctctgggcagacagagaagcgccctctaggggccagatcgggcagggcgggcttcctgcaggcggcagagaccgtcagactgtcagacactagccagtctaactctcctattgcgtgcggatggggagcctgggacccagagtgggaggcatcacccaagatcatccagcaaatcggcagcagagcttgttcggaagcaaataagagaggcagcggccgggcgcagcggctcacgcctgtaatcccagcactttgggaggccgaggcaagtggatcatgaggtcaggagatcgagaccatcctggctaacacggtgaaaccctgtctctactaaaaatacaaaaaaattagccaggcgggcatagtggcaggagcctgtagtcccagctactcgggatgctgaggcaggagaatggtgtgaacccaggaggcggagcttgcagtgagccgagatcgcgccactgcactccagactgggagacagagcgagactccgtctcaaaaaaaaaaaaaaaaaggcagcacccagggctcaggttcaagccttagcccctacttccctaccacgtggcccctgcagctgcttcccggcctgagcttcgctgagagccctcatttgcaaactgggtgatcagtgccctctccacagactggctggagattaaatgaagtaatgatgcaaatacctggcaaatcaccaacaccaaggaacaccgtctgcctttcctcccctggccacgacttgacttgggccagcatcagatggggtgggcgggatccttcttgcagctggtgtatgtgtggtcctgttggtacacagatgctgtcctgagcagatggcatgtgatgcccgcaccagccgttctggggtcacgtgcaagaggctggctggaaatcatgccaggcatgctcttgccaccagagacctcttgccctgttctcatgtgccccagagcccagtcttgggcctccccttgacgctccccttcgtgccccctacctgtggaaggtctcttctgactgcccctgtcctgttcccaacagggtcaggccaacaaggtgaagaaactctccatcgttgtctccctggggacagggaggtccccacaagtgcctgtgacctgtgtggatgtcttccgtcccagcaacccctgggagctggccaagactgtttttggggccaaggaactgggcaagatggtggtggactgtgtgagtgtgggcccctcccccaggccacttccctcagggtctgtagcccaggtcgatggcttcccctcatcctgtggggcctttggtgttggaggagacagcagggctctgtccatcgcctttagccagctggagggagagagagtccacagttcagagtctcagtgcggggcagggaccctcagtgaccaccagcaggggggttttcaaacgctttttagctgcggatccctttctgcaaacatagcgcagtgtagaagcccagaatggacaaaggctccagagcgggctgggcgctcaccctgtaatcccagcactttgggaggccaaggcaggcggaccacttgagcacagcagtttgagaccagcctgagcaatataatgagactttgtctctaccaaaaaattaaaaactagctggacatggtggtgtgtgcctgtggtcccagctactcaggaggctgaggtgggaggattgcttaagcccaagaggcagaggctgcagtgagctgtgatcatgccactgcactccagcctgagcaacagaaggagaccttgtctcaaaaagaaagaaagaaagagagagagagagagagaggagggagggagggaaacttcagggagaggggacatggaggcctgtcgactcagccgctaccctttcccccactcatcatccctgaaagggcactgctgagacctctgcccctctgattgcacagctgggacagtccctgcagtcccaggaaggggttttgcccgagccgctctgctgctgtgtggctcagcctgactcgaaagagcctggggctccccaggctggggctccgagagtgcagggcagggccgggcggggtgcgggccgggcggggtgtgggcccggcactcaccaaggctgcttctcaccagtgcacggatccagacgggcgggctgtggaccgggcacgggcctggtgcgagatggtcggcatccagtacttcaggtgagggctcagccgccccagcccttggccccgtgccctggcgtggtcggactcaccgaccttcccctcccagccctagtgtggactttcccttccccaagggtctgctctgttccccaagcccaccctggtcctagctggcgtcccctgcccagcctgagcatcctagggtgaccccctcctccctggcccgaacagattgaacccccagctggggacggacatcatgctggatgaggtcagtgacacagtgctggtcaacgccctctgggagaccgaggtctacatctatgagcaccgcgaggagttccagaagctcatccagctgctgctctcaccctgagggtccccagcctctcaccggccccagctgacctcgtccattcagcccctgccaggccaagcccagccactgccctcccgggcagatctgggcccaggcacctctgagtccatagaccaggcctgggagaatgccaagctgcctgcccgaggctggtcctgaaggcctgtctcccactaaccccgccttccagcactttctgtcattccaggctgggaaagtctagagccccctttggcccctttccctgactgtcaaggacaactgactcccccatcagctcaaacattaagggtacccgggcacaaccgtacccctgcccccagccccagcctccctgagggcctgccgggctgcctctgccccagcccccagcaagggcactcccaggcttcctggtgggtgcagcccactccctctgccctctgctccgttccctgggggctgggactaaagaaatgggtgtcccccaccccatcagctgggaaagcccaggccgcaggagtgggatgcccgttggactttgcccctcacactggcccagcccctcacactgccccaccccgagaaccctcagctctcaaaggtcactcctgggagtttcttcttcccaatggaagtggcttaagagccaaaactgaaataaatcatttggattcaa

SEQ ID NO: 15711 - DNA, 46495 bp, Homo sapiens
tcagatgccactttgttcagcaggcttcccagatcatccccaggctgactcaggttcctgtgtacaaggtaggaaacctaccagtgtatccctcatgatagcactttcctctctgactcggtgttctgtgtcttcatggctgtcttctcttaacccacatgctttttgaggaccaggattacatcctttcatttttgtgtctccagagctttgcccgggccatggcacatagcagaagcatgatcaatgtttttctttcttcttttctttttttctgagacacagtcctgcactgtcacccaggctggagtgcagtgtcgtgatctcggctcactgcaacctctgcctcctgagttcacgcgattctcacgcctcagccgcccaagtagctgggatgacaggcgtgcatcgccacgcctggttaatttttttttttgtattttttattttagtagagatggggtttcactctgttggctaggctggcctcgaactcctggcctcaatgatttgcctgcctcagcttcccaaagtactgggattacaggcgtgagccaccatgccctgcctaggccaccgtgcctacgctgggagcatgatgaatgttaatgggatgaatggaggagttgtccttgttccactgggccttgtcctaggctcaagcaagagggtcaggctgtggcgagacagggaggaaggaagagagtatcattagtttctaagaacaggggtccctaacccctggtctgggtcgatggcctgttaggaactcggctgcacggcaggaggtgagcggcgggcgggtgagcgagtgaagcttcatcgatatttacagcatatttacagccgctgcccattgctcactcacattgccacctgagctccactttctctcagatcagcggcggcattggattctcataggagctcaaaccctattgtgacttcgcatgcgaaggatctaggttttgcattccttatgagaatatgatgatctgtctgcctgatgatctgtcactgtctcccatcacccccagatgggaccatctagttgcaggaaaaccagctcagggctcccactgattctacattgtgatgagttgtataattatttcattatgtattacaatgtaataataatagaagtaaaatgcacaatcaatgtaatggacttggatcattcccaaaccatcccccggctccgtggaaaaactgtcttccacaaaaccagtccctggtgccaaaaaggttggggacctcggtcctacaatgtcctttggctccctgacagtggggactgtgtttatatcactgattgccctcatgccctgtgtaacgctatggcagggcagccaaacacggattgattctctggagatccctgcaattccgtttcattaccattgcatcctgggggcacagtgattcagcctactcatgaatgtgtgatttgcagtagaatttcaggagcccctgggacataaaagaggattatcagggctgggtgtggtggctcacacctgtaataccaggactttgggaggccaaggcaggaggattgcttgagcccaggagttcaagaccagctggggcaacatagcaagccccatctctacaaaaaaaatttttttaaattaaccaggtgtggtggtgctctcctgtggttccagctacttgggaggctgaggtgggaggattgcttgggcccaggaaatggagggtgcagtgagccacgtttgagccactgcactccagcctgggtgacaaagcaagactctgtctcaaaaaaaaaaaaaaaaaaggtaggggctgggcacagtggctcacccctgtaatcccagcactttgagaggctgaggtaagcagatagcttgaggtcaggagttcaagaccagcctggccaacatgatgaaaccccatctctactaaaaatacaaaaattagctgggcttggtggtgggcgcctgtaattccagctactcggggaggcagaggcaggagaatcgctcgaacccgggaagtggaggttgcagagagccgagatcatgccactgtactccggcctcggcgatggagcaagactctatctcaaaacaataaaaaataaataaaaagtattttggggtgatacacacattcagaccatagaacatgcgatgatatggaaaaatatatttgcctttatattccagtgctttttcacaataaactattatctgtatatctgagacaagtttgtattaaattgtgagccccaaggacaagaatagagatgtctttagtgtccccaccatactaagagtaaggccggccaggcatggtggctcatgccagtaatcccaacactttgaaggccgaggtgggcggatcatgaggtcaagagattgagaccatcctggccaacatggtgaaaccccgtctctactaaaaatacaaaaattagccgggtgtggtggcacgcgcctgtagtcccagctgctcaggaggctgaggcaggggaatctcttgaacccaggaggcagaggttgcaatgagctgagatcgcgccactgcactccagcctggcaacaaagcgagactttgagtcaaaaagaagaaaagaaaagaaaaagagtaaggtcatgcacatagcaggtatttcataattaatggctgacaaaacataaatgaggacgagaagcacaagagaagggacaaagggattaagagcttgcacactctgaccctcaagaactccacattagattcccccatcgtgagaggcttggcacacaccctgcatctttgcctgaaatacccctgctcagcctctccaaatcctcatgtccttcgccatccttcaccatccctcaccatccctaaccatcccccaccatccctctccatccctctccatcccccaccatccctcaccatccctcaccatccctcaccatccctctccatcccccaccatccctcaccatccctcaccatccctcaccatccctctccatcccccaccatcccccaccatcccccaccatccctctccatccctctccatcccccaccatcccccaccatccctctccatccctcattatccctatccattcctctccatccctctccacccttctccatccttcaccatccttcaggactcaggtttaagccagcttccttgtgaagctccctggttccctgttcctgagaaccagcttctcctcagcccgcagtctgtcctgtgaacccctgagctgggctgaggtccccccagagtagggaaatcctgcccttcctgaccaggcctggcttttgcccttgggatgggaacacacttggctgctgcctcacagctcagggtcacctcctgaggagcccacttccctcctgtggagggcacaagccctgatgtcccactcagcaagtcagaagccatgtaattagcatcatcatgcacagctgccgtgtgggctccgcaccctcccatcacctctcccaaggcagcagaaggatttttccacattgcttcctggccccaaccttccagggcacccactgcttgtgggacaaggtctgcatccttggcctggaactcaaaactctttctttttttttcttttatatatattttttgagacggagtctcgctctgttgcccaggctggagtgcagtggcatgatgtcagctcactgtaacctccgcctcccgggttcaggcgattctcgtgcctcagcgtcccaagtagagtagctgggactacaggcacccgccaccacgcccagctaattttttgtagctttagtagatacaggagtttcaccatgttgcccagctggtcacaaactactgacctcaagtgatctgcctgcctagcctcccaaagtgttgggattacaggcgtgagccaccgcaccagccctttttttcttattttgagacagggtctcactaagttgcccaggctggagtgcagtggcacaatcatagcttactacaacctcccttcccttgggaggctggggctcaagcaatcctcctgccccagccttctgaagtagctgggactacaggcatgcaccaccatgcctggctaatttttaaaatttttgtagagatgagagtctcgctatgttgcccaggctggttttgaactcctgggctcaagcgagccagccgttttgtgctcccaaagtgctgggattagggggagactctttctagatggcctctggggactgttctcctgctcacacaccaggtttcagcagtgctcaaccccttgccggtccccaaacaatccacacaatctcatggtattgacttttgctcacacagttctttccacctagaatgttctctttcctaatccagccggcaaactcctacttaacctttgacatccaatttaagatcagtggtgggtaaatttttttttctgtaaagggccagagagaaatattccaggctttgtgggccatgaggtatctgtcatgattactcaattctcccactgcagaaagcagaaacgtgtgtaaacaaatggcgtggctgtgttccaataacacttgtttacagaaacaggtggcaggcaggatagtttgcccactgctgctcaagaataatctcacaaagcttcccacaggaaggagtttgacaatgccttctagcaatggcttacgtattttatcgtaacacaaacttggactgtaacgtacctatagctgtgatgattaaatgggctggtggtcagaccatcatctctcacctggatttctttttctttctttctttctttctttctttttttttgagatggagtctcactctgtcacccaggctggagtacagtggcactacctcggctcactgcagtctctgcttcccgggttcaggcaattctctgcctcagcctcccgagtagctgggattacacgtgcccgccaccatgcctggctaatttttgtatttttagtagagacgggggtttcaccatcttggccaggctggtcttgaactcctgacctcgtgatctgcctgcttcagcctcccaaagtgttgggattataggcatgagccaccatgcccgaccatggatttctacaatagcctcctcactggtctcccagcctctgccttcccttacactctattctcactgaacagacataagctgttaaagtgtaaattcattctggtcactcctctgcttaaaaacctctcatggttccctattgccctgatattgaaagccaaagtcttaaaatggtttccagtgtcctacaagttctactcccaatatccttttaacctcaacgttattgcctactacacccccactggctctctactccaaaacaaagctataatagcctctttgcttttcctcttaaaacaagccaggcgggcttctgcctcagggcctttgttcttgctccatctggaacactcttttcctggttgtgcacatagctcactccttcgcctccatcaggtctttatttaattatctcccttctaacgcttttcctggcccatctagttaaaactgtgaccctccccggtctctccttcctgtgtttactccccagcattcctcaccctctaactcactatatattcccccaactttttgttttgttttgttttgttttgttttgaggcagagtctccttctgttgcccaagctggcgtgcagtggcaagatcttggctcattgcaacctctgccttccgggttcaagcgattctcctgcctcagcctcccgagtagctgggattacaggtgccagctgtcacgcccagctaatttttgtatttttagtagagacggggtttcaccatgttggccaggctggtcttgaactcctgacctcaagtgatctgcccgcctcggcctcccaaagtgctgggattacaggcatgagccactgtgcccagcttcctccaactttttaattataaaaatgttcaggccaagaacagtggttcatgcctataatcccagcactttgggaggctgaggcaggcagattgcttgaggccaggagttcgagaccagcctaggcaacatggcgaaaagcagactctaccgaaaaaaaaaaaaagcatagtggcctgaacctgtagtcccagctactcaggacactgagatgggaggatcgcttgagcccaggaggcagagattgcagtcagccaagatcaccccactgcactccagcctgggtgagagagccagaccctgtctccaaaaaaaaaaaaaaaagaaagaaagaaagaaaaagttcaaacacacagataattggaggactagtgcaaaggtattcaaatagacatgcccagatcccacagttaaggtgctttgaatgtaagatgctaacatgatgacaccctcactcaaagacattagcaaaacacactctctgtttccttctctatctagtttattctccgtctttccccaccaggatgtgagcagcacaaaggcagggatttttgtccattttgttcagtgcctgggattacacgtgcaccaagaacactgcctggcacataatgagtgctcctagagtttggagagagaaaagacaagacaggtgctgattctggttctgcctctcgttgacactggcaactggcactgcctctcattggcaactctggggataattttcccttgtggaacctcattctcttcatctacaaagtggggatggcagtactatatcacagggctgttgcaaggataaaaaagtaagaagtcggctgggggtggtggctcacacctgtaatcccagcactttgggagactgaggcgggtggatcccctgaggtcaggagtttgagaccagcctggccaacttggtgaaacctcgtttctattagaaatacaaaaattagccaggcgtggtagtgcacgcctgtaattccagctactcgggaggctgaggcaggagaatcagttagaacctgggaggtggaggttgccgtgagccaagatcgcgccactgcgctccagcctgggtgacagagggagactctgtctccaaaaaaaagtaaaaggtgtgatattgcactgttagcatgttagttagatttccatctagctccttgaaggaaaagattagtctagtctgaccctctgtgctctgggctcttagagggcagacgccctccctgatgtatgggaggagcctagcacaacacctcaggagaagttcttttgactttaactgctagcagctccatctgctagcactacagaacacactccctcgtgcttacttgccccatccctttacttgctcattcaatgctacctaataatcccctctattccatcttttgatttatctactcattaaatggtttccaccagaaatacctagggaagggatacttaacttcatcaggtactgagattctattttgtgaatgtcttctgtggatctttgactgtttccagcaattgatccagcctctcttggccttttctgcattttattatttatttatttattgagatggggtcttgctctgtcgcctaggctggagggcactggtgtgatctcagctcactgcaacctccacctcctgggttcaagagatttttctgcctcagcctccccagtagctgggattacagttgcctgccaccacgcctgactaatttttttgtatttttttgtagagacggggtttcaccatgttggtcagaatggtctcgaactcctgacctcaggtaatccacccgcctcagcctcctaaagtgttgggattataggcatgagccaccacacctggcccttgtctgcattttagattcacctgtgtatctgcatttccaaatgtgctttgcaaaatcctgaatgcaagggtgggtgtttgttgaagaatgggacacctcatgttgcccctgtgggttttctcaggaaggaaagattgcttggcagtgcgtggaatgcatggccttttgcaagctccttgataaccatcgctctaactttgcttgtttggggtgtggaggcaagatattttcattgagaattctgagtctttatccttttctctccacttcaagctgaaacttttttttttttttttttgagacatggtctcgctctgtcacccaggctggagtgcaggcgatcttggctcactgcatccttgaccccccggcctcccctgcacagtagctgggaccaaaggcatgcaagaccacacctggataatttttgtattttttttaaagacgaggtttctccatgttgcacaagctggtcttgaactcctgagctcaagtgatctgcccacctcggcctcccaaagtgttgggattacaggcgtgagccactgtgcgcagtcaagctgaaactcttaagcaaattttaaatcttactttaaggaacaatttcctcacctgtaaaatggggacacgaggatatgatggaagtgaagtcactttgtaactggtaaagctctgtacagatattagttaagatggttaatttcattaacctgtgaagattcttaactaaaccttgcgcaagttgcattggctgccctgtctaggcactaatatctttagacggactaaggaggaaacacactttttttttttttgagacagagtctggctctgtcacccaggctggagtacagtggcatgatcttggctcactgcaacctctgcctcctgggttcaagcaattctcctgcctcagcctcctgagcagctgggactacagactatggccagcacacccagctaattatttgtatttttagtagagatggggtttcaccatgttggtcaggctggtctcaaactcctgacctcaagtgatccacccgcctcagcctcccaaactgctgggattataggcgtgagccaccgcacccggcctacacgcttcttttcacaagaatgacacccgcaactatacttcccacgtaaatggagagcagtctggcagattcatctagacctagggttgggtgattattagggaaagaaaaggtccaaccaagccagtgggctgaagagaggacatgacctgctcagtccgaagcagatgtgtgactaaagtctagtctcctggcttctctgcaaaatacctcattatcggcattattaaccctaacaactgccatttattgaaatcccactatgtgcacgaatggggaccaatttacttctagatattacaacaatcttgtattactgtgcccacttcctggatgatgggtctgaggttcacagagatcatttgcccaagttcctactgaaagtgctaaggtatttcctgagactggctcagggtgtgttgccagacaacaatgcacacatttttaacacaatactaaacttagtatattatacttatgttaaaaatttcggagccgggcgtggtggctcacgcctgtaatcccagcacttcgggaggctgaggcgggcagatcacttgaggtcaggagttcgagaccagcctggccaacatggtgaaaccccgtctctactaaaaatacaaaaaattagctgggcgtagtggcgggcgcctgcaatctcagctacgcgggaggctgacgcaggagaatcgcttgaatccgggaggcggaggttgcagtgagcgagatcgtgccactgcactccagcatggtcgacagagcgagacttgtctcaaaaaaaaaaaaaaaaaggacatgtggtaattcccctagggaatttggccttagttgtgaaaaataaaaaagctataatcaatttctgttctatcggaaaaaaatgtattggctgtttagctgaaattcaaatgtaacttaacatcccgtattttttatatgctacatctggcaaccctggcttgaggctacctggcaaaaatcaaaacaggttcctccttgttatgccctatgcctctgttgcctttatttttatctttacgagcaatcattaacagtaacttcagactccaggctctggtcgctttaggaggcggaaggcggactagggtaggactcctggccctcatcaacaggactgccaagaagccgggcaccttctgccccgcacaaacatggccgcgcctcgccgccgaggattggctcccgccgaaagctcgtcctcctggctaagggagccccttccattgggcagttaaaaaaaatggcggaccccgcctcccgccgtcctcgggcgcgggggcggagcctagaggaggcctgggacagggccaccagtgattggcggagagcggtggtcaggccatcacgtggcccgaggcccgtttgtttgcggaagtaggaggaagtagaagtgctgagtaagccgaggtgagtgacctcgcgggtgggcggggcctgggggtccgttccccaacttcctcggcgctccggactcccaagtctccgccggaccctcctttggatattcctcgtgtctccgattctgaggcatgtcctccattaacccttatgtgactccctgagtgcccccaccttccatcttttcatccccctgcgtccccaattcccatcccgagaccgcccgtgtctcatctcgaacttgtggaccccagggaccccagcttcgaccctgagtttctcccctgaaccccagtctcctccgtgtgtctccctcagtatccctaacttcccgagtcaatccatctcttctctttccccgaccctcagtgcctctttaggccccattggccgtcctaattttccttcctgtgctcctctaagtgctcacttgattccccacttcacgtccgtctccacctttcgtggtgcctctactcatttctcactccctgcttctcctgcctttcctccctgctttttttccttgcctttcctctctcgcgtgcctccagacctgcccccgacatgctccctccttcccctcagcctggccaccccagagtctcccacccctaatcctgtgtccacctcctgctcccacagatgacttggaagctggtgacagggagcatgtgaccagggtgatcatgggactgggtcggggcaagcctgtgggtgtgggacagggagggcacagggcaaggggacctgtggccgtatttttaatgggctacccacatgaccccaacgaatacctccccctagcttctgggtctttccctcacctgcctcttacccgcccaacaggatgtcaggcaggttcggtttggcaacgttgaggctgcacccttgggctgaatgcattgtttttgaatgcattgtttttgttagagtttctgcctggagtttggaacctgttttctgtccaagtctcagtttcctcatctgtgacaggggaactgtacctcctgccctcgtaagtctgccatgaggttcaaaatttgaatgagaaaatgtagaaggtaaagctttataaccagtatggccctgtacaaatacatgattttactgttgggtcataggcagaattgaaaggagtggaaagggaaagggctagaatgagaagacaaggagagaaggatgagcaggaggtcccttgtctttcagtgtatcatttggcagtgtttgttcatcacctcttgtgagtcaggctcttctgtatatgttctcttcaccattcattcagtcatcgtttatctaacaaatatttacggactgtctgatgttctaggctacccttggtgtggccaatgatattctcacttcacatgagaaaaagagggcgcatgagttgcttgaggtcacaccgatgaggttgaagctggaatctgacaccagagcctgtgtgattgtcctgatgtgtaaggtttgctactgtttaggacacttcttgttccttccgtggattactttcttgttacatgagagactccccaaaagggagtttccctcttactcagcagaatgacatcactaagagatacagaaaggagaaatttaaatactctgtgtgtgtgtgtgtgtgtgtgtgtgtgtgtgtgtgtgtgtgtctgcagacatctattgggtgtgtgtgctgggggaagtaggtaggcaaggagtaaggggccgtagtgaagagtgtgttacaaacttcactttgtagagggtggctccctgggagaatatgttctgtgtctttcacagtggattttgatagggtcatgtcttaaatgcctcttctcgttttcggatggtgatctcatccagtcttatttctttaagtgccgtctctattctgtcagcccacaaatttatatccccagtccagtccagacctttccctggaatgacatactcaaatctagttgcttactcagcacctcaaacttaggcttttcaaacttgaagtatttatttattgatttatttattttttgagacagagtctcactctgtcacccaggctggaatgcaatggcacgatctcggctcactgcaacctccacctcctgattctcctgcctcagcctcccaagtagctgggattacaagcatgcgccatcatgcccaactaatttttgtatttttgtagaggcggggtttcaccgtgttggccaggctggtctcgaactcctgatctcaagtgatccacctgccttggcctcccaaagtggtgggattacaggtgtgagccaccgcgccaggcctcaaacttaagagtttagaattgagctcctgttagttctgccctccatccctgaccccactcttcaccaaaacatgtccctcccactctctttctcatcttaggacataggagtattgttcattcagttgctcaggtcaaagctgtgagattatctatgatgcctctctgtttcttaccccacacccagccagagtgatcttgttaaaatgttgtttctttgcagtggcctctcctctcatggcacatgcctggccccctgttgcctctctgatgtcactggcttccttgcttttcctggaactcgctaaacatgttccagccccatggcctttgcacacgctctctttgcctagctattcatatgactttcatctctctccatcaggtatttatttaagatcaatttcttggtgaagacttctctcctcacccaatctaaaatttcactctccacctcagcacttcctatccccattctctggtttttctcctcagtagttaattgtcatctaaaacctttgtaaatatttacctgtttatcttctttattattagtagctctgtctaaaatataagttccaggatgtcagggattttgtggggttttttttggttggttggttgttttggttttgagacagggtctcactctgttgcccaggctggagcgcagtggtgcgatctcagctcactgcagcctccgcctcctgggtttgagtgattctcccacctcagtctcccaggaagctggaattacaggtgcacgccaccacacccagctaatttttgtattttttggtagagatggggtttcactatgttggccaggccggtcttgaactcttgacctcaagtgatccacccgcctcggcctcccaaagttctgggattactggtgtgagccaccgcgcccggccttgttttgttttaagacagggtctcactgtcgctcaggctggattgcagtggcacaatcacagctcactgcagcctcgacctgctagacttaagcaatccccccacctcagccaccttagtagctgggacttacaggcatgagagataccatgcctgggtaattgttaagtttttgtagaggtgaggtctcactatattacccaggctggtctcaaagtcctgagcttaagtgatcctccttccttggcctcctaaagtgctgggattacaggagtgaactgccgtgcctgaccagtctgttttgtttacgattgtatcctcagcggttagaacaatgcctgccacaatccatctcagtaaatatttgtggagtgagtcataacatgggccacactgtaccgtgccaccagcccaaagatctcttaaagtcacccctgtctcatgtgcttgggagctccagtgacagtttcggggcagtttgcttccagctgtggtccagccaagcggagtgaatgaaagagatgctttttccttttgtgaaaggacgttttgctctggctcacgtgagcagcagtgcattttgagacgagggccttggcttttggaatctaagagcctgttgagcaagcctcgctcagccaccttctttcagctttctcctgaaggcagtttgaggattaagagcctgatgctctggattccacctaattgggttcagatcctggcaaactgtgtaacctgtgccccagtttcctgtgtaatgtggagagacctggaccttttcttacaggtgtttggagggttaaatgtggcaattcggccgggcgcagtggctcatgcctgtaaccccagcactttgggaggtggaggtgggcggatcaccggaggtcaggagttcaagaccagcctggttaacatggtgaaaccccgtttctactaaaaatacaaaaaattagccgagtgtggtggtgcgcgcctgtaatcccagctagtctggagactgaggcaggagaatcgcttgaacccgggaggcagaggttgcagtgagccaagatcacgccattgcactccagcttgggcaacaagagtgaaactctgtctcaaaaaaaaaaaaaaaaaaaaagtggcaatttacccgaaactgtggtgaagcgtctggcgccctgtgggtgctgggcagcagtgggtgctgatggggtgtgaggggatgggatcaagccctttcccactaacttaggaaagaggttggaatgagctggggtcagagggaacatttgcggggacattttgccgggaggctgccttggaggttcagaggctcagatgacccctgtgttcattcagtgttttctcacccacagattgagcacctgctgtgtggccagccctttgcctagtgctgttcaagagtcagaggacataggcaggcaatcccccaccacaacctgccaccccatttcctctcttggggccttgatttctccacatgccaaacagggagaatgattgcaccttccttgtttctttttttttttttttgagacagtctcactttgtcatccaagctttagtgcagtggcatgatctcggctcactgcagcctctgcctctcgggttcaaagattctcctgcttcagcctcccaagtagctgtgattataggcacccaccatcacgccaggctaattttttttgtagttttagtagagatggggtttttttctcacacgttggccaggctggtcttgaacttctgacctcaggtgatctgcccatctcaccctcccaaagtgctgggattacaggtgtgagccaccgcgcccggctgcgccttccctgtttctttgtgagcttggaggtggatcacaagtgtgaaaccctttgccaaccgtgaggcatggtggccttgtgagaggacggaggccggtgtgtggtggcatgctcccgtgctgtgtggcacagacggagctacaggaaggaagttggggcagcttggcactctgagtggaccctgagtttccagcctgctctgtcttgactgggtgggaggagggtgctcaggagggtgtcactgctgccaggttctgctgccaggaccatccaacagttgttccaatcatgggacatcctgtcgtcagcagctggggctcgtgaggcctgatttccacctcgggcagttctgtgtgtgctcctggaatcccccacgtggccaagcctgtgaggtctgcttcctggcctgctgcctgtgggttcctgtcacgcacctctcgggcagctgtccggctcctctgctctcggcttagtcaagaaggaagcagaaggcttggagtctttcctgcttggactaggagtgagctcagcctaagtgccctgactatatataaagctgaactttccagaccgaagcctggggatggatcagtccgatcacttagggccgctcctgaaggagtgcaggtgctagatacaggttctcccggtggaggagcgaaccccttgtgggccgttagctactggtgggatttgagcatggtatttccctatccgttgtggagaggagcatggcagctcagagtgggtgggaacagtgtgtggtccctgttatcaccttcaagggaataaagtgtgtctgggggcttcagaggtgctggccccatgggcttataggtggttcattcattcattctcattcattcattcaccaaacttattaaacacccactgtgagtcaggaacatcatgccaggtgcttagggaaacaaatcaaagcgggttgggtgagcagcccaagccaacagatgcacccccattctcacatggtgtgtgttcctgtgggctgggccctgggtggtgtggggtgctggggagaagaggaaggcacaccaggctgcagggcggaggtgcgggtatgaattttcagaggagatggcacctgagctgtatcttcatggataagaagagatttgttcatttgtcctttgtggagcacacattcaggttaagaaagtggggaggatgggctacgctgatggagcgtatgtgtggtatccccaagtgcactgagacacgagtttgacgtgttctgggaagatcgatggtgcggcgtggctggagtagaggtgagggatgagttggaggggtgagttgggccagctctcatggatgctggagtctgggctttccctgggaggtcatggggcgccactggccagggtcagcagggagacctgcagctggatttgcatcgtacagtgggcatggaggggtgtcaggctgggttgggaaccgtgcaggctggaagggcactctggtgctctgagcattcagagggggcagctgggccttgaaggatgagcaggggctccagcaggaactggagagcgcattccagggaggacgcaagtgcaggcccctttcactacagaaaagcagttttcacacagaccttccaaaggggaggagaggggactgcctgggcctggcagctgcggcaggtagcagcaatcagagggcagggaccgctcctcccgtgcctgagacctgcccagggtccttcagggaattcgtagctgaggaggaaccagatttttgggactgagttctccctcaccacccgctctgagccaccctcttggtcccttgtcctctactgcacttcttccggggcttggctcctcgtcatgagaggagcttccctgggcatggcgaggggcgtgactgacatagcagccctggacaagtggctccaggtgacctgtgttcacgttgatcacagcactaaccacggcccctcctctcagcaccttcccctctcgagccgtccagtcccagtgaaaatgctcaccgttcatgggtgggctgagcaagcccctgatctctgccttcctccgtgttctgatctgcttcatctgctgtgaaggcctctcgccatttcccccgctggcaaactcctgttcttcctggaaagttcagctaaaaagtcatcccctttaggggtccttccctcaggggaccgtgcacttggcgagacagggactggtcttgggtctctctgttgactgttttatgaacccaggtagtcacttccagggaactcatcagagatgctaccattggctccaatctccctctgttcccactcgaggttttttgtttcttcgtttgtttttctttctttctttttttttgagacagagtctcgctctcgcccaggctggagtgcagtgacatgatctcggctcactgcaagctccgcctcccgggttcacgccattctcctgcctcagcctcccgaatagctgggactacaggcacccgccaccacgcccagctaattttttttgtatttttagtagagacggggtttcaccatgttagccaggatggtctcaatctcctgatttcgtgatccgcccgccttaacctcccaaagtgctgggattacaggcgtgagccactgcgcccagcccgtttgtttttgttttttggtggacatcaactttaatttgccctttgttttgttttgtttttgaggcagggtcttgctctgtctcccaggctggagtgcagtagtgcaatcttggctcactgcagtctcgacctcaagaggatcaagcaatcctcttgccttagcctcccgagtagctgggaccacaggcgcacaccaccatgcccagctaattttattttatattttgtagagacagggttttgccatgttccccaggctggtctcaaattcctgggctcaagcaatccgtctgcctcagcctcccaaaatgctggaattacaggcacgagccactgtgcccggccttaatttgccctttgaacatgtacaattcagggcctctctgggcctcagtttcttgatctctgagatgggaagatgggataataatacttgttcctcccgtccttcagctcctccaggggaccctcacaccagcacactctctgtcagtcttccctcaatgaacccagcaggcaagcttggttttgacagaggatgggtgagcagagataaggaaaacggccagaaatatctggcttccctcagcaggggcaccaaaattggtacctggaaattgcctggcttggacaggcagaattgtcactgtcaacccccaccaccaaaggtcttgggtctttgtctttctgcttgtggtgtttgagagagctgcttgacacagccgaggtgcggtctgtgtcaggtgacctgggcatcctgggggtgcagggagaagcccaggtaaggaggaggaggggccggtcatcagtggggaaaagtgattgtctaccccacgggaaggtcaagggtaggacgctgtgagaagccagggggagagatgaagtgaggcatgatgcggggggccctcatccaccatccccctcttgcagctgtgctgggaagagcctaggctccagggtccaaggtggcagggacagaaggaagcacgtgtgagcactttctccctgctggcccgccttcctggttggcaatgccgtgagtgttccaggatgtggccccgtggctgtcatttcctttcttccacctagtgataacaatggccactgtttgtgtgcccacagtcggcctgtgtcccagacaccttccctccattgcgtcatctcgtcctcctgcctaccctgaaggctggatgccagccaagcctgtcgtttctgtggccatgctgtcgtgggtgtgtggggggcatcccctagccccaggctctggtggggggtacacaggctgggccattgacgaaggggtgtgtggaatctttctttgatttcactgcacccctggtgactttctccctcaatctgaggctcatgggtgctggatgctcttgactctctgcccttcctgggcgcacccctccgcgtccctgtgggcccgtcctcggggtagcctctctgcgctcttccaggccaggcctgagtcccacaggtccccatcttcccggctgcagcccccagaggctcagcctatactgctacttcctttgaaaactataatcgctttacatagcatctggaaaatagggaaaaggaaaaaacaaaagcccataaacccagcaccctcatctactcaatggcatgttttctgtcagtctatcttggtttgttttctatcaggctttgttttttctatgcataatatttactcagttaaatttttgttttgacaaactttctgtgagccaagcttgtggacggagatgaaaagacgagcagctgcctttgagaaactcagactctgggccagcccatctgggtgccagctttcactgctccacccactagctgggtgaccctgggcccgtgactttacccctctgttctttggtgttctcatatgtaaaatgaggataataatagtaaccagttcatagagtggttgtcagacagaatgattaatgtacgtaaagctttcaggatggtgccagcaagatgcacaggagtgtttggtaggaggatgacgaagcttaccgtctggcaggaggggcagttgtaacatgctgggctgtgatagtacagatgtgtttaaagtgagggagagcccagagcaaggagagagaacctggcatctggtgatggtgtatcaagaacattttaggccagacacggtgactcacacctgtaatcccagcactttgagaggctgaggcaggcagatcgcttgaacccgggcgttcgagaccagcctgagcaacgtggtaagaccctgtctttataatttttttttttttttttctgagacggagtcttcactctgtcacctaggctggagtgcggtggtgctatcttggctcactgcaacctccacctcccgggctcaagtgattctcctgcctcagtctcccaagtagctgggattataggtgcccaccaccatgcccagctaatttttttatatttttagtagagacggagtttcaccatgttggtcaggctggtctcaaattcctgacctcaagtgatctgccctcctcagcctcccagagtgctgggattacgggcatgagccaccatgcctggcctctataaaaattgtttggaagaaattacctaggcctggtgatacacacctgtagtcctagctactcaggaggctgaggtggaaggaggtagaggctgcagtgagccatgattgagccactgtactccagcctgggcaacagagccagaccctgtttcaaaacaacaacaacaaaaacatttttaaggaggaggctgagaaccacgagaaccaagcttggatttgaagaaggatcagggctttctcagacagaaaaggagaggaagaacattccagatagacatcattgagagatggcactgagccttgtaatgggacactgcgaacttttcttcagttgttatgatctttttttttttttttttgagacggagtttcgctcttgttgcccaggctggagtgcaatggcgccatctcagctcaccgcaacctccgcctcccaggttcaagcgattcttctgcctcagcctcccaagtagctgggattacaggcatgcgccaccatgcctggctaattttttgtatttttagtagagacggggtttctccatgttggtcaggctggtctcaaactcctgacctcaggtgatccgcccgagtcggcctcccaaagtgctgggattacaggcgtgaaccaccgtgccttgttggtataattattagtattgatcttttttccttttcatgtgcctcttagtgggccccttgcttttgtcttccttctgtccccagggttgatcctgtgctcagcacataggccagggaagaatgtggctgtgacccagtgtccactcagatgtcctctctcccccagggcacccatactctgtccttagtgtcttttgtctggtgacatcttggcacagaggcagagggcggcctccgtctgattggcgcctggctttggtgacagtaccttaggaaggcagtgtattttctgggaacctaggaaataacaaggtatctaattccatcatcaacactggggacaatttccatggcagaaactatgactctgaatatgcagcgtaaagttaccacccagacactgctgctcctgagtctcgaatggcatcttctgcaggggctcccccacctgcccctgcagaaggtgcagttcgttcatttccaaggagcttgcttttgtgtgctgtctctcggagctctttgggaaacctgtggtagcaggaaacaaaggatttagaccaatgccgatgatccccttgctccgatagagtgtgacatgatgctggtcaccttttggtatctaggaggggggacattgattttgtttgcggaagtgaaatgatccatgctggcctctttttttttttttttttttgagacagagtcaccctatcgcccaggctggagtgcagtggcgcgatctcagctcactgcaacctctgcctcccgggttcaagtgattctcctgcctcagcttcccgggcagctgggactacaggcgcctgccaccacatctggctaatttttgtatttttagtagaggcagggtttcgccatgttggccaggctggtctcgaatttctgacctcaaatgatccgcccgcctcagcctctcgaagtgctgggattacatgcctgagccactgtgtctggtccatactagcctctttgagtgctgaaaggttatctctgtaacttatttagtgagaaccctccatttgcccagggcattactgcctataatgtatgttcacatgtgctatctcctttggtcaataccacacactacaggtgaggaaactgagtctctgctgggacactgggtcaggaagcaggcagttaaggtcacctgtgcacagtggcagcacagggggacagccttctaggtagccagcctggcctgagggttctgtcacttttacctcccactcagtgttgtttctctttctttcccctccttttaagatccctccaggcccaggatctggggacaacgctggtggggagtgatctgggtgtctgtgcaggaaaccgctgcactgggtgagatgggcatgggagactgtgcctggctgaccagagacctcgttttcttccagacagagggggaagacggtggggcctccccacctgccccgcagaagatgcagttctttggccgcctggtcaataccttcagtggcgtcaccaacttgttctctaacccattccgggtgaaggaggtggctgtggccgactacacctcgagtgaccgagttcgggaggaagggcagctgattctgttccagaacactcccaaccgcacctgggactgcgtcctggtcaaccccaggaactcacagagtggattccggtgggtgatgctcagcgggaacatacttctctcctttcactcccccacgtctcggattggaggtcttattggccgagaagcagtttctttgagtctctgtctgaggggtctggagaggggtgggagagaggggagactgtactcttggaccagagggaagggcttccgagactccacacttctggcccatcagtgtcccagcacgaggctgaggatggaagcctgggttgtttctggcctggaggctcgacctatatggacaaagggaagaaggaaggacagggagactgagagtgtccacatcagataaggcccatggggagaacctttagccctggctctttatttttggttttggtttttgttttttgagacagtcttgctctgttgcccaggctggagtgcagtggcgcaatctcggctcactgcaacctctgcctcccaggttcaagcgattctcctgcctcagcctcctgagtagctgggattacaggcacccaccaccacgcccagctgatttttgtatttttagcagagacggggtttcatcatattggccaggctggtctcaaactcctgacctcaggtgatctgcccaccttggcctcccaaagtgctgggattgcaggcgtgagccactgcacctggcctagccctggctctttaagggcatggccgttctcataggggctgcccagggtttgcttaggaaggctggacagagctgttgcctcttggggcatgctgggactcccctgggcctgaagagaaggctcaaaagccaggacaggcctgagggaaccgggccaacggcagagctggttgggaaaaggggagaagcagccaaggttccaaatgcaggccccagcagtgcttggcagactggcatctagttgggctcagacagatatccctgtttccgctcacctatccatctggctgtcctgtcagccatccattcaacatgcaccaagcacctccagtgtctccagagtcctgggcttcgggccagtcctggctggcctgtgagatgacaaacatgtcctgtgtctttaaggaacgtacagtctggtgggggaggtccggtgcaaacaggcgtcatagcaccccttgaggagtgctgtgacagagggagagcctaggaaacagtgtggatcacaaggaggtgattgagagctactctgcgtctggaagagtgaggaggagcctgtgtggcagaacaaaatggataaggtcgttccagccgtgcagaagtgtggaggtgtgagcctgcaggcaggtggctctggttggatcccaggtgcatgcagggctttggtgagagtgaggctgaaggaagcagctggggactcattctgactaaagaggcatggcaggaggggtctctgaaagtgtcaggctgggggccaggggctgccaccaacagaagagcaaggcaggtatcagggccccatccaatcaggtgagaattcagagcctggctccacaaggaacctgaggcagaggcacccacagcaggtgcttgggctaaatgcagctcagtggccagtgcaggcaccagttttaatacagtggggccattccagattctgagtgcagatggggctgagcagaccgccttccagctggactcgatcaggactgaccctggacggggcaggcttgcacttgtagcttcagagctccactgcaggcacagctgaccagggcagcgggtccactccttggagagctggacagccccacttttgaggtacacggccctggggataccactaatctccacgtaccaataatcaccaagttctgtcagttgtaaaatcccttgacaggattccagatttgtctcagccagcttaagccccagtgtgggcagacctccatcccaggaggatttagtcctttgtcagcagcttcttagctacacgtaagctattctgtggtactttatagtttacaggattttttgttttcttttttttttttttttgagacagagtctcgctctgtcacccaggctggagtacagtgacgcgatctcggcttactgcaagctccgcctcccaggttcacgccattctcctgcctcagcctcccaagtagctgggactacaggcacccgccaccacgcctggctaatattttgtatttttagtagagatggggtttcaccatgttagccaggatggtctcaatctcctgacctcgtgatccgcctgcctcggcctcccaaagtgctgggattacaattttacaggatgtttttaagtatgttgggttagcacattctctgccaatccgtggaggtgggcaaggaaggcagtattccattttatgcatgagaaaatagccttgggatgataagtgattcatcccacttatacacaggaagcagtgaagaaacagaatcagtgtcttctggttcccaattcatttctctgtgctgctgtgttgtttccatgtatgtatgtatgtatttatttttttgagacgttaagtcttgctctgttgcccaggctggagtgcagtggcatgatcttggcttacagcaacctctgcctcctgggttcaagctattcttctgcctcagcctcccgagtagctgagactacaggtgcgtgccaccatacctggctaatttttgtgttttttagtagagacagggtttcactgtgttagccaggatggtcttgaactcctgacctcgtgatctgcctgccttggcctcccaaagtgctgggattacaggcatgagtcaccatgcccggctttgtttgtcttatttctaaattttattgatttatttattttcacagtcatagctctggagtcttttttatcttctcccctctaacctgctcccacccgaacctttccatttcagcagatagcatcattgcaacgggctgtgccagatccagccatcacatccacctttccagccaaagggagggtggaagggcaggatgcagaaggtcaatctccccctcctcagggacatttcatggaagttgcacgcattggccagaacccggtcacatggccacagctaactgcaaaggatgctgggaagtgttgcctgtgttgcagacagccacgtgccagtcgaaaatcagaggttctttctccctccgtcttgctgctggctcgcttctccagaccacagtcattgtgcacgtgtctcctgctgctccggctgtggcctgcactcctctcatcctcttccaagctgctgtcacagcgctgtttccagagggcaaatctgattggtcactcccctgctttactccccaagggcttcctgttttcttttatttttatttttattttcattttttgagatggagtctcgctctgtcgctcaggctggagtgcagtggcacaatgtcagctcactgcaagatctgcctcctgggttcatgccattctcctgcctcagcctcccaagtagctgggactacaggcgcccgccaccacgcccagttaattttttttgtatttttagtagagacggggtttcaccatctactcttagccaggatggtctcgatctcctgaccttgtgatctgcccgcctcagcctcccaaagtgctgggattacaggagtgagccaccgcgcccggccagcttcctgttttcttaacacatcaggtgcttaatgacttaaaagggcccagtgtgatcaagtttctgcctctgtgttctcagctcatgccgccttgtgctcctggcctttgcccaggctcttgctgtggcctggaatactcccctttctttgcctgccttccttcctcttgccctcccctgacctgcaggctggattaggagtttctgctgggcatcccatggcacccgtccctgcactggggatcctgctttcctggtaggccacagaccttgtgaggggagggactgtgtctgttgggttcatgacagtgtgcccagcccccagcaggtgcctggcgtagatcaggtttgtggaacaaatgaatgtgatatattaatttagctttagagtattcattgagggctgctgtgtgccaggccctctgtgccacctgggtggagggtggaggactgttgcattgagggcagttgaaggagtgagctgggaagtgggaggtggaggatggggactgggatgcagggtttgaggttatcaggggtcccagaagcagtaatgccaaggcctaggctgtgacctggagtgagggctgcgatggggtggggtggggtcgaggctgtggaggagggtcatcagggcactgctggagccctggggttctccagggccgggggtggtcattgcagtgttctcccagctcctctcaacaccctgcggtctgtggagagcaggcctggtgcactggacttgcctctggccagggctgagtttctgccttctaaacgatcttcctcctgtgttgccctagaggcctctggactgtcctgagtacttgacgcgtgttagagtgagcatgggctgctagccttccgctccaggtggaggagtttctgttgttcttttgctgctgttgctgcagtgagctgccaggctgagcttctggatggacctgggggatggaattaggagcttctgaattcttgggttgtataacctaaggccggagagtcccacagcactgctgctgggcggagagactggaccctgctgatacagacagcgacagcagcaggagcatctgcagtttcccagcaggtcctgcatgcctgggcttggcactagtctaagtagtaactcatgttatcctcacgacagtcccacgaggtggggtcattactgacctcctattacagatgaggaaacagaggcttgcagaatttgagatcacacagctggtcagcgtagcgattattcagaccctgtcacctggctccagaacccactcgtttacctttcttacatcagggctgctttgtagtgtggcgagctgagtggagctccacccgcctgggctgatcctggcccttcctgcctgacctatggtgcgggggccctggctctccccgtgtgagcccccaggggtcacttgtaatatgcctgtgtacactatgatagcatagatacttctgttcctggtacagattaatcatttacggctggcattgacttgtaacagatgacatttgatgaaatcaaccagcctctcactggtatctcagcagaaacagggctgtacctcccaggcatcctgggaaggatgatagaagtgtgtgatctgtgcttccctaccgggagctgacttttgaggctctctggactgggactttgccataaaactgcttatcagaaacctcagataagtggagtgccctgtgtcctggccacgtactctggggccagctcctccatccattcagtcctcccacatcccatcttcaccaagcagagtggaaagcggcaggtctctgcgagaaaaggaggctctgtacccagccttcagtgagataactttagagtggggccttgtattccctacacaggccttgtccccgacacggcctctttgcccttgcttctccttctgctaagaatgctccttcccaactccttggctggacacacggctcctgctctgtgggcctgtcctgttcccactcagagcctcagcaccccccatgtggccaagacacagcccctcttgccttaggttgccgtgggtctgtttccacatctgtttcccctccagactgcagggctcctgagggacagggcctggggccaagtctcctctgcgttcctgatgcctggtggtgtgccacgctctccgtgggtgcacggtaaatatctgccgagtggctagatgtatccatggttgctgaaggccaagtgtgttgaccagagggcgtgggaaaggctccactggggtggctggggtagagatagaccttaaggggtccagaagactccaccagctggagggaaaggccctacagagacaaggtactaggaaaggcccagaggacagaggaggggccctgtggggagcctgtgggcaggaagggcctgtgctgggctttgaaactggggactcaggtactgctctagcgtgagggtccttggcattttttttggtccaggaccccctgaggtccctggggaatgagaacaggctcacacagccactttcaagaggtttgcaggtcccctgaggcttagccacagacccctcccaccccagcagagacacagcagaggcttctgagtggaggccaggtggcttcagcctggggttctagaagggagggaagagacacacccccgtgtgtcctccagagcctcagccttctccctgaatctcccctttgcctcctcactgtaacccacacctggctctccttgaaggacccgcttgccccgcagcctcctgagagttttctctcccagtccctctcccactgggcctggaggtggggtagggtcctccttgcccccagccttgaatcttctgtcaccctacaataccacttgctgtcaccccggtgataggtatctacgagcctggggtgctcccccacatcctcaaagatgtgagcccctgactcagcgttgcctctggttcctgaccctccacattcacatgaccacgcgctggcctttatcatcgccagtgacagcagctctcccgtaaatacaagtttcaagcaccccactttccagtctctgccttctgtctttccagttcattccctctagtcctccacccacacagtgcttttccccattgacagggaattgctcctggccgcttttcccagccccatcccgttcatgtgccttgctttgtacccagcatggactccatggcctgtcattgtcactccttcacctatacttcctgcctccttgcttctctctctcttcgtcatcctggcatcaccaccccagaactgcttggtttcagttctccaccatggctaggggaacatacctttttgctgactgctctcactttctttttttttttttttcttttttttttttttgacacagagtctcgctctgttgcccaggctggagtgcagtggcacactctcagctcactgcaacctccacctccggggttcaagcagttctctctgcctcagcctcctgagtagctggtattataggcacccgccaccacacccggctaatttttgtattttttttagtacagacagggttttgccatggtggccaggctggtcttgaactcctgacctcaggtgatatgcctgccttggcctcccaaagtgctgggattacaggcatgaaccaccctgcccggccctattgctctcactttgaaatcacgacatgagccacagtgagcctatgatgtggtttgacgtctttctgcatttctctgttcacccctctcccagaaggcatgcctccttccctcccctcagcctgcagccccttcccctccacgcttactctcagctgatagccctgctgctgtctcgctgagaaaatagaaatagccagaggagaattccctctaccccatgcacacacctctgtccccgcctactccacattccctgttgtcagcaccgatgtgtttagctgagggtggtccccccattcaaggccatcatctcctgtcatctacttcttgacaccatttgaacaattatctcccctctttcctacataacactttccccttttctactatatattttttgctatggattgaaagtatccccccgaaatcatatgttgaagccccaatccctcgtgtgatggtattaggaggtagagcactatgggggtgattaggtcatgaggatggagccctcatgaatgggattagtgcccttagacgaagaggcaagaaagagatgatctgtctctgccatgtgagggcacaacgagaagatagccatctgcaaaccaggaagtgaaccctcatcaggaactctatcagccagcaccttgatcatagacttcctagcctctagaactgtgagaaataaaggttgtttaagcctcccagtctgtagttttctgttataatgtcctgacctaagttattttccatcgctatacaatgggttatttttttctttaaaaaaaaattatttcttgactctactttttcctccagagactgcttatattccactgtcttcattcttctcctcctgttttctctctttaaacttttcaaaaatagcaaaatataacacatatagagaaaatgatatacagctcagtgatttatcacaaacacctgtgtaaccaccactcgaatctagagataggacattacagcaccccagaagccctccttttgtcccctcttcccaaagaagggtaaccaataacttgccttttatgataaaggctttttttttttgagatggagtctcactgtgttgcccaggttggagtgcggtggcgcaatctctgcttactgcaagctctgcctcctgggttcacgccattctcctgcctcagcctcctgagtagctgggactacaggtgcccgccaccacgcccggctaattttttgtattttagtagagacgaggtttcaccgtgttagccaggatggtcttgatctcctgacctcgtgatccacctgcctcagcctcccaaagtgctgggattacaggcgtgagccaccgcccccggccaagataaaggcttttctatctggcttctttgttagcattttgttggcgagattgatacgttttgtgtgcagctgtctgtcattttcattgcaatagaattccattgtctactatatcacagttactcattctactactgatgaaaatttgggttatttctagtttttttggtgcatacatgcatacatttctggtagacatacctagaagtgaactggctgcattatgggccataacttgtcttcaacgttagtaaataataccgcccgtctgttttccaagcagcagtaaatggcactttctgttacttcatatcttctgttacttggtactgtcaggttttaaaattttagtcattctgtcgggtgtctagtagtatgttattgtggttttattttgcatttgcctgattgcaaatgaagttgagcactttttgatacagtgattaaccatttggatatcctcttcagtgaagtatcagctcaattctcttgactatttaaaaaataaagttgtttatctttttcttacagagttttaggaggagttttttggtacatgtgcagtccaaatacacaccttttgtcagtgatacgtgttcagctgcacacacggtgttttgcctttttattcttttaatggtatctattgataaacatgagttcttagttttaatgaagtcaaatttgttcatcttctttacggtgtactttttgtgtcttgtttaaggaagtccttctctatcttaaagctttgagaagcattccttctttctcctattttctaaaaattgttgaagatctccttccttccttccttccttccttccttccttcctttcatctatctctctctcacccaggccaaacttcagtggcatgatcatggctcactgcagcctcaacttcccaggctcaagtgatcctcctgcctcagcctcctgagtagccaggactacaggcacgcaccaccatacctggctaattttaaaaattttttgtagagacacggtctcatcaagttacccaggctggtcttgaactcctgggctcaaacaatcctcccacctcagcctcccaaagtgctgggattacaggcatgagtcacatgtctagcctgtattctttctttcttaaatgtttggaagaattcatgggtaaaaccatgtgaccctggagtttatttgtgggaagcttttaaaacatggattcgatttctttaacaaatataggactatgagattttcatctcatgtcggtttgggtatgttgtgttttcaaggaatttttctattttatcgaagttgtcaaatttgtctgcaggtccccttatttcctttttaatgtatggaggatctgaagggatggtactttgtgttgtctctatttcttgtttggttttgctagtgatttgccaatttaaaaaatctttccaaagaaccaacttttggctttgtttattttttgaaaacctgagtagctgggattacaggcgcccaccaccacacccggctaatttttttatttttagtagaggtggggtttcaccatattggccaggctggtctcgaactcctgacctcagatgatccacccgcctcggcctcccaaagtgctgggattacaagtgtgagccagtgtgcctggcaagccgctttttaaatggcaccaatcccattcatgagggcagagccctgatgatcgaattacctcctaatggccccatttcttaatactatcacactgagaattaagttttaacataagaattttaggaagacacaaacattcagaccatggaacatatataaaacagttgtcctaccaactaacagaatacacattcttttcaagaacacctatataaaaattatagacactgacctatgctggccataaagcaaatatgaacaaatttcagatacctgaagagatttagactatgttctccaactacagtgcaattaagctagaaatcaatagcaaaaatgtaactataaatgagcccgtatgtttgaattttaagcaagatatatgtaaattatctatggttcaaaaaagaagtcacagtgaaatttagaaaatatcttgacgtggcgggttgcagtggctcacgcctgtaatcccagcactgtgggaggccaaggcgggtggatcacctgaggtaaggagtttgagaccagcctggccaacatggtgaaaccctgtctctactaaaaatacaaaacattagccaggcgtggtggtgggcacctgtggtcacagctacttgggaggctgaagcgggagaatcacttgaacccgggaggcagaggttgcagtgagccgagattgcaccactgcactccagcctgggcaacatgagtgaaacttcatctcaaaaaaaaaaaaaaaagaaaagaaaaagaaaatatcttgacccaatgatgatgcaaatactacgtatcaaacttgtaggatgaacttccacttctggccatgacagaggagcctgtatcagactagccttcctatttatatatttatttttgagatggggtgtcgctctgttgcccaggctggagtgcggtggtgcaatctcagctcactgcaacctccacctcctgagttcaagtaattctcctgtcccagccttccaagtagctggaattacaggcgcccaccaccacacccagctagttttttatatttttagtagagacggggtttcaccatgttggccaggctggtctcgacacctgacctcaggtgatccacctgcccctgcctcccaaagtgccgggattacaggtgtgagccactgcgcctggccgtgagtgacctttttaatgtgttgttgaatttgatttgctggtattttgttgagaagttttgcatcaatatccatcagggatactggcctgtagttttctttttttatatgtctttgtctggttttggtgtcagggcaatactggcctcatagaatgagtttggaagttttctctcctctgtttttcataatagtttgagtagggttggtattagtttttgtttaaatgtttggtaaaattaagcagtgaagccactgggtcccaggcttttctttgctgggagacttttcattacagctttgatctcattacttgttattggtctatttaggttttggatttcttcacggttccatcttggtaggttgtgtatgcctaggaatttatccatttcttctagggttttcaatttattggcatataattgttcacagtaacctctaataatcctttgagtttctgtgatattggttgtaatatctcttttgtcatttctgatttttttgtttgggttttctctctttttttgttagtctagttaaagatttattgattttgtttatcttttcaaaaaactttattttgttgatcttttgtattgttttgtttcaatttcatttatttctgctatgatctttattatttcttttcttctactaattttgggtttggtttgctcttttctagttctttaagagacatcattagattattttgaagtttttctacttacttgatgtaggtgcttataggtacaactttcctcttagtacttctttccctgtatctcacaggttttgatatgttgtgtttccattatcatttgtttcaggatgtttttaaatttccttcttaatttcttcattgaccattcaagagcatattatttcatttccatgtgttcgtatggtgtgcaaaataccttgtttttgatttgtagttttatttcattgtgatcacagaagatacttgatatgatttcaaatttaaaaagtaatttggctgggagaagtggctcatgcttgtaatcccagcgctttgggaggccgaggcaggcagatcacgaggtcaggagatcgagaccatcctggctaacacagtgaaaccccgtctctactaaaaatacaaaaaattagccaggcatggtggcaggtgcctgtagtcccagctactcaggaggctgaggcaggagaatggtgtgaacccgggaggcagagctggtagtgagccgagatcgcgccgctgcactccagcctgggtgacagagcaagactctgtctcaaaaaaaaaataataacaataataataatttaagacttgttttgtggcctaccatatggtctatccttgagaatgatccatatgctgaggagaagaatgtgtattctgcagccgttggatgaaatgttctgtaaatatctaataggttcatctgatctatactgcagactaaggctggtgtttctttgttgattttctgtctggatgaactgtctaatgctgaaagtggagtattgaagtctccagctattattgtattgaggtctatctctctctttagctctaagaatacttcctttatatatctgggtgttccagtgttgagtgcatatgtatttaaaattgttacattatcttgctgaattgacccttttatataatgaccttctttgtctctttttatagtttttgtcttgaagtctgttttgcctcatagaatagcatagctattcctgctcttatttggtttccatttgcatggaatatctttctccatccctttagtttcagtctatgtgtgtctttacaggtaaagtgtgtttcatgtaggcaacagatcactgggtcttgtttttctatccgttctgccactctgtgtcttttgattggagagtttagtccatttatgttcaatgttattactgacaagtaaggacttactcctgccactttattaattattttcttgttgctttgtgatcttctttctttccttcctgttctccttttagtgaaggtgattttctctggtggtatgttttaatttcttgctttttatttttttgtgtgtatctgctgtatgttttttgatttgaggttaacatgaggcttgcaaataatatcttataacctaatattttaaactgatgacaccttaacactgattgcataaacagacaaacaagcaaagagaaaactaataaaaactctacattttaactttgtccccccactttttaacttattgtactgtttatgtctgaaaagttgtagttattatttttgattggttcctcttttagtctttctactcaagatatgagtggtctacatatgacagtgttataatattctatatgtttctgtgtacttgctattaccattaagttctgtactttcaagtgatttcttattgctcattaatgtccttttctttcagattgaaaaactccctttagcatttagcagtatgtgaactgcatttttcaagtccagaatttctgcttgattcttttttttttttttgagatggagtcttgctctgtcgcccaggctggagtgcagtggcgcgatttccgctcactgcaagctctgcctcccgggttcacaccattcttctgcctcagcctcccgagtagctgggattacaggcgcccgccaccacgcctggctaattttttgtatttttagtagagatgggatttcaccatgttagccaggatagtctcgatctcctgaccttgtgatccgcctgccttggccttccgaagtgctgggattacaggcgtgagccactgtgcccagcctgcttgattcttttaaattatttcaatctctttgctaagtttatctgttaggattctgaattccttctctgtgttagcttgaatttcactgagttccctcaaaacagctattttgaattctctgtctgaaaggtcacatatctctgtctctccagaattggccactggtaccttaattagttcatttggtgaggtcatgttttcctgtatggtcttgatgcttgtgatgttcgtcagtgtctgggcattgaagttaggtatttattgtagtctttgcagtctgggcttgtttgtatctgttcttcttaggaagactttccaggtaataaaagggacttgggtattgtgatctaagtttttggtcactgcagccatatctgcattagggggcaccccaagcctactaatactatggctcttgcagactcgtaaaggtaccacttgggtggtcttggataagatctggaagaattctctggattaccaggcagaggctcttgttctcttcccttactttctcccctaaaagtggagtctctctctctgtgctgggccgcctggagctaggagaggggtgacacaggcacctctgtggccactatcactaggactatgctggctcagacctgaagccagcacagcactgggtctcacccaaggcctacagtctccactgcctggctactgcctacgtttgcttaaggcactagggctctacagtcagcaggtggtgaagccagtgagattatgtccttcccttcaaggcagcaagttccccctacccccatcctgggaaggtccttagatgccatctgggaggcagggcctgcagtcagaaaccttagtaatctccccagtgctctattctattacagcctggctgatacccaagccataaggcaaagtccttcctgctcttccctcccctttccacaagcagagaagtctctctccatggccaccactgccccagccctgtggcagtgctgccaggccactgccaacgttcattcagggcctaagggctcttgaagcaactgaacactgccaggcctgggactctccctttagggtagtgggctcccctctgacccagggcaggtccagaactgccaccccacagccaacacttagaatctgggaccccaagagccctcttggtgctctgccacactgtagctgagctggtacctaggctgatttttgctttttatgaaggtacttttttgtgtgtatagttcaatttggttttcctccagggaggacaattggtggaggtttctatttgggcatcttttttttttttttttgagacggagttttgctctttcacccaggctggagtgcagtggcgcgatctcggctcactgcaacctctgcctcctgggttcaagcgattctccagcctcagcctccccagtagctgggattacaggtgcctgccaccatgcttggctactttttttttcaattaaaaagtaaactttaatgtcgaaaatgcaaacttggggaaggcagaaagatcacacacaaggctgtcgcttcacacttggaaggttgcacggcggccaggagaggcactcctcacttcccagacagggcgggggccgggcagaggcgctcctcacttgccagacggggcggcggccacatgcctggctaatttttgtatttttagtagggacggggattctccgtgttggccaggctggtctcaaactcctgacttcaggtgatccacgcacctcggcctcccaaagtgctgggattacaggcatgagccaccgcgcccagccctatttggccatcttgctttgcctccaccttcatttgataacagaacacccccatgtaaccaccaccacaatcaagatataagacatttctgttattctccaaatttccttcaccctcctttatagtccatggcacccaccccatccctgggcaacacctatgtgcttcctttttttttttccccgcaggaggacgtcttcctatacctatgtgcattccatcactgctgcttttaatcatatagcgtgtagtcttatgagtctgactttttcacttagcataatgcttttgcaatttgtgattgagcgttttcatatgattctgttttttctgtctcttagcttggaagttatacactttttagtagtaactgttgggagatcgttctccaagagtctctctcatatttccatacatcctgctagcagagacattgactacctgtttttgtctgtttagtgttgctataaaggaatacctaagtctgagtattatacatagaaaagaggttttatttgtctcatggctcctcaggccatacaagaaacatggtgccagcatcttaccagtgtcacatggcaagaaaggaagtgaggaagagaaaataagttgttaactggttgttaaaaagtgccaggcacgggccaggcacagtggctcgtgcctgtaatcccagcactttgggtggccaaggcgagtggatcacctgaggtcgggagttttgagaccagcctgaccaacatggagaaaccctgtctctactaaaaaaaatacaaaaaaattagctgggcatggtggtgcatgcctgtaatcctagctactcgggaggctgaggcaggagaatttcttgaatccaggaggtggaggttgcagtgagccaagatcacctgggcgacaagagcgaaactctgtctcaaagaaaaaaaaagtgccaggctctttttaacaaccagttcttacaggaactaatagagtgaaaactcactcacccccaccccacagggagggcattcattcatgagggatccacccctatgacccaaacacctcccattagccccccacctccaacattggaatcaaaatttaacatgaggtttggggggcagaaatccaaattatagcactacctttgttccaggctaccttcaaaggatgtttatacagcaaacagccttggaaaatagagttagggtctccttgtagagcacagggtaagtttgcttacttttcagcataatcaagattgtgtcttcttctggagcaaaactttgacaacaacaagcggggcaaagtctgaaaccttttgcacatcttgacagaaccttagagattacgagatttatctctgccttactcaaggtccattagtatcttccagaacaataagttggtcttagaatcctttagctatgtattcccttccaggcttcgatgctgtgtgctgttgttttatttagtttttattttaaacccaacaagacgctataccatcaatacttatttagatccccccacatatttaacttgccatggtgcttcattctttcatgcctctttaagcatccatctaggatcgtgttcattccacatgaagagaaagcttttggcccagcacgatggctcacacctgtaatcccagcactttgggaagcctaggcgggaggatcgcttgagcccaggatttccagaccagcctgggctacgtggcaaaaccctgtctctactgaaaatacaaaaaattagccaggtgtggtggttcacgtccctgctactcgggaggctgaggtgggaggattacttaaacctgggaggttgaggctgcagtgagcgttgattgcaccactgcactccagcgtgggtgacaggagtgagaccatgtctccaaaaaaaaaaaagaaggaaagaaaaagcttttgtatttcctttcgtgtaggtctgctaatgacaaagtctctgggttttttgtttgactagagaaatgttttaattttaaccttattcttgaaggttttgtttttgttttcattttgttttgtgtgctaagtacagaattctcattggcatttatttatttagagacagagtcttgctctgtggcccaggctagagtacagtggcacgatctccgcctcccaggttcaagcgattctcctccctcaacctcctgagtagctggggctacaggcatgcaccactacacctgactaatttttgtatttttagtagagacggggtttcaccgtgttgcccaggctgatctcaaactcctgagctcaagtgatttgcctgccttggcctcccaaagtgctgggattataggcatgagccgccgtgcctggccagcatttattttcttttcagctctttaaggaagtcattccattatctctgggttccattgttgagaagccagctgtcattctaatggttgccctttgaagataacttttttccctctgctattttaaatatttcctccttgtattttattttcaacaggtgtaatgtggcacatatatcagcaattgttatgttacatacaatacatattgtgcaacatatgtatcattatcagttattgctgtgtaacaaactactccagaacacagtggcttataaaaggaatcatttatttagtccttaaatctgcaatttgagcagagctcagtgggaaagcctcagctttactttatatggcaccatataaggtaactcgcaactggcaagttggtgctggctgttggctggtagttcattcagggctcagggcccaggaccaagagtcgtcaccatggcttgcttcagcctccttgaggcatgatggctgggtcccaagagaagagaaatagaaacttccagtctcttaaggcattggtctggaagctgggacggcatcacttttgccatattctgttggtaacgcagttacatcgccagattaaagggtaaagagatacaaattcccactgctcagtgcaaggaatatcagtgattttagggggccctgttttaaaacccctacaaggtgctaagcgtggatttctggggctttcttgttttttgtttttttctatgtgtttttttttttttttttggtggtggggtcagggagggcttatagggtatgttaaatcagcagaataattttatttatttatttggagatggagtttcactcttttgcctaagctggagtgaagtagcgtgatcagagatggagtttcactcttttgcctaagctggagtgaagtagcgtgatctcggctcactgcaacctccgccccgctggttcaagcaattcccctgccttagcctcccaagtagctgggattataggcacccaccgccacgcccggctaatttttatatttttagtagacatggggtttcgccatggctagtctggaattcctgacctcaggtgatccacccaccttggcctcccaaagtggtgggattacaggtatgagccactgtgcctgacctataatgttttttaaaaatcagttttggaaagtttgcagacattaacttttcaaatgtagcttccatttgattctttttctactctgcctctgatcctccacttatgtatgtatgctagatcttttattagatagtctgtgtctcttatgtactctactatattttgtattcttctgtctctccatgctttattctgtttactctttcctgattatattttttaattttgtaatttccatttgatgcttttttgatcattcaaaactcttcaccaaaattctaaatttccttttttaacctctcgaatgttatcacagttactttaaagtctattttggataacttaaatatttacagtcccctcacagatatgtttcttttgtatattgtttctgttggttttctttcatgtcttatctccacatatgcctggtgagttttgattatgtgttggtcattgtatttgcaagtatgctcgtagaaataatctggaatggccgggcgcagtggctcatgcctgtaatcccagcactttgggaggctgaggcaggtggatcacgagatcaggagatcaagaccatcctggctaacatggtgaaaccccatctctactaaaaatacaaaaaattagctgagcatggtggcacgttcctgtaatccctgctactcgggaggctgaggcaggagaatcacttgaaccaggaggcagaggttgcagtgagccgagatcacgccactgcactccagcctgggtgacagagcgagactccgtctcaaaaaaaaaaaaaaaaaaaaaaaaagaaataatctagagcctagtttgatgtttccttacaaagaatgaatttatttttgcttctcccattgcaactaggataacctcagtctagtttctggaactgaaatcacttgaggctgaactgtggtctctgtgagagcgtgtctgtgtatggctcacccttattcctaggctacgtagttctttaggaccctaacccaaagtaagagatgttcatcagggctctcctcttggcagacgcctgggctccagtccctgtgtcctgagccccatgaggctgttactggtgctgctcgtctgcccatcctctccagtaacagccacctgaacactgcaattcctgggtttccatcattccttccagcctggtgagtcatcagtgtcttttgaggtatccagtgcctgccagcagatgttttttaataatttgtccagcatttctggctgtcctcagtaggtggtctgtttcacattccctagtctgctgttaatggaaagtggaagttctgagagagaatcatcgttcccgtcagcattcaaatgcctgattacactttccccattcgctatcctttcctttatttgctcctcaccacagcaaaactcctcaaaaatatctatctttgcaatcttcagattctcacattgtgtccttaaacccactttaatcaggccttggttccctccattccactaaaagtaatgttgtcaaggtcgtgcatgcctccgtgatgctaattccagtgatgagttttcagttgtcattctctgacatatcggcaacacttgatgtggagtaccctgatgttgagaggctggtgagatgaaggaaaaacccagccaagggcaatgaggaatggcttccttccgcctcctccttccctatctttgttgtggtttttgttgtttctgtaacactgattacgttatagtttatttaatgtacttccttattctatgtttttactttagtcattttgttgatctcctccataataacataggctcgggccaagcacagtggctcacgcctgtaatcccagcactttgggagaccaagatgggtggatcacttgaggtgaggagttcgagaccagcctggccaacatggcgaaaccctgtgcctactaaaaatacaaaaattagctgggcgtggtagcaagcgcctgtaatcccagctactagggaggctgaagcaggagaattgcaggagaatcacttgaacccagggggcagaggttgcagtgagctgagatcgcgccactgcactccagcctgggtaacagagtgagactctgtctcaaaaaaaaaaaaaaaaaaaaggcttcaggagggcagagcattttatgcaattgttcattaattgacccctccatttggcacagatcacatgcccagtagttaactgttaatcaacgcactctctgtggaacaacaggctggtcccgttgagccaacactctctgggcactgccttcactagactctggctggctgctgcgcttgtagaggtatgcaagacaaaaccttttggtatgttaaaagccctggtcagaactttaagtaaccatcactgacatataatggttatggttttgaaagtgcttttatagtggtttttcatctgtcctcacagcacctctgggaggtaggtaggacaggtacagttagtctcatgtttcaaatggggctcagagagggaaaaggatttcccaagatcacacagcaccttagtagcaaaacttggactcaacctcaacacttaaaaatgaacaaagctggccgggcgcagtggctcatgcctgtaatcctagcactttgggaggcccaggcaggcaggtcacctgaggccaggagtttaagatcagcctggccaacatgacaaaactctgtctcttctaaaaatacaaaaaattagccgggcatggtggcgggtgcctgtaatcccagctactcaggaggctgaggcaggagaatcacttgaacctgggagatggaggctgcagtgagccgagatcgtgccattgtactccagcctgggcaacaagaatgaaactccatctcaaaaaaaaaaaaaagaaaagaaaagaaaaagaaaagtttccctttttttaaatatctcattttaatgactgcataatagtttattacatagttataccataatttatataatattttgttgctgtacatttaggttaaacaatacttacttagttcctactatgaagaggggccaagtactcgaggctggagctctcacatgtggcaatgaaattagaaagtggatatggcagggctgtggtaaaataaaatataaaaataataaatgatattaccaaagaaaaggaaagtttttcaaaataaaggaaaatctagacaagcatagtggctcacacctgtaatcccagtacttttggaggctgaggcaggaggaacacttgaggccaggagttcaagaccagcctgggcaacatagcaagaccccctgtcaacaaaaataaaaaaaaattaggccaggcacagtggctcacggtggctagtgcctgaaatcctagcactttgagaggctgaggggggtggattgcctgagctcaggagttcgagaccagcctgggcaacatggccaaaccccatctctactaaaaacacaaaaaattagccaggtgtggcagcacacgcctttaatcccagctactctggagactgaggtaggagaattgcttgaacccgggaggtgaaggtcgcagtgaggtgagattacaacactgcactccagcctgggtgacaaaatgagactctatctcaaaaaaaaaaaaaattagctgggcatggtggtgcatgcctgtaatcccagctactcaggaactaaggtaggaggatcccttcagcccaggaattcgaagatgcagtgagtcatgatcacaccaccgcaccccagcctgggttacagagcaagaccttgtctctaaaaaacaaagaaagtctaacctaaacgccattatgtcatttacatgtgtataggggtgtgtgtgtgtgtgtgtgtgtgtgtgtgtgtgtgtgtgtgtgtgtgtgtttgcttgggaggggagtcgggctggagctggccaggccgcagcctggggaccttctgattccagcagggatgtgggccgagggtcccgccttactcatttcgggtcttgctcctctgtcctggctctacagactcttccagctggagttggaggctgacgccctagtgaatttccatca

SEQ ID NO: 15712 - DNA, 34462 bp, Homo sapiens
tttgtttgcggaagtaggaggaagtagaagtgctgagtaagccgaggtgagtgacctcgcgggtgggcggggcctgggggtccgttccccaacttcctcggcgctccggactcccaagtctccgccggaccctcctttggatattcctcgtgtctccgattctgaggcatgtcctccattaacccttatgtgactccctgagtgcccccaccttccatcttttcatccccctgcgtccccaattcccatcccgagaccgcccgtgtctcatctcgaacttgtggaccccagggaccccagcttcgaccctgagtttctcccctgaaccccagtctcctccgtgtgtctccctcagtatccctaacttcccgagtcaatccatctcttctctttccccgaccctcagtgcctctttaggccccattggccgtcctaattttccttcctgtgctcctctaagtgctcacttgattccccacttcacgtccgtctccacctttcgtggtgcctctactcatttctcactccctgcttctcctgcctttcctccctgctttttttccttgcctttcctctctcgcgtgcctccagacctgcccccgacatgctccctccttcccctcagcctggccaccccagagtctcccacccctaatcctgtgtccacctcctgctcccacagatgacttggaagctggtgacagggagcatgtgaccagggtgatcatgggactgggtcggggcaagcctgtgggtgtgggacagggagggcacagggcaaggggacctgtggccgtatttttaatgggctacccacatgaccccaacgaatacctccccctagcttctgggtctttccctcacctgcctcttacccgcccaacaggatgtcaggcaggttcggtttggcaacgttgaggctgcacccttgggctgaatgcattgtttttgaatgcattgtttttgttagagtttctgcctggagtttggaacctgttttctgtccaagtctcagtttcctcatctgtgacaggggaactgtacctcctgccctcgtaagtctgccatgaggttcaaaatttgaatgagaaaatgtagaaggtaaagctttataaccagtatggccctgtacaaatacatgattttactgttgggtcataggcagaattgaaaggagtggaaagggaaagggctagaatgagaagacaaggagagaaggatgagcaggaggtcccttgtctttcagtgtatcatttggcagtgtttgttcatcacctcttgtgagtcaggctcttctgtatatgttctcttcaccattcattcagtcatcgtttatctaacaaatatttacggactgtctgatgttctaggctacccttggtgtggccaatgatattctcacttcacatgagaaaaagagggcgcatgagttgcttgaggtcacaccgatgaggttgaagctggaatctgacaccagagcctgtgtgattgtcctgatgtgtaaggtttgctactgtttaggacacttcttgttccttccgtggattactttcttgttacatgagagactccccaaaagggagtttccctcttactcagcagaatgacatcactaagagatacagaaaggagaaatttaaatactctgtgtgtgtgtgtgtgtgtgtgtgtgtgtgtgtgtgtgtgtgtctgcagacatctattgggtgtgtgtgctgggggaagtaggtaggcaaggagtaaggggccgtagtgaagagtgtgttacaaacttcactttgtagagggtggctccctgggagaatatgttctgtgtctttcacagtggattttgatagggtcatgtcttaaatgcctcttctcgttttcggatggtgatctcatccagtcttatttctttaagtgccgtctctattctgtcagcccacaaatttatatccccagtccagtccagacctttccctggaatgacatactcaaatctagttgcttactcagcacctcaaacttaggcttttcaaacttgaagtatttatttattgatttatttattttttgagacagagtctcactctgtcacccaggctggaatgcaatggcacgatctcggctcactgcaacctccacctcctgattctcctgcctcagcctcccaagtagctgggattacaagcatgcgccatcatgcccaactaatttttgtatttttgtagaggcggggtttcaccgtgttggccaggctggtctcgaactcctgatctcaagtgatccacctgccttggcctcccaaagtggtgggattacaggtgtgagccaccgcgccaggcctcaaacttaagagtttagaattgagctcctgttagttctgccctccatccctgaccccactcttcaccaaaacatgtccctcccactctctttctcatcttaggacataggagtattgttcattcagttgctcaggtcaaagctgtgagattatctatgatgcctctctgtttcttaccccacacccagccagagtgatcttgttaaaatgttgtttctttgcagtggcctctcctctcatggcacatgcctggccccctgttgcctctctgatgtcactggcttccttgcttttcctggaactcgctaaacatgttccagccccatggcctttgcacacgctctctttgcctagctattcatatgactttcatctctctccatcaggtatttatttaagatcaatttcttggtgaagacttctctcctcacccaatctaaaatttcactctccacctcagcacttcctatccccattctctggtttttctcctcagtagttaattgtcatctaaaacctttgtaaatatttacctgtttatcttctttattattagtagctctgtctaaaatataagttccaggatgtcagggattttgtggggttttttttggttggttggttgttttggttttgagacagggtctcactctgttgcccaggctggagcgcagtggtgcgatctcagctcactgcagcctccgcctcctgggtttgagtgattctcccacctcagtctcccaggaagctggaattacaggtgcacgccaccacacccagctaatttttgtattttttggtagagatggggtttcactatgttggccaggccggtcttgaactcttgacctcaagtgatccacccgcctcggcctcccaaagttctgggattactggtgtgagccaccgcgcccggccttgttttgttttaagacagggtctcactgtcgctcaggctggattgcagtggcacaatcacagctcactgcagcctcgacctgctagacttaagcaatccccccacctcagccaccttagtagctgggacttacaggcatgagagataccatgcctgggtaattgttaagtttttgtagaggtgaggtctcactatattacccaggctggtctcaaagtcctgagcttaagtgatcctccttccttggcctcctaaagtgctgggattacaggagtgaactgccgtgcctgaccagtctgttttgtttacgattgtatcctcagcggttagaacaatgcctgccacaatccatctcagtaaatatttgtggagtgagtcataacatgggccacactgtaccgtgccaccagcccaaagatctcttaaagtcacccctgtctcatgtgcttgggagctccagtgacagtttcggggcagtttgcttccagctgtggtccagccaagcggagtgaatgaaagagatgctttttccttttgtgaaaggacgttttgctctggctcacgtgagcagcagtgcattttgagacgagggccttggcttttggaatctaagagcctgttgagcaagcctcgctcagccaccttctttcagctttctcctgaaggcagtttgaggattaagagcctgatgctctggattccacctaattgggttcagatcctggcaaactgtgtaacctgtgccccagtttcctgtgtaatgtggagagacctggaccttttcttacaggtgtttggagggttaaatgtggcaattcggccgggcgcagtggctcatgcctgtaaccccagcactttgggaggtggaggtgggcggatcaccggaggtcaggagttcaagaccagcctggttaacatggtgaaaccccgtttctactaaaaatacaaaaaattagccgagtgtggtggtgcgcgcctgtaatcccagctagtctggagactgaggcaggagaatcgcttgaacccgggaggcagaggttgcagtgagccaagatcacgccattgcactccagcttgggcaacaagagtgaaactctgtctcaaaaaaaaaaaaaaaaaaaaagtggcaatttacccgaaactgtggtgaagcgtctggcgccctgtgggtgctgggcagcagtgggtgctgatggggtgtgaggggatgggatcaagccctttcccactaacttaggaaagaggttggaatgagctggggtcagagggaacatttgcggggacattttgccgggaggctgccttggaggttcagaggctcagatgacccctgtgttcattcagtgttttctcacccacagattgagcacctgctgtgtggccagccctttgcctagtgctgttcaagagtcagaggacataggcaggcaatcccccaccacaacctgccaccccatttcctctcttggggccttgatttctccacatgccaaacagggagaatgattgcaccttccttgtttctttttttttttttttgagacagtctcactttgtcatccaagctttagtgcagtggcatgatctcggctcactgcagcctctgcctctcgggttcaaagattctcctgcttcagcctcccaagtagctgtgattataggcacccaccatcacgccaggctaattttttttgtagttttagtagagatggggtttttttctcacacgttggccaggctggtcttgaacttctgacctcaggtgatctgcccatctcaccctcccaaagtgctgggattacaggtgtgagccaccgcgcccggctgcgccttccctgtttctttgtgagcttggaggtggatcacaagtgtgaaaccctttgccaaccgtgaggcatggtggccttgtgagaggacggaggccggtgtgtggtggcatgctcccgtgctgtgtggcacagacggagctacaggaaggaagttggggcagcttggcactctgagtggaccctgagtttccagcctgctctgtcttgactgggtgggaggagggtgctcaggagggtgtcactgctgccaggttctgctgccaggaccatccaacagttgttccaatcatgggacatcctgtcgtcagcagctggggctcgtgaggcctgatttccacctcgggcagttctgtgtgtgctcctggaatcccccacgtggccaagcctgtgaggtctgcttcctggcctgctgcctgtgggttcctgtcacgcacctctcgggcagctgtccggctcctctgctctcggcttagtcaagaaggaagcagaaggcttggagtctttcctgcttggactaggagtgagctcagcctaagtgccctgactatatataaagctgaactttccagaccgaagcctggggatggatcagtccgatcacttagggccgctcctgaaggagtgcaggtgctagatacaggttctcccggtggaggagcgaaccccttgtgggccgttagctactggtgggatttgagcatggtatttccctatccgttgtggagaggagcatggcagctcagagtgggtgggaacagtgtgtggtccctgttatcaccttcaagggaataaagtgtgtctgggggcttcagaggtgctggccccatgggcttataggtggttcattcattcattctcattcattcattcaccaaacttattaaacacccactgtgagtcaggaacatcatgccaggtgcttagggaaacaaatcaaagcgggttgggtgagcagcccaagccaacagatgcacccccattctcacatggtgtgtgttcctgtgggctgggccctgggtggtgtggggtgctggggagaagaggaaggcacaccaggctgcagggcggaggtgcgggtatgaattttcagaggagatggcacctgagctgtatcttcatggataagaagagatttgttcatttgtcctttgtggagcacacattcaggttaagaaagtggggaggatgggctacgctgatggagcgtatgtgtggtatccccaagtgcactgagacacgagtttgacgtgttctgggaagatcgatggtgcggcgtggctggagtagaggtgagggatgagttggaggggtgagttgggccagctctcatggatgctggagtctgggctttccctgggaggtcatggggcgccactggccagggtcagcagggagacctgcagctggatttgcatcgtacagtgggcatggaggggtgtcaggctgggttgggaaccgtgcaggctggaagggcactctggtgctctgagcattcagagggggcagctgggccttgaaggatgagcaggggctccagcaggaactggagagcgcattccagggaggacgcaagtgcaggcccctttcactacagaaaagcagttttcacacagaccttccaaaggggaggagaggggactgcctgggcctggcagctgcggcaggtagcagcaatcagagggcagggaccgctcctcccgtgcctgagacctgcccagggtccttcagggaattcgtagctgaggaggaaccagatttttgggactgagttctccctcaccacccgctctgagccaccctcttggtcccttgtcctctactgcacttcttccggggcttggctcctcgtcatgagaggagcttccctgggcatggcgaggggcgtgactgacatagcagccctggacaagtggctccaggtgacctgtgttcacgttgatcacagcactaaccacggcccctcctctcagcaccttcccctctcgagccgtccagtcccagtgaaaatgctcaccgttcatgggtgggctgagcaagcccctgatctctgccttcctccgtgttctgatctgcttcatctgctgtgaaggcctctcgccatttcccccgctggcaaactcctgttcttcctggaaagttcagctaaaaagtcatcccctttaggggtccttccctcaggggaccgtgcacttggcgagacagggactggtcttgggtctctctgttgactgttttatgaacccaggtagtcacttccagggaactcatcagagatgctaccattggctccaatctccctctgttcccactcgaggttttttgtttcttcgtttgtttttctttctttctttttttttgagacagagtctcgctctcgcccaggctggagtgcagtgacatgatctcggctcactgcaagctccgcctcccgggttcacgccattctcctgcctcagcctcccgaatagctgggactacaggcacccgccaccacgcccagctaattttttttgtatttttagtagagacggggtttcaccatgttagccaggatggtctcaatctcctgatttcgtgatccgcccgccttaacctcccaaagtgctgggattacaggcgtgagccactgcgcccagcccgtttgtttttgttttttggtggacatcaactttaatttgccctttgttttgttttgtttttgaggcagggtcttgctctgtctcccaggctggagtgcagtagtgcaatcttggctcactgcagtctcgacctcaagaggatcaagcaatcctcttgccttagcctcccgagtagctgggaccacaggcgcacaccaccatgcccagctaattttattttatattttgtagagacagggttttgccatgttccccaggctggtctcaaattcctgggctcaagcaatccgtctgcctcagcctcccaaaatgctggaattacaggcacgagccactgtgcccggccttaatttgccctttgaacatgtacaattcagggcctctctgggcctcagtttcttgatctctgagatgggaagatgggataataatacttgttcctcccgtccttcagctcctccaggggaccctcacaccagcacactctctgtcagtcttccctcaatgaacccagcaggcaagcttggttttgacagaggatgggtgagcagagataaggaaaacggccagaaatatctggcttccctcagcaggggcaccaaaattggtacctggaaattgcctggcttggacaggcagaattgtcactgtcaacccccaccaccaaaggtcttgggtctttgtctttctgcttgtggtgtttgagagagctgcttgacacagccgaggtgcggtctgtgtcaggtgacctgggcatcctgggggtgcagggagaagcccaggtaaggaggaggaggggccggtcatcagtggggaaaagtgattgtctaccccacgggaaggtcaagggtaggacgctgtgagaagccagggggagagatgaagtgaggcatgatgcggggggccctcatccaccatccccctcttgcagctgtgctgggaagagcctaggctccagggtccaaggtggcagggacagaaggaagcacgtgtgagcactttctccctgctggcccgccttcctggttggcaatgccgtgagtgttccaggatgtggccccgtggctgtcatttcctttcttccacctagtgataacaatggccactgtttgtgtgcccacagtcggcctgtgtcccagacaccttccctccattgcgtcatctcgtcctcctgcctaccctgaaggctggatgccagccaagcctgtcgtttctgtggccatgctgtcgtgggtgtgtggggggcatcccctagccccaggctctggtggggggtacacaggctgggccattgacgaaggggtgtgtggaatctttctttgatttcactgcacccctggtgactttctccctcaatctgaggctcatgggtgctggatgctcttgactctctgcccttcctgggcgcacccctccgcgtccctgtgggcccgtcctcggggtagcctctctgcgctcttccaggccaggcctgagtcccacaggtccccatcttcccggctgcagcccccagaggctcagcctatactgctacttcctttgaaaactataatcgctttacatagcatctggaaaatagggaaaaggaaaaaacaaaagcccataaacccagcaccctcatctactcaatggcatgttttctgtcagtctatcttggtttgttttctatcaggctttgttttttctatgcataatatttactcagttaaatttttgttttgacaaactttctgtgagccaagcttgtggacggagatgaaaagacgagcagctgcctttgagaaactcagactctgggccagcccatctgggtgccagctttcactgctccacccactagctgggtgaccctgggcccgtgactttacccctctgttctttggtgttctcatatgtaaaatgaggataataatagtaaccagttcatagagtggttgtcagacagaatgattaatgtacgtaaagctttcaggatggtgccagcaagatgcacaggagtgtttggtaggaggatgacgaagcttaccgtctggcaggaggggcagttgtaacatgctgggctgtgatagtacagatgtgtttaaagtgagggagagcccagagcaaggagagagaacctggcatctggtgatggtgtatcaagaacattttaggccagacacggtgactcacacctgtaatcccagcactttgagaggctgaggcaggcagatcgcttgaacccgggcgttcgagaccagcctgagcaacgtggtaagaccctgtctttataatttttttttttttttttctgagacggagtcttcactctgtcacctaggctggagtgcggtggtgctatcttggctcactgcaacctccacctcccgggctcaagtgattctcctgcctcagtctcccaagtagctgggattataggtgcccaccaccatgcccagctaatttttttatatttttagtagagacggagtttcaccatgttggtcaggctggtctcaaattcctgacctcaagtgatctgccctcctcagcctcccagagtgctgggattacgggcatgagccaccatgcctggcctctataaaaattgtttggaagaaattacctaggcctggtgatacacacctgtagtcctagctactcaggaggctgaggtggaaggaggtagaggctgcagtgagccatgattgagccactgtactccagcctgggcaacagagccagaccctgtttcaaaacaacaacaacaaaaacatttttaaggaggaggctgagaaccacgagaaccaagcttggatttgaagaaggatcagggctttctcagacagaaaaggagaggaagaacattccagatagacatcattgagagatggcactgagccttgtaatgggacactgcgaacttttcttcagttgttatgatctttttttttttttttttgagacggagtttcgctcttgttgcccaggctggagtgcaatggcgccatctcagctcaccgcaacctccgcctcccaggttcaagcgattcttctgcctcagcctcccaagtagctgggattacaggcatgcgccaccatgcctggctaattttttgtatttttagtagagacggggtttctccatgttggtcaggctggtctcaaactcctgacctcaggtgatccgcccgagtcggcctcccaaagtgctgggattacaggcgtgaaccaccgtgccttgttggtataattattagtattgatcttttttccttttcatgtgcctcttagtgggccccttgcttttgtcttccttctgtccccagggttgatcctgtgctcagcacataggccagggaagaatgtggctgtgacccagtgtccactcagatgtcctctctcccccagggcacccatactctgtccttagtgtcttttgtctggtgacatcttggcacagaggcagagggcggcctccgtctgattggcgcctggctttggtgacagtaccttaggaaggcagtgtattttctgggaacctaggaaataacaaggtatctaattccatcatcaacactggggacaatttccatggcagaaactatgactctgaatatgcagcgtaaagttaccacccagacactgctgctcctgagtctcgaatggcatcttctgcaggggctcccccacctgcccctgcagaaggtgcagttcgttcatttccaaggagcttgcttttgtgtgctgtctctcggagctctttgggaaacctgtggtagcaggaaacaaaggatttagaccaatgccgatgatccccttgctccgatagagtgtgacatgatgctggtcaccttttggtatctaggaggggggacattgattttgtttgcggaagtgaaatgatccatgctggcctctttttttttttttttttttgagacagagtcaccctatcgcccaggctggagtgcagtggcgcgatctcagctcactgcaacctctgcctcccgggttcaagtgattctcctgcctcagcttcccgggcagctgggactacaggcgcctgccaccacatctggctaatttttgtatttttagtagaggcagggtttcgccatgttggccaggctggtctcgaatttctgacctcaaatgatccgcccgcctcagcctctcgaagtgctgggattacatgcctgagccactgtgtctggtccatactagcctctttgagtgctgaaaggttatctctgtaacttatttagtgagaaccctccatttgcccagggcattactgcctataatgtatgttcacatgtgctatctcctttggtcaataccacacactacaggtgaggaaactgagtctctgctgggacactgggtcaggaagcaggcagttaaggtcacctgtgcacagtggcagcacagggggacagccttctaggtagccagcctggcctgagggttctgtcacttttacctcccactcagtgttgtttctctttctttcccctccttttaagatccctccaggcccaggatctggggacaacgctggtggggagtgatctgggtgtctgtgcaggaaaccgctgcactgggtgagatgggcatgggagactgtgcctggctgaccagagacctcgttttcttccagacagagggggaagacggtggggcctccccacctgccccgcagaagatgcagttctttggccgcctggtcaataccttcagtggcgtcaccaacttgttctctaacccattccgggtgaaggaggtggctgtggccgactacacctcgagtgaccgagttcgggaggaagggcagctgattctgttccagaacactcccaaccgcacctgggactgcgtcctggtcaaccccaggaactcacagagtggattccggtgggtgatgctcagcgggaacatacttctctcctttcactcccccacgtctcggattggaggtcttattggccgagaagcagtttctttgagtctctgtctgaggggtctggagaggggtgggagagaggggagactgtactcttggaccagagggaagggcttccgagactccacacttctggcccatcagtgtcccagcacgaggctgaggatggaagcctgggttgtttctggcctggaggctcgacctatatggacaaagggaagaaggaaggacagggagactgagagtgtccacatcagataaggcccatggggagaacctttagccctggctctttatttttggttttggtttttgttttttgagacagtcttgctctgttgcccaggctggagtgcagtggcgcaatctcggctcactgcaacctctgcctcccaggttcaagcgattctcctgcctcagcctcctgagtagctgggattacaggcacccaccaccacgcccagctgatttttgtatttttagcagagacggggtttcatcatattggccaggctggtctcaaactcctgacctcaggtgatctgcccaccttggcctcccaaagtgctgggattgcaggcgtgagccactgcacctggcctagccctggctctttaagggcatggccgttctcataggggctgcccagggtttgcttaggaaggctggacagagctgttgcctcttggggcatgctgggactcccctgggcctgaagagaaggctcaaaagccaggacaggcctgagggaaccgggccaacggcagagctggttgggaaaaggggagaagcagccaaggttccaaatgcaggccccagcagtgcttggcagactggcatctagttgggctcagacagatatccctgtttccgctcacctatccatctggctgtcctgtcagccatccattcaacatgcaccaagcacctccagtgtctccagagtcctgggcttcgggccagtcctggctggcctgtgagatgacaaacatgtcctgtgtctttaaggaacgtacagtctggtgggggaggtccggtgcaaacaggcgtcatagcaccccttgaggagtgctgtgacagagggagagcctaggaaacagtgtggatcacaaggaggtgattgagagctactctgcgtctggaagagtgaggaggagcctgtgtggcagaacaaaatggataaggtcgttccagccgtgcagaagtgtggaggtgtgagcctgcaggcaggtggctctggttggatcccaggtgcatgcagggctttggtgagagtgaggctgaaggaagcagctggggactcattctgactaaagaggcatggcaggaggggtctctgaaagtgtcaggctgggggccaggggctgccaccaacagaagagcaaggcaggtatcagggccccatccaatcaggtgagaattcagagcctggctccacaaggaacctgaggcagaggcacccacagcaggtgcttgggctaaatgcagctcagtggccagtgcaggcaccagttttaatacagtggggccattccagattctgagtgcagatggggctgagcagaccgccttccagctggactcgatcaggactgaccctggacggggcaggcttgcacttgtagcttcagagctccactgcaggcacagctgaccagggcagcgggtccactccttggagagctggacagccccacttttgaggtacacggccctggggataccactaatctccacgtaccaataatcaccaagttctgtcagttgtaaaatcccttgacaggattccagatttgtctcagccagcttaagccccagtgtgggcagacctccatcccaggaggatttagtcctttgtcagcagcttcttagctacacgtaagctattctgtggtactttatagtttacaggattttttgttttcttttttttttttttttgagacagagtctcgctctgtcacccaggctggagtacagtgacgcgatctcggcttactgcaagctccgcctcccaggttcacgccattctcctgcctcagcctcccaagtagctgggactacaggcacccgccaccacgcctggctaatattttgtatttttagtagagatggggtttcaccatgttagccaggatggtctcaatctcctgacctcgtgatccgcctgcctcggcctcccaaagtgctgggattacaattttacaggatgtttttaagtatgttgggttagcacattctctgccaatccgtggaggtgggcaaggaaggcagtattccattttatgcatgagaaaatagccttgggatgataagtgattcatcccacttatacacaggaagcagtgaagaaacagaatcagtgtcttctggttcccaattcatttctctgtgctgctgtgttgtttccatgtatgtatgtatgtatttatttttttgagacgttaagtcttgctctgttgcccaggctggagtgcagtggcatgatcttggcttacagcaacctctgcctcctgggttcaagctattcttctgcctcagcctcccgagtagctgagactacaggtgcgtgccaccatacctggctaatttttgtgttttttagtagagacagggtttcactgtgttagccaggatggtcttgaactcctgacctcgtgatctgcctgccttggcctcccaaagtgctgggattacaggcatgagtcaccatgcccggctttgtttgtcttatttctaaattttattgatttatttattttcacagtcatagctctggagtcttttttatcttctcccctctaacctgctcccacccgaacctttccatttcagcagatagcatcattgcaacgggctgtgccagatccagccatcacatccacctttccagccaaagggagggtggaagggcaggatgcagaaggtcaatctccccctcctcagggacatttcatggaagttgcacgcattggccagaacccggtcacatggccacagctaactgcaaaggatgctgggaagtgttgcctgtgttgcagacagccacgtgccagtcgaaaatcagaggttctttctccctccgtcttgctgctggctcgcttctccagaccacagtcattgtgcacgtgtctcctgctgctccggctgtggcctgcactcctctcatcctcttccaagctgctgtcacagcgctgtttccagagggcaaatctgattggtcactcccctgctttactccccaagggcttcctgttttcttttatttttatttttattttcattttttgagatggagtctcgctctgtcgctcaggctggagtgcagtggcacaatgtcagctcactgcaagatctgcctcctgggttcatgccattctcctgcctcagcctcccaagtagctgggactacaggcgcccgccaccacgcccagttaattttttttgtatttttagtagagacggggtttcaccatctactcttagccaggatggtctcgatctcctgaccttgtgatctgcccgcctcagcctcccaaagtgctgggattacaggagtgagccaccgcgcccggccagcttcctgttttcttaacacatcaggtgcttaatgacttaaaagggcccagtgtgatcaagtttctgcctctgtgttctcagctcatgccgccttgtgctcctggcctttgcccaggctcttgctgtggcctggaatactcccctttctttgcctgccttccttcctcttgccctcccctgacctgcaggctggattaggagtttctgctgggcatcccatggcacccgtccctgcactggggatcctgctttcctggtaggccacagaccttgtgaggggagggactgtgtctgttgggttcatgacagtgtgcccagcccccagcaggtgcctggcgtagatcaggtttgtggaacaaatgaatgtgatatattaatttagctttagagtattcattgagggctgctgtgtgccaggccctctgtgccacctgggtggagggtggaggactgttgcattgagggcagttgaaggagtgagctgggaagtgggaggtggaggatggggactgggatgcagggtttgaggttatcaggggtcccagaagcagtaatgccaaggcctaggctgtgacctggagtgagggctgcgatggggtggggtggggtcgaggctgtggaggagggtcatcagggcactgctggagccctggggttctccagggccgggggtggtcattgcagtgttctcccagctcctctcaacaccctgcggtctgtggagagcaggcctggtgcactggacttgcctctggccagggctgagtttctgccttctaaacgatcttcctcctgtgttgccctagaggcctctggactgtcctgagtacttgacgcgtgttagagtgagcatgggctgctagccttccgctccaggtggaggagtttctgttgttcttttgctgctgttgctgcagtgagctgccaggctgagcttctggatggacctgggggatggaattaggagcttctgaattcttgggttgtataacctaaggccggagagtcccacagcactgctgctgggcggagagactggaccctgctgatacagacagcgacagcagcaggagcatctgcagtttcccagcaggtcctgcatgcctgggcttggcactagtctaagtagtaactcatgttatcctcacgacagtcccacgaggtggggtcattactgacctcctattacagatgaggaaacagaggcttgcagaatttgagatcacacagctggtcagcgtagcgattattcagaccctgtcacctggctccagaacccactcgtttacctttcttacatcagggctgctttgtagtgtggcgagctgagtggagctccacccgcctgggctgatcctggcccttcctgcctgacctatggtgcgggggccctggctctccccgtgtgagcccccaggggtcacttgtaatatgcctgtgtacactatgatagcatagatacttctgttcctggtacagattaatcatttacggctggcattgacttgtaacagatgacatttgatgaaatcaaccagcctctcactggtatctcagcagaaacagggctgtacctcccaggcatcctgggaaggatgatagaagtgtgtgatctgtgcttccctaccgggagctgacttttgaggctctctggactgggactttgccataaaactgcttatcagaaacctcagataagtggagtgccctgtgtcctggccacgtactctggggccagctcctccatccattcagtcctcccacatcccatcttcaccaagcagagtggaaagcggcaggtctctgcgagaaaaggaggctctgtacccagccttcagtgagataactttagagtggggccttgtattccctacacaggccttgtccccgacacggcctctttgcccttgcttctccttctgctaagaatgctccttcccaactccttggctggacacacggctcctgctctgtgggcctgtcctgttcccactcagagcctcagcaccccccatgtggccaagacacagcccctcttgccttaggttgccgtgggtctgtttccacatctgtttcccctccagactgcagggctcctgagggacagggcctggggccaagtctcctctgcgttcctgatgcctggtggtgtgccacgctctccgtgggtgcacggtaaatatctgccgagtggctagatgtatccatggttgctgaaggccaagtgtgttgaccagagggcgtgggaaaggctccactggggtggctggggtagagatagaccttaaggggtccagaagactccaccagctggagggaaaggccctacagagacaaggtactaggaaaggcccagaggacagaggaggggccctgtggggagcctgtgggcaggaagggcctgtgctgggctttgaaactggggactcaggtactgctctagcgtgagggtccttggcattttttttggtccaggaccccctgaggtccctggggaatgagaacaggctcacacagccactttcaagaggtttgcaggtcccctgaggcttagccacagacccctcccaccccagcagagacacagcagaggcttctgagtggaggccaggtggcttcagcctggggttctagaagggagggaagagacacacccccgtgtgtcctccagagcctcagccttctccctgaatctcccctttgcctcctcactgtaacccacacctggctctccttgaaggacccgcttgccccgcagcctcctgagagttttctctcccagtccctctcccactgggcctggaggtggggtagggtcctccttgcccccagccttgaatcttctgtcaccctacaataccacttgctgtcaccccggtgataggtatctacgagcctggggtgctcccccacatcctcaaagatgtgagcccctgactcagcgttgcctctggttcctgaccctccacattcacatgaccacgcgctggcctttatcatcgccagtgacagcagctctcccgtaaatacaagtttcaagcaccccactttccagtctctgccttctgtctttccagttcattccctctagtcctccacccacacagtgcttttccccattgacagggaattgctcctggccgcttttcccagccccatcccgttcatgtgccttgctttgtacccagcatggactccatggcctgtcattgtcactccttcacctatacttcctgcctccttgcttctctctctcttcgtcatcctggcatcaccaccccagaactgcttggtttcagttctccaccatggctaggggaacatacctttttgctgactgctctcactttctttttttttttttttcttttttttttttttgacacagagtctcgctctgttgcccaggctggagtgcagtggcacactctcagctcactgcaacctccacctccggggttcaagcagttctctctgcctcagcctcctgagtagctggtattataggcacccgccaccacacccggctaatttttgtattttttttagtacagacagggttttgccatggtggccaggctggtcttgaactcctgacctcaggtgatatgcctgccttggcctcccaaagtgctgggattacaggcatgaaccaccctgcccggccctattgctctcactttgaaatcacgacatgagccacagtgagcctatgatgtggtttgacgtctttctgcatttctctgttcacccctctcccagaaggcatgcctccttccctcccctcagcctgcagccccttcccctccacgcttactctcagctgatagccctgctgctgtctcgctgagaaaatagaaatagccagaggagaattccctctaccccatgcacacacctctgtccccgcctactccacattccctgttgtcagcaccgatgtgtttagctgagggtggtccccccattcaaggccatcatctcctgtcatctacttcttgacaccatttgaacaattatctcccctctttcctacataacactttccccttttctactatatattttttgctatggattgaaagtatccccccgaaatcatatgttgaagccccaatccctcgtgtgatggtattaggaggtagagcactatgggggtgattaggtcatgaggatggagccctcatgaatgggattagtgcccttagacgaagaggcaagaaagagatgatctgtctctgccatgtgagggcacaacgagaagatagccatctgcaaaccaggaagtgaaccctcatcaggaactctatcagccagcaccttgatcatagacttcctagcctctagaactgtgagaaataaaggttgtttaagcctcccagtctgtagttttctgttataatgtcctgacctaagttattttccatcgctatacaatgggttatttttttctttaaaaaaaaattatttcttgactctactttttcctccagagactgcttatattccactgtcttcattcttctcctcctgttttctctctttaaacttttcaaaaatagcaaaatataacacatatagagaaaatgatatacagctcagtgatttatcacaaacacctgtgtaaccaccactcgaatctagagataggacattacagcaccccagaagccctccttttgtcccctcttcccaaagaagggtaaccaataacttgccttttatgataaaggctttttttttttgagatggagtctcactgtgttgcccaggttggagtgcggtggcgcaatctctgcttactgcaagctctgcctcctgggttcacgccattctcctgcctcagcctcctgagtagctgggactacaggtgcccgccaccacgcccggctaattttttgtattttagtagagacgaggtttcaccgtgttagccaggatggtcttgatctcctgacctcgtgatccacctgcctcagcctcccaaagtgctgggattacaggcgtgagccaccgcccccggccaagataaaggcttttctatctggcttctttgttagcattttgttggcgagattgatacgttttgtgtgcagctgtctgtcattttcattgcaatagaattccattgtctactatatcacagttactcattctactactgatgaaaatttgggttatttctagtttttttggtgcatacatgcatacatttctggtagacatacctagaagtgaactggctgcattatgggccataacttgtcttcaacgttagtaaataataccgcccgtctgttttccaagcagcagtaaatggcactttctgttacttcatatcttctgttacttggtactgtcaggttttaaaattttagtcattctgtcgggtgtctagtagtatgttattgtggttttattttgcatttgcctgattgcaaatgaagttgagcactttttgatacagtgattaaccatttggatatcctcttcagtgaagtatcagctcaattctcttgactatttaaaaaataaagttgtttatctttttcttacagagttttaggaggagttttttggtacatgtgcagtccaaatacacaccttttgtcagtgatacgtgttcagctgcacacacggtgttttgcctttttattcttttaatggtatctattgataaacatgagttcttagttttaatgaagtcaaatttgttcatcttctttacggtgtactttttgtgtcttgtttaaggaagtccttctctatcttaaagctttgagaagcattccttctttctcctattttctaaaaattgttgaagatctccttccttccttccttccttccttccttccttcctttcatctatctctctctcacccaggccaaacttcagtggcatgatcatggctcactgcagcctcaacttcccaggctcaagtgatcctcctgcctcagcctcctgagtagccaggactacaggcacgcaccaccatacctggctaattttaaaaattttttgtagagacacggtctcatcaagttacccaggctggtcttgaactcctgggctcaaacaatcctcccacctcagcctcccaaagtgctgggattacaggcatgagtcacatgtctagcctgtattctttctttcttaaatgtttggaagaattcatgggtaaaaccatgtgaccctggagtttatttgtgggaagcttttaaaacatggattcgatttctttaacaaatataggactatgagattttcatctcatgtcggtttgggtatgttgtgttttcaaggaatttttctattttatcgaagttgtcaaatttgtctgcaggtccccttatttcctttttaatgtatggaggatctgaagggatggtactttgtgttgtctctatttcttgtttggttttgctagtgatttgccaatttaaaaaatctttccaaagaaccaacttttggctttgtttattttttgaaaacctgagtagctgggattacaggcgcccaccaccacacccggctaatttttttatttttagtagaggtggggtttcaccatattggccaggctggtctcgaactcctgacctcagatgatccacccgcctcggcctcccaaagtgctgggattacaagtgtgagccagtgtgcctggcaagccgctttttaaatggcaccaatcccattcatgagggcagagccctgatgatcgaattacctcctaatggccccatttcttaatactatcacactgagaattaagttttaacataagaattttaggaagacacaaacattcagaccatggaacatatataaaacagttgtcctaccaactaacagaatacacattcttttcaagaacacctatataaaaattatagacactgacctatgctggccataaagcaaatatgaacaaatttcagatacctgaagagatttagactatgttctccaactacagtgcaattaagctagaaatcaatagcaaaaatgtaactataaatgagcccgtatgtttgaattttaagcaagatatatgtaaattatctatggttcaaaaaagaagtcacagtgaaatttagaaaatatcttgacgtggcgggttgcagtggctcacgcctgtaatcccagcactgtgggaggccaaggcgggtggatcacctgaggtaaggagtttgagaccagcctggccaacatggtgaaaccctgtctctactaaaaatacaaaacattagccaggcgtggtggtgggcacctgtggtcacagctacttgggaggctgaagcgggagaatcacttgaacccgggaggcagaggttgcagtgagccgagattgcaccactgcactccagcctgggcaacatgagtgaaacttcatctcaaaaaaaaaaaaaaaagaaaagaaaaagaaaatatcttgacccaatgatgatgcaaatactacgtatcaaacttgtaggatgaacttccacttctggccatgacagaggagcctgtatcagactagccttcctatttatatatttatttttgagatggggtgtcgctctgttgcccaggctggagtgcggtggtgcaatctcagctcactgcaacctccacctcctgagttcaagtaattctcctgtcccagccttccaagtagctggaattacaggcgcccaccaccacacccagctagttttttatatttttagtagagacggggtttcaccatgttggccaggctggtctcgacacctgacctcaggtgatccacctgcccctgcctcccaaagtgccgggattacaggtgtgagccactgcgcctggccgtgagtgacctttttaatgtgttgttgaatttgatttgctggtattttgttgagaagttttgcatcaatatccatcagggatactggcctgtagttttctttttttatatgtctttgtctggttttggtgtcagggcaatactggcctcatagaatgagtttggaagttttctctcctctgtttttcataatagtttgagtagggttggtattagtttttgtttaaatgtttggtaaaattaagcagtgaagccactgggtcccaggcttttctttgctgggagacttttcattacagctttgatctcattacttgttattggtctatttaggttttggatttcttcacggttccatcttggtaggttgtgtatgcctaggaatttatccatttcttctagggttttcaatttattggcatataattgttcacagtaacctctaataatcctttgagtttctgtgatattggttgtaatatctcttttgtcatttctgatttttttgtttgggttttctctctttttttgttagtctagttaaagatttattgattttgtttatcttttcaaaaaactttattttgttgatcttttgtattgttttgtttcaatttcatttatttctgctatgatctttattatttcttttcttctactaattttgggtttggtttgctcttttctagttctttaagagacatcattagattattttgaagtttttctacttacttgatgtaggtgcttataggtacaactttcctcttagtacttctttccctgtatctcacaggttttgatatgttgtgtttccattatcatttgtttcaggatgtttttaaatttccttcttaatttcttcattgaccattcaagagcatattatttcatttccatgtgttcgtatggtgtgcaaaataccttgtttttgatttgtagttttatttcattgtgatcacagaagatacttgatatgatttcaaatttaaaaagtaatttggctgggagaagtggctcatgcttgtaatcccagcgctttgggaggccgaggcaggcagatcacgaggtcaggagatcgagaccatcctggctaacacagtgaaaccccgtctctactaaaaatacaaaaaattagccaggcatggtggcaggtgcctgtagtcccagctactcaggaggctgaggcaggagaatggtgtgaacccgggaggcagagctggtagtgagccgagatcgcgccgctgcactccagcctgggtgacagagcaagactctgtctcaaaaaaaaaataataacaataataataatttaagacttgttttgtggcctaccatatggtctatccttgagaatgatccatatgctgaggagaagaatgtgtattctgcagccgttggatgaaatgttctgtaaatatctaataggttcatctgatctatactgcagactaaggctggtgtttctttgttgattttctgtctggatgaactgtctaatgctgaaagtggagtattgaagtctccagctattattgtattgaggtctatctctctctttagctctaagaatacttcctttatatatctgggtgttccagtgttgagtgcatatgtatttaaaattgttacattatcttgctgaattgacccttttatataatgaccttctttgtctctttttatagtttttgtcttgaagtctgttttgcctcatagaatagcatagctattcctgctcttatttggtttccatttgcatggaatatctttctccatccctttagtttcagtctatgtgtgtctttacaggtaaagtgtgtttcatgtaggcaacagatcactgggtcttgtttttctatccgttctgccactctgtgtcttttgattggagagtttagtccatttatgttcaatgttattactgacaagtaaggacttactcctgccactttattaattattttcttgttgctttgtgatcttctttctttccttcctgttctccttttagtgaaggtgattttctctggtggtatgttttaatttcttgctttttatttttttgtgtgtatctgctgtatgttttttgatttgaggttaacatgaggcttgcaaataatatcttataacctaatattttaaactgatgacaccttaacactgattgcataaacagacaaacaagcaaagagaaaactaataaaaactctacattttaactttgtccccccactttttaacttattgtactgtttatgtctgaaaagttgtagttattatttttgattggttcctcttttagtctttctactcaagatatgagtggtctacatatgacagtgttataatattctatatgtttctgtgtacttgctattaccattaagttctgtactttcaagtgatttcttattgctcattaatgtccttttctttcagattgaaaaactccctttagcatttagcagtatgtgaactgcatttttcaagtccagaatttctgcttgattcttttttttttttttgagatggagtcttgctctgtcgcccaggctggagtgcagtggcgcgatttccgctcactgcaagctctgcctcccgggttcacaccattcttctgcctcagcctcccgagtagctgggattacaggcgcccgccaccacgcctggctaattttttgtatttttagtagagatgggatttcaccatgttagccaggatagtctcgatctcctgaccttgtgatccgcctgccttggccttccgaagtgctgggattacaggcgtgagccactgtgcccagcctgcttgattcttttaaattatttcaatctctttgctaagtttatctgttaggattctgaattccttctctgtgttagcttgaatttcactgagttccctcaaaacagctattttgaattctctgtctgaaaggtcacatatctctgtctctccagaattggccactggtaccttaattagttcatttggtgaggtcatgttttcctgtatggtcttgatgcttgtgatgttcgtcagtgtctgggcattgaagttaggtatttattgtagtctttgcagtctgggcttgtttgtatctgttcttcttaggaagactttccaggtaataaaagggacttgggtattgtgatctaagtttttggtcactgcagccatatctgcattagggggcaccccaagcctactaatactatggctcttgcagactcgtaaaggtaccacttgggtggtcttggataagatctggaagaattctctggattaccaggcagaggctcttgttctcttcccttactttctcccctaaaagtggagtctctctctctgtgctgggccgcctggagctaggagaggggtgacacaggcacctctgtggccactatcactaggactatgctggctcagacctgaagccagcacagcactgggtctcacccaaggcctacagtctccactgcctggctactgcctacgtttgcttaaggcactagggctctacagtcagcaggtggtgaagccagtgagattatgtccttcccttcaaggcagcaagttccccctacccccatcctgggaaggtccttagatgccatctgggaggcagggcctgcagtcagaaaccttagtaatctccccagtgctctattctattacagcctggctgatacccaagccataaggcaaagtccttcctgctcttccctcccctttccacaagcagagaagtctctctccatggccaccactgccccagccctgtggcagtgctgccaggccactgccaacgttcattcagggcctaagggctcttgaagcaactgaacactgccaggcctgggactctccctttagggtagtgggctcccctctgacccagggcaggtccagaactgccaccccacagccaacacttagaatctgggaccccaagagccctcttggtgctctgccacactgtagctgagctggtacctaggctgatttttgctttttatgaaggtacttttttgtgtgtatagttcaatttggttttcctccagggaggacaattggtggaggtttctatttgggcatcttttttttttttttttgagacggagttttgctctttcacccaggctggagtgcagtggcgcgatctcggctcactgcaacctctgcctcctgggttcaagcgattctccagcctcagcctccccagtagctgggattacaggtgcctgccaccatgcttggctactttttttttcaattaaaaagtaaactttaatgtcgaaaatgcaaacttggggaaggcagaaagatcacacacaaggctgtcgcttcacacttggaaggttgcacggcggccaggagaggcactcctcacttcccagacagggcgggggccgggcagaggcgctcctcacttgccagacggggcggcggccacatgcctggctaatttttgtatttttagtagggacggggattctccgtgttggccaggctggtctcaaactcctgacttcaggtgatccacgcacctcggcctcccaaagtgctgggattacaggcatgagccaccgcgcccagccctatttggccatcttgctttgcctccaccttcatttgataacagaacacccccatgtaaccaccaccacaatcaagatataagacatttctgttattctccaaatttccttcaccctcctttatagtccatggcacccaccccatccctgggcaacacctatgtgcttcctttttttttttccccgcaggaggacgtcttcctatacctatgtgcattccatcactgctgcttttaatcatatagcgtgtagtcttatgagtctgactttttcacttagcataatgcttttgcaatttgtgattgagcgttttcatatgattctgttttttctgtctcttagcttggaagttatacactttttagtagtaactgttgggagatcgttctccaagagtctctctcatatttccatacatcctgctagcagagacattgactacctgtttttgtctgtttagtgttgctataaaggaatacctaagtctgagtattatacatagaaaagaggttttatttgtctcatggctcctcaggccatacaagaaacatggtgccagcatcttaccagtgtcacatggcaagaaaggaagtgaggaagagaaaataagttgttaactggttgttaaaaagtgccaggcacgggccaggcacagtggctcgtgcctgtaatcccagcactttgggtggccaaggcgagtggatcacctgaggtcgggagttttgagaccagcctgaccaacatggagaaaccctgtctctactaaaaaaaatacaaaaaaattagctgggcatggtggtgcatgcctgtaatcctagctactcgggaggctgaggcaggagaatttcttgaatccaggaggtggaggttgcagtgagccaagatcacctgggcgacaagagcgaaactctgtctcaaagaaaaaaaaagtgccaggctctttttaacaaccagttcttacaggaactaatagagtgaaaactcactcacccccaccccacagggagggcattcattcatgagggatccacccctatgacccaaacacctcccattagccccccacctccaacattggaatcaaaatttaacatgaggtttggggggcagaaatccaaattatagcactacctttgttccaggctaccttcaaaggatgtttatacagcaaacagccttggaaaatagagttagggtctccttgtagagcacagggtaagtttgcttacttttcagcataatcaagattgtgtcttcttctggagcaaaactttgacaacaacaagcggggcaaagtctgaaaccttttgcacatcttgacagaaccttagagattacgagatttatctctgccttactcaaggtccattagtatcttccagaacaataagttggtcttagaatcctttagctatgtattcccttccaggcttcgatgctgtgtgctgttgttttatttagtttttattttaaacccaacaagacgctataccatcaatacttatttagatccccccacatatttaacttgccatggtgcttcattctttcatgcctctttaagcatccatctaggatcgtgttcattccacatgaagagaaagcttttggcccagcacgatggctcacacctgtaatcccagcactttgggaagcctaggcgggaggatcgcttgagcccaggatttccagaccagcctgggctacgtggcaaaaccctgtctctactgaaaatacaaaaaattagccaggtgtggtggttcacgtccctgctactcgggaggctgaggtgggaggattacttaaacctgggaggttgaggctgcagtgagcgttgattgcaccactgcactccagcgtgggtgacaggagtgagaccatgtctccaaaaaaaaaaaagaaggaaagaaaaagcttttgtatttcctttcgtgtaggtctgctaatgacaaagtctctgggttttttgtttgactagagaaatgttttaattttaaccttattcttgaaggttttgtttttgttttcattttgttttgtgtgctaagtacagaattctcattggcatttatttatttagagacagagtcttgctctgtggcccaggctagagtacagtggcacgatctccgcctcccaggttcaagcgattctcctccctcaacctcctgagtagctggggctacaggcatgcaccactacacctgactaatttttgtatttttagtagagacggggtttcaccgtgttgcccaggctgatctcaaactcctgagctcaagtgatttgcctgccttggcctcccaaagtgctgggattataggcatgagccgccgtgcctggccagcatttattttcttttcagctctttaaggaagtcattccattatctctgggttccattgttgagaagccagctgtcattctaatggttgccctttgaagataacttttttccctctgctattttaaatatttcctccttgtattttattttcaacaggtgtaatgtggcacatatatcagcaattgttatgttacatacaatacatattgtgcaacatatgtatcattatcagttattgctgtgtaacaaactactccagaacacagtggcttataaaaggaatcatttatttagtccttaaatctgcaatttgagcagagctcagtgggaaagcctcagctttactttatatggcaccatataaggtaactcgcaactggcaagttggtgctggctgttggctggtagttcattcagggctcagggcccaggaccaagagtcgtcaccatggcttgcttcagcctccttgaggcatgatggctgggtcccaagagaagagaaatagaaacttccagtctcttaaggcattggtctggaagctgggacggcatcacttttgccatattctgttggtaacgcagttacatcgccagattaaagggtaaagagatacaaattcccactgctcagtgcaaggaatatcagtgattttagggggccctgttttaaaacccctacaaggtgctaagcgtggatttctggggctttcttgttttttgtttttttctatgtgtttttttttttttttttggtggtggggtcagggagggcttatagggtatgttaaatcagcagaataattttatttatttatttggagatggagtttcactcttttgcctaagctggagtgaagtagcgtgatcagagatggagtttcactcttttgcctaagctggagtgaagtagcgtgatctcggctcactgcaacctccgccccgctggttcaagcaattcccctgccttagcctcccaagtagctgggattataggcacccaccgccacgcccggctaatttttatatttttagtagacatggggtttcgccatggctagtctggaattcctgacctcaggtgatccacccaccttggcctcccaaagtggtgggattacaggtatgagccactgtgcctgacctataatgttttttaaaaatcagttttggaaagtttgcagacattaacttttcaaatgtagcttccatttgattctttttctactctgcctctgatcctccacttatgtatgtatgctagatcttttattagatagtctgtgtctcttatgtactctactatattttgtattcttctgtctctccatgctttattctgtttactctttcctgattatattttttaattttgtaatttccatttgatgcttttttgatcattcaaaactcttcaccaaaattctaaatttccttttttaacctctcgaatgttatcacagttactttaaagtctattttggataacttaaatatttacagtcccctcacagatatgtttcttttgtatattgtttctgttggttttctttcatgtcttatctccacatatgcctggtgagttttgattatgtgttggtcattgtatttgcaagtatgctcgtagaaataatctggaatggccgggcgcagtggctcatgcctgtaatcccagcactttgggaggctgaggcaggtggatcacgagatcaggagatcaagaccatcctggctaacatggtgaaaccccatctctactaaaaatacaaaaaattagctgagcatggtggcacgttcctgtaatccctgctactcgggaggctgaggcaggagaatcacttgaaccaggaggcagaggttgcagtgagccgagatcacgccactgcactccagcctgggtgacagagcgagactccgtctcaaaaaaaaaaaaaaaaaaaaaaaaagaaataatctagagcctagtttgatgtttccttacaaagaatgaatttatttttgcttctcccattgcaactaggataacctcagtctagtttctggaactgaaatcacttgaggctgaactgtggtctctgtgagagcgtgtctgtgtatggctcacccttattcctaggctacgtagttctttaggaccctaacccaaagtaagagatgttcatcagggctctcctcttggcagacgcctgggctccagtccctgtgtcctgagccccatgaggctgttactggtgctgctcgtctgcccatcctctccagtaacagccacctgaacactgcaattcctgggtttccatcattccttccagcctggtgagtcatcagtgtcttttgaggtatccagtgcctgccagcagatgttttttaataatttgtccagcatttctggctgtcctcagtaggtggtctgtttcacattccctagtctgctgttaatggaaagtggaagttctgagagagaatcatcgttcccgtcagcattcaaatgcctgattacactttccccattcgctatcctttcctttatttgctcctcaccacagcaaaactcctcaaaaatatctatctttgcaatcttcagattctcacattgtgtccttaaacccactttaatcaggccttggttccctccattccactaaaagtaatgttgtcaaggtcgtgcatgcctccgtgatgctaattccagtgatgagttttcagttgtcattctctgacatatcggcaacacttgatgtggagtaccctgatgttgagaggctggtgagatgaaggaaaaacccagccaagggcaatgaggaatggcttccttccgcctcctccttccctatctttgttgtggtttttgttgtttctgtaacactgattacgttatagtttatttaatgtacttccttattctatgtttttactttagtcattttgttgatctcctccataataacataggctcgggccaagcacagtggctcacgcctgtaatcccagcactttgggagaccaagatgggtggatcacttgaggtgaggagttcgagaccagcctggccaacatggcgaaaccctgtgcctactaaaaatacaaaaattagctgggcgtggtagcaagcgcctgtaatcccagctactagggaggctgaagcaggagaattgcaggagaatcacttgaacccagggggcagaggttgcagtgagctgagatcgcgccactgcactccagcctgggtaacagagtgagactctgtctcaaaaaaaaaaaaaaaaaaaaggcttcaggagggcagagcattttatgcaattgttcattaattgacccctccatttggcacagatcacatgcccagtagttaactgttaatcaacgcactctctgtggaacaacaggctggtcccgttgagccaacactctctgggcactgccttcactagactctggctg

SEQ ID NO: 15713 - DNA, 34405 bp, Homo sapiens
gtgagtgacctcgcgggtgggcggggcctgggggtccgttccccaacttcctcggcgctccggactcccaagtctccgccggaccctcctttggatattcctcgtgtctccgattctgaggcatgtcctccattaacccttatgtgactccctgagtgcccccaccttccatcttttcatccccctgcgtccccaattcccatcccgagaccgcccgtgtctcatctcgaacttgtggaccccagggaccccagcttcgaccctgagtttctcccctgaaccccagtctcctccgtgtgtctccctcagtatccctaacttcccgagtcaatccatctcttctctttccccgaccctcagtgcctctttaggccccattggccgtcctaattttccttcctgtgctcctctaagtgctcacttgattccccacttcacgtccgtctccacctttcgtggtgcctctactcatttctcactccctgcttctcctgcctttcctccctgctttttttccttgcctttcctctctcgcgtgcctccagacctgcccccgacatgctccctccttcccctcagcctggccaccccagagtctcccacccctaatcctgtgtccacctcctgctcccacagatgacttggaagctggtgacagggagcatgtgaccagggtgatcatgggactgggtcggggcaagcctgtgggtgtgggacagggagggcacagggcaaggggacctgtggccgtatttttaatgggctacccacatgaccccaacgaatacctccccctagcttctgggtctttccctcacctgcctcttacccgcccaacaggatgtcaggcaggttcggtttggcaacgttgaggctgcacccttgggctgaatgcattgtttttgaatgcattgtttttgttagagtttctgcctggagtttggaacctgttttctgtccaagtctcagtttcctcatctgtgacaggggaactgtacctcctgccctcgtaagtctgccatgaggttcaaaatttgaatgagaaaatgtagaaggtaaagctttataaccagtatggccctgtacaaatacatgattttactgttgggtcataggcagaattgaaaggagtggaaagggaaagggctagaatgagaagacaaggagagaaggatgagcaggaggtcccttgtctttcagtgtatcatttggcagtgtttgttcatcacctcttgtgagtcaggctcttctgtatatgttctcttcaccattcattcagtcatcgtttatctaacaaatatttacggactgtctgatgttctaggctacccttggtgtggccaatgatattctcacttcacatgagaaaaagagggcgcatgagttgcttgaggtcacaccgatgaggttgaagctggaatctgacaccagagcctgtgtgattgtcctgatgtgtaaggtttgctactgtttaggacacttcttgttccttccgtggattactttcttgttacatgagagactccccaaaagggagtttccctcttactcagcagaatgacatcactaagagatacagaaaggagaaatttaaatactctgtgtgtgtgtgtgtgtgtgtgtgtgtgtgtgtgtgtgtgtgtctgcagacatctattgggtgtgtgtgctgggggaagtaggtaggcaaggagtaaggggccgtagtgaagagtgtgttacaaacttcactttgtagagggtggctccctgggagaatatgttctgtgtctttcacagtggattttgatagggtcatgtcttaaatgcctcttctcgttttcggatggtgatctcatccagtcttatttctttaagtgccgtctctattctgtcagcccacaaatttatatccccagtccagtccagacctttccctggaatgacatactcaaatctagttgcttactcagcacctcaaacttaggcttttcaaacttgaagtatttatttattgatttatttattttttgagacagagtctcactctgtcacccaggctggaatgcaatggcacgatctcggctcactgcaacctccacctcctgattctcctgcctcagcctcccaagtagctgggattacaagcatgcgccatcatgcccaactaatttttgtatttttgtagaggcggggtttcaccgtgttggccaggctggtctcgaactcctgatctcaagtgatccacctgccttggcctcccaaagtggtgggattacaggtgtgagccaccgcgccaggcctcaaacttaagagtttagaattgagctcctgttagttctgccctccatccctgaccccactcttcaccaaaacatgtccctcccactctctttctcatcttaggacataggagtattgttcattcagttgctcaggtcaaagctgtgagattatctatgatgcctctctgtttcttaccccacacccagccagagtgatcttgttaaaatgttgtttctttgcagtggcctctcctctcatggcacatgcctggccccctgttgcctctctgatgtcactggcttccttgcttttcctggaactcgctaaacatgttccagccccatggcctttgcacacgctctctttgcctagctattcatatgactttcatctctctccatcaggtatttatttaagatcaatttcttggtgaagacttctctcctcacccaatctaaaatttcactctccacctcagcacttcctatccccattctctggtttttctcctcagtagttaattgtcatctaaaacctttgtaaatatttacctgtttatcttctttattattagtagctctgtctaaaatataagttccaggatgtcagggattttgtggggttttttttggttggttggttgttttggttttgagacagggtctcactctgttgcccaggctggagcgcagtggtgcgatctcagctcactgcagcctccgcctcctgggtttgagtgattctcccacctcagtctcccaggaagctggaattacaggtgcacgccaccacacccagctaatttttgtattttttggtagagatggggtttcactatgttggccaggccggtcttgaactcttgacctcaagtgatccacccgcctcggcctcccaaagttctgggattactggtgtgagccaccgcgcccggccttgttttgttttaagacagggtctcactgtcgctcaggctggattgcagtggcacaatcacagctcactgcagcctcgacctgctagacttaagcaatccccccacctcagccaccttagtagctgggacttacaggcatgagagataccatgcctgggtaattgttaagtttttgtagaggtgaggtctcactatattacccaggctggtctcaaagtcctgagcttaagtgatcctccttccttggcctcctaaagtgctgggattacaggagtgaactgccgtgcctgaccagtctgttttgtttacgattgtatcctcagcggttagaacaatgcctgccacaatccatctcagtaaatatttgtggagtgagtcataacatgggccacactgtaccgtgccaccagcccaaagatctcttaaagtcacccctgtctcatgtgcttgggagctccagtgacagtttcggggcagtttgcttccagctgtggtccagccaagcggagtgaatgaaagagatgctttttccttttgtgaaaggacgttttgctctggctcacgtgagcagcagtgcattttgagacgagggccttggcttttggaatctaagagcctgttgagcaagcctcgctcagccaccttctttcagctttctcctgaaggcagtttgaggattaagagcctgatgctctggattccacctaattgggttcagatcctggcaaactgtgtaacctgtgccccagtttcctgtgtaatgtggagagacctggaccttttcttacaggtgtttggagggttaaatgtggcaattcggccgggcgcagtggctcatgcctgtaaccccagcactttgggaggtggaggtgggcggatcaccggaggtcaggagttcaagaccagcctggttaacatggtgaaaccccgtttctactaaaaatacaaaaaattagccgagtgtggtggtgcgcgcctgtaatcccagctagtctggagactgaggcaggagaatcgcttgaacccgggaggcagaggttgcagtgagccaagatcacgccattgcactccagcttgggcaacaagagtgaaactctgtctcaaaaaaaaaaaaaaaaaaaaagtggcaatttacccgaaactgtggtgaagcgtctggcgccctgtgggtgctgggcagcagtgggtgctgatggggtgtgaggggatgggatcaagccctttcccactaacttaggaaagaggttggaatgagctggggtcagagggaacatttgcggggacattttgccgggaggctgccttggaggttcagaggctcagatgacccctgtgttcattcagtgttttctcacccacagattgagcacctgctgtgtggccagccctttgcctagtgctgttcaagagtcagaggacataggcaggcaatcccccaccacaacctgccaccccatttcctctcttggggccttgatttctccacatgccaaacagggagaatgattgcaccttccttgtttctttttttttttttttgagacagtctcactttgtcatccaagctttagtgcagtggcatgatctcggctcactgcagcctctgcctctcgggttcaaagattctcctgcttcagcctcccaagtagctgtgattataggcacccaccatcacgccaggctaattttttttgtagttttagtagagatggggtttttttctcacacgttggccaggctggtcttgaacttctgacctcaggtgatctgcccatctcaccctcccaaagtgctgggattacaggtgtgagccaccgcgcccggctgcgccttccctgtttctttgtgagcttggaggtggatcacaagtgtgaaaccctttgccaaccgtgaggcatggtggccttgtgagaggacggaggccggtgtgtggtggcatgctcccgtgctgtgtggcacagacggagctacaggaaggaagttggggcagcttggcactctgagtggaccctgagtttccagcctgctctgtcttgactgggtgggaggagggtgctcaggagggtgtcactgctgccaggttctgctgccaggaccatccaacagttgttccaatcatgggacatcctgtcgtcagcagctggggctcgtgaggcctgatttccacctcgggcagttctgtgtgtgctcctggaatcccccacgtggccaagcctgtgaggtctgcttcctggcctgctgcctgtgggttcctgtcacgcacctctcgggcagctgtccggctcctctgctctcggcttagtcaagaaggaagcagaaggcttggagtctttcctgcttggactaggagtgagctcagcctaagtgccctgactatatataaagctgaactttccagaccgaagcctggggatggatcagtccgatcacttagggccgctcctgaaggagtgcaggtgctagatacaggttctcccggtggaggagcgaaccccttgtgggccgttagctactggtgggatttgagcatggtatttccctatccgttgtggagaggagcatggcagctcagagtgggtgggaacagtgtgtggtccctgttatcaccttcaagggaataaagtgtgtctgggggcttcagaggtgctggccccatgggcttataggtggttcattcattcattctcattcattcattcaccaaacttattaaacacccactgtgagtcaggaacatcatgccaggtgcttagggaaacaaatcaaagcgggttgggtgagcagcccaagccaacagatgcacccccattctcacatggtgtgtgttcctgtgggctgggccctgggtggtgtggggtgctggggagaagaggaaggcacaccaggctgcagggcggaggtgcgggtatgaattttcagaggagatggcacctgagctgtatcttcatggataagaagagatttgttcatttgtcctttgtggagcacacattcaggttaagaaagtggggaggatgggctacgctgatggagcgtatgtgtggtatccccaagtgcactgagacacgagtttgacgtgttctgggaagatcgatggtgcggcgtggctggagtagaggtgagggatgagttggaggggtgagttgggccagctctcatggatgctggagtctgggctttccctgggaggtcatggggcgccactggccagggtcagcagggagacctgcagctggatttgcatcgtacagtgggcatggaggggtgtcaggctgggttgggaaccgtgcaggctggaagggcactctggtgctctgagcattcagagggggcagctgggccttgaaggatgagcaggggctccagcaggaactggagagcgcattccagggaggacgcaagtgcaggcccctttcactacagaaaagcagttttcacacagaccttccaaaggggaggagaggggactgcctgggcctggcagctgcggcaggtagcagcaatcagagggcagggaccgctcctcccgtgcctgagacctgcccagggtccttcagggaattcgtagctgaggaggaaccagatttttgggactgagttctccctcaccacccgctctgagccaccctcttggtcccttgtcctctactgcacttcttccggggcttggctcctcgtcatgagaggagcttccctgggcatggcgaggggcgtgactgacatagcagccctggacaagtggctccaggtgacctgtgttcacgttgatcacagcactaaccacggcccctcctctcagcaccttcccctctcgagccgtccagtcccagtgaaaatgctcaccgttcatgggtgggctgagcaagcccctgatctctgccttcctccgtgttctgatctgcttcatctgctgtgaaggcctctcgccatttcccccgctggcaaactcctgttcttcctggaaagttcagctaaaaagtcatcccctttaggggtccttccctcaggggaccgtgcacttggcgagacagggactggtcttgggtctctctgttgactgttttatgaacccaggtagtcacttccagggaactcatcagagatgctaccattggctccaatctccctctgttcccactcgaggttttttgtttcttcgtttgtttttctttctttctttttttttgagacagagtctcgctctcgcccaggctggagtgcagtgacatgatctcggctcactgcaagctccgcctcccgggttcacgccattctcctgcctcagcctcccgaatagctgggactacaggcacccgccaccacgcccagctaattttttttgtatttttagtagagacggggtttcaccatgttagccaggatggtctcaatctcctgatttcgtgatccgcccgccttaacctcccaaagtgctgggattacaggcgtgagccactgcgcccagcccgtttgtttttgttttttggtggacatcaactttaatttgccctttgttttgttttgtttttgaggcagggtcttgctctgtctcccaggctggagtgcagtagtgcaatcttggctcactgcagtctcgacctcaagaggatcaagcaatcctcttgccttagcctcccgagtagctgggaccacaggcgcacaccaccatgcccagctaattttattttatattttgtagagacagggttttgccatgttccccaggctggtctcaaattcctgggctcaagcaatccgtctgcctcagcctcccaaaatgctggaattacaggcacgagccactgtgcccggccttaatttgccctttgaacatgtacaattcagggcctctctgggcctcagtttcttgatctctgagatgggaagatgggataataatacttgttcctcccgtccttcagctcctccaggggaccctcacaccagcacactctctgtcagtcttccctcaatgaacccagcaggcaagcttggttttgacagaggatgggtgagcagagataaggaaaacggccagaaatatctggcttccctcagcaggggcaccaaaattggtacctggaaattgcctggcttggacaggcagaattgtcactgtcaacccccaccaccaaaggtcttgggtctttgtctttctgcttgtggtgtttgagagagctgcttgacacagccgaggtgcggtctgtgtcaggtgacctgggcatcctgggggtgcagggagaagcccaggtaaggaggaggaggggccggtcatcagtggggaaaagtgattgtctaccccacgggaaggtcaagggtaggacgctgtgagaagccagggggagagatgaagtgaggcatgatgcggggggccctcatccaccatccccctcttgcagctgtgctgggaagagcctaggctccagggtccaaggtggcagggacagaaggaagcacgtgtgagcactttctccctgctggcccgccttcctggttggcaatgccgtgagtgttccaggatgtggccccgtggctgtcatttcctttcttccacctagtgataacaatggccactgtttgtgtgcccacagtcggcctgtgtcccagacaccttccctccattgcgtcatctcgtcctcctgcctaccctgaaggctggatgccagccaagcctgtcgtttctgtggccatgctgtcgtgggtgtgtggggggcatcccctagccccaggctctggtggggggtacacaggctgggccattgacgaaggggtgtgtggaatctttctttgatttcactgcacccctggtgactttctccctcaatctgaggctcatgggtgctggatgctcttgactctctgcccttcctgggcgcacccctccgcgtccctgtgggcccgtcctcggggtagcctctctgcgctcttccaggccaggcctgagtcccacaggtccccatcttcccggctgcagcccccagaggctcagcctatactgctacttcctttgaaaactataatcgctttacatagcatctggaaaatagggaaaaggaaaaaacaaaagcccataaacccagcaccctcatctactcaatggcatgttttctgtcagtctatcttggtttgttttctatcaggctttgttttttctatgcataatatttactcagttaaatttttgttttgacaaactttctgtgagccaagcttgtggacggagatgaaaagacgagcagctgcctttgagaaactcagactctgggccagcccatctgggtgccagctttcactgctccacccactagctgggtgaccctgggcccgtgactttacccctctgttctttggtgttctcatatgtaaaatgaggataataatagtaaccagttcatagagtggttgtcagacagaatgattaatgtacgtaaagctttcaggatggtgccagcaagatgcacaggagtgtttggtaggaggatgacgaagcttaccgtctggcaggaggggcagttgtaacatgctgggctgtgatagtacagatgtgtttaaagtgagggagagcccagagcaaggagagagaacctggcatctggtgatggtgtatcaagaacattttaggccagacacggtgactcacacctgtaatcccagcactttgagaggctgaggcaggcagatcgcttgaacccgggcgttcgagaccagcctgagcaacgtggtaagaccctgtctttataatttttttttttttttttctgagacggagtcttcactctgtcacctaggctggagtgcggtggtgctatcttggctcactgcaacctccacctcccgggctcaagtgattctcctgcctcagtctcccaagtagctgggattataggtgcccaccaccatgcccagctaatttttttatatttttagtagagacggagtttcaccatgttggtcaggctggtctcaaattcctgacctcaagtgatctgccctcctcagcctcccagagtgctgggattacgggcatgagccaccatgcctggcctctataaaaattgtttggaagaaattacctaggcctggtgatacacacctgtagtcctagctactcaggaggctgaggtggaaggaggtagaggctgcagtgagccatgattgagccactgtactccagcctgggcaacagagccagaccctgtttcaaaacaacaacaacaaaaacatttttaaggaggaggctgagaaccacgagaaccaagcttggatttgaagaaggatcagggctttctcagacagaaaaggagaggaagaacattccagatagacatcattgagagatggcactgagccttgtaatgggacactgcgaacttttcttcagttgttatgatctttttttttttttttttgagacggagtttcgctcttgttgcccaggctggagtgcaatggcgccatctcagctcaccgcaacctccgcctcccaggttcaagcgattcttctgcctcagcctcccaagtagctgggattacaggcatgcgccaccatgcctggctaattttttgtatttttagtagagacggggtttctccatgttggtcaggctggtctcaaactcctgacctcaggtgatccgcccgagtcggcctcccaaagtgctgggattacaggcgtgaaccaccgtgccttgttggtataattattagtattgatcttttttccttttcatgtgcctcttagtgggccccttgcttttgtcttccttctgtccccagggttgatcctgtgctcagcacataggccagggaagaatgtggctgtgacccagtgtccactcagatgtcctctctcccccagggcacccatactctgtccttagtgtcttttgtctggtgacatcttggcacagaggcagagggcggcctccgtctgattggcgcctggctttggtgacagtaccttaggaaggcagtgtattttctgggaacctaggaaataacaaggtatctaattccatcatcaacactggggacaatttccatggcagaaactatgactctgaatatgcagcgtaaagttaccacccagacactgctgctcctgagtctcgaatggcatcttctgcaggggctcccccacctgcccctgcagaaggtgcagttcgttcatttccaaggagcttgcttttgtgtgctgtctctcggagctctttgggaaacctgtggtagcaggaaacaaaggatttagaccaatgccgatgatccccttgctccgatagagtgtgacatgatgctggtcaccttttggtatctaggaggggggacattgattttgtttgcggaagtgaaatgatccatgctggcctctttttttttttttttttttgagacagagtcaccctatcgcccaggctggagtgcagtggcgcgatctcagctcactgcaacctctgcctcccgggttcaagtgattctcctgcctcagcttcccgggcagctgggactacaggcgcctgccaccacatctggctaatttttgtatttttagtagaggcagggtttcgccatgttggccaggctggtctcgaatttctgacctcaaatgatccgcccgcctcagcctctcgaagtgctgggattacatgcctgagccactgtgtctggtccatactagcctctttgagtgctgaaaggttatctctgtaacttatttagtgagaaccctccatttgcccagggcattactgcctataatgtatgttcacatgtgctatctcctttggtcaataccacacactacaggtgaggaaactgagtctctgctgggacactgggtcaggaagcaggcagttaaggtcacctgtgcacagtggcagcacagggggacagccttctaggtagccagcctggcctgagggttctgtcacttttacctcccactcagtgttgtttctctttctttcccctccttttaagatccctccaggcccaggatctggggacaacgctggtggggagtgatctgggtgtctgtgcaggaaaccgctgcactgggtgagatgggcatgggagactgtgcctggctgaccagagacctcgttttcttccagacagagggggaagacggtggggcctccccacctgccccgcagaagatgcagttctttggccgcctggtcaataccttcagtggcgtcaccaacttgttctctaacccattccgggtgaaggaggtggctgtggccgactacacctcgagtgaccgagttcgggaggaagggcagctgattctgttccagaacactcccaaccgcacctgggactgcgtcctggtcaaccccaggaactcacagagtggattccggtgggtgatgctcagcgggaacatacttctctcctttcactcccccacgtctcggattggaggtcttattggccgagaagcagtttctttgagtctctgtctgaggggtctggagaggggtgggagagaggggagactgtactcttggaccagagggaagggcttccgagactccacacttctggcccatcagtgtcccagcacgaggctgaggatggaagcctgggttgtttctggcctggaggctcgacctatatggacaaagggaagaaggaaggacagggagactgagagtgtccacatcagataaggcccatggggagaacctttagccctggctctttatttttggttttggtttttgttttttgagacagtcttgctctgttgcccaggctggagtgcagtggcgcaatctcggctcactgcaacctctgcctcccaggttcaagcgattctcctgcctcagcctcctgagtagctgggattacaggcacccaccaccacgcccagctgatttttgtatttttagcagagacggggtttcatcatattggccaggctggtctcaaactcctgacctcaggtgatctgcccaccttggcctcccaaagtgctgggattgcaggcgtgagccactgcacctggcctagccctggctctttaagggcatggccgttctcataggggctgcccagggtttgcttaggaaggctggacagagctgttgcctcttggggcatgctgggactcccctgggcctgaagagaaggctcaaaagccaggacaggcctgagggaaccgggccaacggcagagctggttgggaaaaggggagaagcagccaaggttccaaatgcaggccccagcagtgcttggcagactggcatctagttgggctcagacagatatccctgtttccgctcacctatccatctggctgtcctgtcagccatccattcaacatgcaccaagcacctccagtgtctccagagtcctgggcttcgggccagtcctggctggcctgtgagatgacaaacatgtcctgtgtctttaaggaacgtacagtctggtgggggaggtccggtgcaaacaggcgtcatagcaccccttgaggagtgctgtgacagagggagagcctaggaaacagtgtggatcacaaggaggtgattgagagctactctgcgtctggaagagtgaggaggagcctgtgtggcagaacaaaatggataaggtcgttccagccgtgcagaagtgtggaggtgtgagcctgcaggcaggtggctctggttggatcccaggtgcatgcagggctttggtgagagtgaggctgaaggaagcagctggggactcattctgactaaagaggcatggcaggaggggtctctgaaagtgtcaggctgggggccaggggctgccaccaacagaagagcaaggcaggtatcagggccccatccaatcaggtgagaattcagagcctggctccacaaggaacctgaggcagaggcacccacagcaggtgcttgggctaaatgcagctcagtggccagtgcaggcaccagttttaatacagtggggccattccagattctgagtgcagatggggctgagcagaccgccttccagctggactcgatcaggactgaccctggacggggcaggcttgcacttgtagcttcagagctccactgcaggcacagctgaccagggcagcgggtccactccttggagagctggacagccccacttttgaggtacacggccctggggataccactaatctccacgtaccaataatcaccaagttctgtcagttgtaaaatcccttgacaggattccagatttgtctcagccagcttaagccccagtgtgggcagacctccatcccaggaggatttagtcctttgtcagcagcttcttagctacacgtaagctattctgtggtactttatagtttacaggattttttgttttcttttttttttttttttgagacagagtctcgctctgtcacccaggctggagtacagtgacgcgatctcggcttactgcaagctccgcctcccaggttcacgccattctcctgcctcagcctcccaagtagctgggactacaggcacccgccaccacgcctggctaatattttgtatttttagtagagatggggtttcaccatgttagccaggatggtctcaatctcctgacctcgtgatccgcctgcctcggcctcccaaagtgctgggattacaattttacaggatgtttttaagtatgttgggttagcacattctctgccaatccgtggaggtgggcaaggaaggcagtattccattttatgcatgagaaaatagccttgggatgataagtgattcatcccacttatacacaggaagcagtgaagaaacagaatcagtgtcttctggttcccaattcatttctctgtgctgctgtgttgtttccatgtatgtatgtatgtatttatttttttgagacgttaagtcttgctctgttgcccaggctggagtgcagtggcatgatcttggcttacagcaacctctgcctcctgggttcaagctattcttctgcctcagcctcccgagtagctgagactacaggtgcgtgccaccatacctggctaatttttgtgttttttagtagagacagggtttcactgtgttagccaggatggtcttgaactcctgacctcgtgatctgcctgccttggcctcccaaagtgctgggattacaggcatgagtcaccatgcccggctttgtttgtcttatttctaaattttattgatttatttattttcacagtcatagctctggagtcttttttatcttctcccctctaacctgctcccacccgaacctttccatttcagcagatagcatcattgcaacgggctgtgccagatccagccatcacatccacctttccagccaaagggagggtggaagggcaggatgcagaaggtcaatctccccctcctcagggacatttcatggaagttgcacgcattggccagaacccggtcacatggccacagctaactgcaaaggatgctgggaagtgttgcctgtgttgcagacagccacgtgccagtcgaaaatcagaggttctttctccctccgtcttgctgctggctcgcttctccagaccacagtcattgtgcacgtgtctcctgctgctccggctgtggcctgcactcctctcatcctcttccaagctgctgtcacagcgctgtttccagagggcaaatctgattggtcactcccctgctttactccccaagggcttcctgttttcttttatttttatttttattttcattttttgagatggagtctcgctctgtcgctcaggctggagtgcagtggcacaatgtcagctcactgcaagatctgcctcctgggttcatgccattctcctgcctcagcctcccaagtagctgggactacaggcgcccgccaccacgcccagttaattttttttgtatttttagtagagacggggtttcaccatctactcttagccaggatggtctcgatctcctgaccttgtgatctgcccgcctcagcctcccaaagtgctgggattacaggagtgagccaccgcgcccggccagcttcctgttttcttaacacatcaggtgcttaatgacttaaaagggcccagtgtgatcaagtttctgcctctgtgttctcagctcatgccgccttgtgctcctggcctttgcccaggctcttgctgtggcctggaatactcccctttctttgcctgccttccttcctcttgccctcccctgacctgcaggctggattaggagtttctgctgggcatcccatggcacccgtccctgcactggggatcctgctttcctggtaggccacagaccttgtgaggggagggactgtgtctgttgggttcatgacagtgtgcccagcccccagcaggtgcctggcgtagatcaggtttgtggaacaaatgaatgtgatatattaatttagctttagagtattcattgagggctgctgtgtgccaggccctctgtgccacctgggtggagggtggaggactgttgcattgagggcagttgaaggagtgagctgggaagtgggaggtggaggatggggactgggatgcagggtttgaggttatcaggggtcccagaagcagtaatgccaaggcctaggctgtgacctggagtgagggctgcgatggggtggggtggggtcgaggctgtggaggagggtcatcagggcactgctggagccctggggttctccagggccgggggtggtcattgcagtgttctcccagctcctctcaacaccctgcggtctgtggagagcaggcctggtgcactggacttgcctctggccagggctgagtttctgccttctaaacgatcttcctcctgtgttgccctagaggcctctggactgtcctgagtacttgacgcgtgttagagtgagcatgggctgctagccttccgctccaggtggaggagtttctgttgttcttttgctgctgttgctgcagtgagctgccaggctgagcttctggatggacctgggggatggaattaggagcttctgaattcttgggttgtataacctaaggccggagagtcccacagcactgctgctgggcggagagactggaccctgctgatacagacagcgacagcagcaggagcatctgcagtttcccagcaggtcctgcatgcctgggcttggcactagtctaagtagtaactcatgttatcctcacgacagtcccacgaggtggggtcattactgacctcctattacagatgaggaaacagaggcttgcagaatttgagatcacacagctggtcagcgtagcgattattcagaccctgtcacctggctccagaacccactcgtttacctttcttacatcagggctgctttgtagtgtggcgagctgagtggagctccacccgcctgggctgatcctggcccttcctgcctgacctatggtgcgggggccctggctctccccgtgtgagcccccaggggtcacttgtaatatgcctgtgtacactatgatagcatagatacttctgttcctggtacagattaatcatttacggctggcattgacttgtaacagatgacatttgatgaaatcaaccagcctctcactggtatctcagcagaaacagggctgtacctcccaggcatcctgggaaggatgatagaagtgtgtgatctgtgcttccctaccgggagctgacttttgaggctctctggactgggactttgccataaaactgcttatcagaaacctcagataagtggagtgccctgtgtcctggccacgtactctggggccagctcctccatccattcagtcctcccacatcccatcttcaccaagcagagtggaaagcggcaggtctctgcgagaaaaggaggctctgtacccagccttcagtgagataactttagagtggggccttgtattccctacacaggccttgtccccgacacggcctctttgcccttgcttctccttctgctaagaatgctccttcccaactccttggctggacacacggctcctgctctgtgggcctgtcctgttcccactcagagcctcagcaccccccatgtggccaagacacagcccctcttgccttaggttgccgtgggtctgtttccacatctgtttcccctccagactgcagggctcctgagggacagggcctggggccaagtctcctctgcgttcctgatgcctggtggtgtgccacgctctccgtgggtgcacggtaaatatctgccgagtggctagatgtatccatggttgctgaaggccaagtgtgttgaccagagggcgtgggaaaggctccactggggtggctggggtagagatagaccttaaggggtccagaagactccaccagctggagggaaaggccctacagagacaaggtactaggaaaggcccagaggacagaggaggggccctgtggggagcctgtgggcaggaagggcctgtgctgggctttgaaactggggactcaggtactgctctagcgtgagggtccttggcattttttttggtccaggaccccctgaggtccctggggaatgagaacaggctcacacagccactttcaagaggtttgcaggtcccctgaggcttagccacagacccctcccaccccagcagagacacagcagaggcttctgagtggaggccaggtggcttcagcctggggttctagaagggagggaagagacacacccccgtgtgtcctccagagcctcagccttctccctgaatctcccctttgcctcctcactgtaacccacacctggctctccttgaaggacccgcttgccccgcagcctcctgagagttttctctcccagtccctctcccactgggcctggaggtggggtagggtcctccttgcccccagccttgaatcttctgtcaccctacaataccacttgctgtcaccccggtgataggtatctacgagcctggggtgctcccccacatcctcaaagatgtgagcccctgactcagcgttgcctctggttcctgaccctccacattcacatgaccacgcgctggcctttatcatcgccagtgacagcagctctcccgtaaatacaagtttcaagcaccccactttccagtctctgccttctgtctttccagttcattccctctagtcctccacccacacagtgcttttccccattgacagggaattgctcctggccgcttttcccagccccatcccgttcatgtgccttgctttgtacccagcatggactccatggcctgtcattgtcactccttcacctatacttcctgcctccttgcttctctctctcttcgtcatcctggcatcaccaccccagaactgcttggtttcagttctccaccatggctaggggaacatacctttttgctgactgctctcactttctttttttttttttttcttttttttttttttgacacagagtctcgctctgttgcccaggctggagtgcagtggcacactctcagctcactgcaacctccacctccggggttcaagcagttctctctgcctcagcctcctgagtagctggtattataggcacccgccaccacacccggctaatttttgtattttttttagtacagacagggttttgccatggtggccaggctggtcttgaactcctgacctcaggtgatatgcctgccttggcctcccaaagtgctgggattacaggcatgaaccaccctgcccggccctattgctctcactttgaaatcacgacatgagccacagtgagcctatgatgtggtttgacgtctttctgcatttctctgttcacccctctcccagaaggcatgcctccttccctcccctcagcctgcagccccttcccctccacgcttactctcagctgatagccctgctgctgtctcgctgagaaaatagaaatagccagaggagaattccctctaccccatgcacacacctctgtccccgcctactccacattccctgttgtcagcaccgatgtgtttagctgagggtggtccccccattcaaggccatcatctcctgtcatctacttcttgacaccatttgaacaattatctcccctctttcctacataacactttccccttttctactatatattttttgctatggattgaaagtatccccccgaaatcatatgttgaagccccaatccctcgtgtgatggtattaggaggtagagcactatgggggtgattaggtcatgaggatggagccctcatgaatgggattagtgcccttagacgaagaggcaagaaagagatgatctgtctctgccatgtgagggcacaacgagaagatagccatctgcaaaccaggaagtgaaccctcatcaggaactctatcagccagcaccttgatcatagacttcctagcctctagaactgtgagaaataaaggttgtttaagcctcccagtctgtagttttctgttataatgtcctgacctaagttattttccatcgctatacaatgggttatttttttctttaaaaaaaaattatttcttgactctactttttcctccagagactgcttatattccactgtcttcattcttctcctcctgttttctctctttaaacttttcaaaaatagcaaaatataacacatatagagaaaatgatatacagctcagtgatttatcacaaacacctgtgtaaccaccactcgaatctagagataggacattacagcaccccagaagccctccttttgtcccctcttcccaaagaagggtaaccaataacttgccttttatgataaaggctttttttttttgagatggagtctcactgtgttgcccaggttggagtgcggtggcgcaatctctgcttactgcaagctctgcctcctgggttcacgccattctcctgcctcagcctcctgagtagctgggactacaggtgcccgccaccacgcccggctaattttttgtattttagtagagacgaggtttcaccgtgttagccaggatggtcttgatctcctgacctcgtgatccacctgcctcagcctcccaaagtgctgggattacaggcgtgagccaccgcccccggccaagataaaggcttttctatctggcttctttgttagcattttgttggcgagattgatacgttttgtgtgcagctgtctgtcattttcattgcaatagaattccattgtctactatatcacagttactcattctactactgatgaaaatttgggttatttctagtttttttggtgcatacatgcatacatttctggtagacatacctagaagtgaactggctgcattatgggccataacttgtcttcaacgttagtaaataataccgcccgtctgttttccaagcagcagtaaatggcactttctgttacttcatatcttctgttacttggtactgtcaggttttaaaattttagtcattctgtcgggtgtctagtagtatgttattgtggttttattttgcatttgcctgattgcaaatgaagttgagcactttttgatacagtgattaaccatttggatatcctcttcagtgaagtatcagctcaattctcttgactatttaaaaaataaagttgtttatctttttcttacagagttttaggaggagttttttggtacatgtgcagtccaaatacacaccttttgtcagtgatacgtgttcagctgcacacacggtgttttgcctttttattcttttaatggtatctattgataaacatgagttcttagttttaatgaagtcaaatttgttcatcttctttacggtgtactttttgtgtcttgtttaaggaagtccttctctatcttaaagctttgagaagcattccttctttctcctattttctaaaaattgttgaagatctccttccttccttccttccttccttccttccttcctttcatctatctctctctcacccaggccaaacttcagtggcatgatcatggctcactgcagcctcaacttcccaggctcaagtgatcctcctgcctcagcctcctgagtagccaggactacaggcacgcaccaccatacctggctaattttaaaaattttttgtagagacacggtctcatcaagttacccaggctggtcttgaactcctgggctcaaacaatcctcccacctcagcctcccaaagtgctgggattacaggcatgagtcacatgtctagcctgtattctttctttcttaaatgtttggaagaattcatgggtaaaaccatgtgaccctggagtttatttgtgggaagcttttaaaacatggattcgatttctttaacaaatataggactatgagattttcatctcatgtcggtttgggtatgttgtgttttcaaggaatttttctattttatcgaagttgtcaaatttgtctgcaggtccccttatttcctttttaatgtatggaggatctgaagggatggtactttgtgttgtctctatttcttgtttggttttgctagtgatttgccaatttaaaaaatctttccaaagaaccaacttttggctttgtttattttttgaaaacctgagtagctgggattacaggcgcccaccaccacacccggctaatttttttatttttagtagaggtggggtttcaccatattggccaggctggtctcgaactcctgacctcagatgatccacccgcctcggcctcccaaagtgctgggattacaagtgtgagccagtgtgcctggcaagccgctttttaaatggcaccaatcccattcatgagggcagagccctgatgatcgaattacctcctaatggccccatttcttaatactatcacactgagaattaagttttaacataagaattttaggaagacacaaacattcagaccatggaacatatataaaacagttgtcctaccaactaacagaatacacattcttttcaagaacacctatataaaaattatagacactgacctatgctggccataaagcaaatatgaacaaatttcagatacctgaagagatttagactatgttctccaactacagtgcaattaagctagaaatcaatagcaaaaatgtaactataaatgagcccgtatgtttgaattttaagcaagatatatgtaaattatctatggttcaaaaaagaagtcacagtgaaatttagaaaatatcttgacgtggcgggttgcagtggctcacgcctgtaatcccagcactgtgggaggccaaggcgggtggatcacctgaggtaaggagtttgagaccagcctggccaacatggtgaaaccctgtctctactaaaaatacaaaacattagccaggcgtggtggtgggcacctgtggtcacagctacttgggaggctgaagcgggagaatcacttgaacccgggaggcagaggttgcagtgagccgagattgcaccactgcactccagcctgggcaacatgagtgaaacttcatctcaaaaaaaaaaaaaaaagaaaagaaaaagaaaatatcttgacccaatgatgatgcaaatactacgtatcaaacttgtaggatgaacttccacttctggccatgacagaggagcctgtatcagactagccttcctatttatatatttatttttgagatggggtgtcgctctgttgcccaggctggagtgcggtggtgcaatctcagctcactgcaacctccacctcctgagttcaagtaattctcctgtcccagccttccaagtagctggaattacaggcgcccaccaccacacccagctagttttttatatttttagtagagacggggtttcaccatgttggccaggctggtctcgacacctgacctcaggtgatccacctgcccctgcctcccaaagtgccgggattacaggtgtgagccactgcgcctggccgtgagtgacctttttaatgtgttgttgaatttgatttgctggtattttgttgagaagttttgcatcaatatccatcagggatactggcctgtagttttctttttttatatgtctttgtctggttttggtgtcagggcaatactggcctcatagaatgagtttggaagttttctctcctctgtttttcataatagtttgagtagggttggtattagtttttgtttaaatgtttggtaaaattaagcagtgaagccactgggtcccaggcttttctttgctgggagacttttcattacagctttgatctcattacttgttattggtctatttaggttttggatttcttcacggttccatcttggtaggttgtgtatgcctaggaatttatccatttcttctagggttttcaatttattggcatataattgttcacagtaacctctaataatcctttgagtttctgtgatattggttgtaatatctcttttgtcatttctgatttttttgtttgggttttctctctttttttgttagtctagttaaagatttattgattttgtttatcttttcaaaaaactttattttgttgatcttttgtattgttttgtttcaatttcatttatttctgctatgatctttattatttcttttcttctactaattttgggtttggtttgctcttttctagttctttaagagacatcattagattattttgaagtttttctacttacttgatgtaggtgcttataggtacaactttcctcttagtacttctttccctgtatctcacaggttttgatatgttgtgtttccattatcatttgtttcaggatgtttttaaatttccttcttaatttcttcattgaccattcaagagcatattatttcatttccatgtgttcgtatggtgtgcaaaataccttgtttttgatttgtagttttatttcattgtgatcacagaagatacttgatatgatttcaaatttaaaaagtaatttggctgggagaagtggctcatgcttgtaatcccagcgctttgggaggccgaggcaggcagatcacgaggtcaggagatcgagaccatcctggctaacacagtgaaaccccgtctctactaaaaatacaaaaaattagccaggcatggtggcaggtgcctgtagtcccagctactcaggaggctgaggcaggagaatggtgtgaacccgggaggcagagctggtagtgagccgagatcgcgccgctgcactccagcctgggtgacagagcaagactctgtctcaaaaaaaaaataataacaataataataatttaagacttgttttgtggcctaccatatggtctatccttgagaatgatccatatgctgaggagaagaatgtgtattctgcagccgttggatgaaatgttctgtaaatatctaataggttcatctgatctatactgcagactaaggctggtgtttctttgttgattttctgtctggatgaactgtctaatgctgaaagtggagtattgaagtctccagctattattgtattgaggtctatctctctctttagctctaagaatacttcctttatatatctgggtgttccagtgttgagtgcatatgtatttaaaattgttacattatcttgctgaattgacccttttatataatgaccttctttgtctctttttatagtttttgtcttgaagtctgttttgcctcatagaatagcatagctattcctgctcttatttggtttccatttgcatggaatatctttctccatccctttagtttcagtctatgtgtgtctttacaggtaaagtgtgtttcatgtaggcaacagatcactgggtcttgtttttctatccgttctgccactctgtgtcttttgattggagagtttagtccatttatgttcaatgttattactgacaagtaaggacttactcctgccactttattaattattttcttgttgctttgtgatcttctttctttccttcctgttctccttttagtgaaggtgattttctctggtggtatgttttaatttcttgctttttatttttttgtgtgtatctgctgtatgttttttgatttgaggttaacatgaggcttgcaaataatatcttataacctaatattttaaactgatgacaccttaacactgattgcataaacagacaaacaagcaaagagaaaactaataaaaactctacattttaactttgtccccccactttttaacttattgtactgtttatgtctgaaaagttgtagttattatttttgattggttcctcttttagtctttctactcaagatatgagtggtctacatatgacagtgttataatattctatatgtttctgtgtacttgctattaccattaagttctgtactttcaagtgatttcttattgctcattaatgtccttttctttcagattgaaaaactccctttagcatttagcagtatgtgaactgcatttttcaagtccagaatttctgcttgattcttttttttttttttgagatggagtcttgctctgtcgcccaggctggagtgcagtggcgcgatttccgctcactgcaagctctgcctcccgggttcacaccattcttctgcctcagcctcccgagtagctgggattacaggcgcccgccaccacgcctggctaattttttgtatttttagtagagatgggatttcaccatgttagccaggatagtctcgatctcctgaccttgtgatccgcctgccttggccttccgaagtgctgggattacaggcgtgagccactgtgcccagcctgcttgattcttttaaattatttcaatctctttgctaagtttatctgttaggattctgaattccttctctgtgttagcttgaatttcactgagttccctcaaaacagctattttgaattctctgtctgaaaggtcacatatctctgtctctccagaattggccactggtaccttaattagttcatttggtgaggtcatgttttcctgtatggtcttgatgcttgtgatgttcgtcagtgtctgggcattgaagttaggtatttattgtagtctttgcagtctgggcttgtttgtatctgttcttcttaggaagactttccaggtaataaaagggacttgggtattgtgatctaagtttttggtcactgcagccatatctgcattagggggcaccccaagcctactaatactatggctcttgcagactcgtaaaggtaccacttgggtggtcttggataagatctggaagaattctctggattaccaggcagaggctcttgttctcttcccttactttctcccctaaaagtggagtctctctctctgtgctgggccgcctggagctaggagaggggtgacacaggcacctctgtggccactatcactaggactatgctggctcagacctgaagccagcacagcactgggtctcacccaaggcctacagtctccactgcctggctactgcctacgtttgcttaaggcactagggctctacagtcagcaggtggtgaagccagtgagattatgtccttcccttcaaggcagcaagttccccctacccccatcctgggaaggtccttagatgccatctgggaggcagggcctgcagtcagaaaccttagtaatctccccagtgctctattctattacagcctggctgatacccaagccataaggcaaagtccttcctgctcttccctcccctttccacaagcagagaagtctctctccatggccaccactgccccagccctgtggcagtgctgccaggccactgccaacgttcattcagggcctaagggctcttgaagcaactgaacactgccaggcctgggactctccctttagggtagtgggctcccctctgacccagggcaggtccagaactgccaccccacagccaacacttagaatctgggaccccaagagccctcttggtgctctgccacactgtagctgagctggtacctaggctgatttttgctttttatgaaggtacttttttgtgtgtatagttcaatttggttttcctccagggaggacaattggtggaggtttctatttgggcatcttttttttttttttttgagacggagttttgctctttcacccaggctggagtgcagtggcgcgatctcggctcactgcaacctctgcctcctgggttcaagcgattctccagcctcagcctccccagtagctgggattacaggtgcctgccaccatgcttggctactttttttttcaattaaaaagtaaactttaatgtcgaaaatgcaaacttggggaaggcagaaagatcacacacaaggctgtcgcttcacacttggaaggttgcacggcggccaggagaggcactcctcacttcccagacagggcgggggccgggcagaggcgctcctcacttgccagacggggcggcggccacatgcctggctaatttttgtatttttagtagggacggggattctccgtgttggccaggctggtctcaaactcctgacttcaggtgatccacgcacctcggcctcccaaagtgctgggattacaggcatgagccaccgcgcccagccctatttggccatcttgctttgcctccaccttcatttgataacagaacacccccatgtaaccaccaccacaatcaagatataagacatttctgttattctccaaatttccttcaccctcctttatagtccatggcacccaccccatccctgggcaacacctatgtgcttcctttttttttttccccgcaggaggacgtcttcctatacctatgtgcattccatcactgctgcttttaatcatatagcgtgtagtcttatgagtctgactttttcacttagcataatgcttttgcaatttgtgattgagcgttttcatatgattctgttttttctgtctcttagcttggaagttatacactttttagtagtaactgttgggagatcgttctccaagagtctctctcatatttccatacatcctgctagcagagacattgactacctgtttttgtctgtttagtgttgctataaaggaatacctaagtctgagtattatacatagaaaagaggttttatttgtctcatggctcctcaggccatacaagaaacatggtgccagcatcttaccagtgtcacatggcaagaaaggaagtgaggaagagaaaataagttgttaactggttgttaaaaagtgccaggcacgggccaggcacagtggctcgtgcctgtaatcccagcactttgggtggccaaggcgagtggatcacctgaggtcgggagttttgagaccagcctgaccaacatggagaaaccctgtctctactaaaaaaaatacaaaaaaattagctgggcatggtggtgcatgcctgtaatcctagctactcgggaggctgaggcaggagaatttcttgaatccaggaggtggaggttgcagtgagccaagatcacctgggcgacaagagcgaaactctgtctcaaagaaaaaaaaagtgccaggctctttttaacaaccagttcttacaggaactaatagagtgaaaactcactcacccccaccccacagggagggcattcattcatgagggatccacccctatgacccaaacacctcccattagccccccacctccaacattggaatcaaaatttaacatgaggtttggggggcagaaatccaaattatagcactacctttgttccaggctaccttcaaaggatgtttatacagcaaacagccttggaaaatagagttagggtctccttgtagagcacagggtaagtttgcttacttttcagcataatcaagattgtgtcttcttctggagcaaaactttgacaacaacaagcggggcaaagtctgaaaccttttgcacatcttgacagaaccttagagattacgagatttatctctgccttactcaaggtccattagtatcttccagaacaataagttggtcttagaatcctttagctatgtattcccttccaggcttcgatgctgtgtgctgttgttttatttagtttttattttaaacccaacaagacgctataccatcaatacttatttagatccccccacatatttaacttgccatggtgcttcattctttcatgcctctttaagcatccatctaggatcgtgttcattccacatgaagagaaagcttttggcccagcacgatggctcacacctgtaatcccagcactttgggaagcctaggcgggaggatcgcttgagcccaggatttccagaccagcctgggctacgtggcaaaaccctgtctctactgaaaatacaaaaaattagccaggtgtggtggttcacgtccctgctactcgggaggctgaggtgggaggattacttaaacctgggaggttgaggctgcagtgagcgttgattgcaccactgcactccagcgtgggtgacaggagtgagaccatgtctccaaaaaaaaaaaagaaggaaagaaaaagcttttgtatttcctttcgtgtaggtctgctaatgacaaagtctctgggttttttgtttgactagagaaatgttttaattttaaccttattcttgaaggttttgtttttgttttcattttgttttgtgtgctaagtacagaattctcattggcatttatttatttagagacagagtcttgctctgtggcccaggctagagtacagtggcacgatctccgcctcccaggttcaagcgattctcctccctcaacctcctgagtagctggggctacaggcatgcaccactacacctgactaatttttgtatttttagtagagacggggtttcaccgtgttgcccaggctgatctcaaactcctgagctcaagtgatttgcctgccttggcctcccaaagtgctgggattataggcatgagccgccgtgcctggccagcatttattttcttttcagctctttaaggaagtcattccattatctctgggttccattgttgagaagccagctgtcattctaatggttgccctttgaagataacttttttccctctgctattttaaatatttcctccttgtattttattttcaacaggtgtaatgtggcacatatatcagcaattgttatgttacatacaatacatattgtgcaacatatgtatcattatcagttattgctgtgtaacaaactactccagaacacagtggcttataaaaggaatcatttatttagtccttaaatctgcaatttgagcagagctcagtgggaaagcctcagctttactttatatggcaccatataaggtaactcgcaactggcaagttggtgctggctgttggctggtagttcattcagggctcagggcccaggaccaagagtcgtcaccatggcttgcttcagcctccttgaggcatgatggctgggtcccaagagaagagaaatagaaacttccagtctcttaaggcattggtctggaagctgggacggcatcacttttgccatattctgttggtaacgcagttacatcgccagattaaagggtaaagagatacaaattcccactgctcagtgcaaggaatatcagtgattttagggggccctgttttaaaacccctacaaggtgctaagcgtggatttctggggctttcttgttttttgtttttttctatgtgtttttttttttttttttggtggtggggtcagggagggcttatagggtatgttaaatcagcagaataattttatttatttatttggagatggagtttcactcttttgcctaagctggagtgaagtagcgtgatcagagatggagtttcactcttttgcctaagctggagtgaagtagcgtgatctcggctcactgcaacctccgccccgctggttcaagcaattcccctgccttagcctcccaagtagctgggattataggcacccaccgccacgcccggctaatttttatatttttagtagacatggggtttcgccatggctagtctggaattcctgacctcaggtgatccacccaccttggcctcccaaagtggtgggattacaggtatgagccactgtgcctgacctataatgttttttaaaaatcagttttggaaagtttgcagacattaacttttcaaatgtagcttccatttgattctttttctactctgcctctgatcctccacttatgtatgtatgctagatcttttattagatagtctgtgtctcttatgtactctactatattttgtattcttctgtctctccatgctttattctgtttactctttcctgattatattttttaattttgtaatttccatttgatgcttttttgatcattcaaaactcttcaccaaaattctaaatttccttttttaacctctcgaatgttatcacagttactttaaagtctattttggataacttaaatatttacagtcccctcacagatatgtttcttttgtatattgtttctgttggttttctttcatgtcttatctccacatatgcctggtgagttttgattatgtgttggtcattgtatttgcaagtatgctcgtagaaataatctggaatggccgggcgcagtggctcatgcctgtaatcccagcactttgggaggctgaggcaggtggatcacgagatcaggagatcaagaccatcctggctaacatggtgaaaccccatctctactaaaaatacaaaaaattagctgagcatggtggcacgttcctgtaatccctgctactcgggaggctgaggcaggagaatcacttgaaccaggaggcagaggttgcagtgagccgagatcacgccactgcactccagcctgggtgacagagcgagactccgtctcaaaaaaaaaaaaaaaaaaaaaaaaagaaataatctagagcctagtttgatgtttccttacaaagaatgaatttatttttgcttctcccattgcaactaggataacctcagtctagtttctggaactgaaatcacttgaggctgaactgtggtctctgtgagagcgtgtctgtgtatggctcacccttattcctaggctacgtagttctttaggaccctaacccaaagtaagagatgttcatcagggctctcctcttggcagacgcctgggctccagtccctgtgtcctgagccccatgaggctgttactggtgctgctcgtctgcccatcctctccagtaacagccacctgaacactgcaattcctgggtttccatcattccttccagcctggtgagtcatcagtgtcttttgaggtatccagtgcctgccagcagatgttttttaataatttgtccagcatttctggctgtcctcagtaggtggtctgtttcacattccctagtctgctgttaatggaaagtggaagttctgagagagaatcatcgttcccgtcagcattcaaatgcctgattacactttccccattcgctatcctttcctttatttgctcctcaccacagcaaaactcctcaaaaatatctatctttgcaatcttcagattctcacattgtgtccttaaacccactttaatcaggccttggttccctccattccactaaaagtaatgttgtcaaggtcgtgcatgcctccgtgatgctaattccagtgatgagttttcagttgtcattctctgacatatcggcaacacttgatgtggagtaccctgatgttgagaggctggtgagatgaaggaaaaacccagccaagggcaatgaggaatggcttccttccgcctcctccttccctatctttgttgtggtttttgttgtttctgtaacactgattacgttatagtttatttaatgtacttccttattctatgtttttactttagtcattttgttgatctcctccataataacataggctcgggccaagcacagtggctcacgcctgtaatcccagcactttgggagaccaagatgggtggatcacttgaggtgaggagttcgagaccagcctggccaacatggcgaaaccctgtgcctactaaaaatacaaaaattagctgggcgtggtagcaagcgcctgtaatcccagctactagggaggctgaagcaggagaattgcaggagaatcacttgaacccagggggcagaggttgcagtgagctgagatcgcgccactgcactccagcctgggtaacagagtgagactctgtctcaaaaaaaaaaaaaaaaaaaaggcttcaggagggcagagcattttatgcaattgttcattaattgacccctccatttggcacagatcacatgcccagtagttaactgttaatcaacgcactctctgtggaacaacaggctggtcccgttgagccaacactctctgggcactgccttcacta

SEQ ID NO: 15714 - DNA, 52529 bp, Homo sapiens
ggaaacagtgtggatcacaaggaggtgattgagagctactctgcgtctggaagagtgaggaggagcctgtgtggcagaacaaaatggataaggtcgttccagccgtgcagaagtgtggaggtgtgagcctgcaggcaggtggctctggttggatcccaggtgcatgcagggctttggtgagagtgaggctgaaggaagcagctggggactcattctgactaaagaggcatggcaggaggggtctctgaaagtgtcaggctgggggccaggggctgccaccaacagaagagcaaggcaggtatcagggccccatccaatcaggtgagaattcagagcctggctccacaaggaacctgaggcagaggcacccacagcaggtgcttgggctaaatgcagctcagtggccagtgcaggcaccagttttaatacagtggggccattccagattctgagtgcagatggggctgagcagaccgccttccagctggactcgatcaggactgaccctggacggggcaggcttgcacttgtagcttcagagctccactgcaggcacagctgaccagggcagcgggtccactccttggagagctggacagccccacttttgaggtacacggccctggggataccactaatctccacgtaccaataatcaccaagttctgtcagttgtaaaatcccttgacaggattccagatttgtctcagccagcttaagccccagtgtgggcagacctccatcccaggaggatttagtcctttgtcagcagcttcttagctacacgtaagctattctgtggtactttatagtttacaggattttttgttttcttttttttttttttttgagacagagtctcgctctgtcacccaggctggagtacagtgacgcgatctcggcttactgcaagctccgcctcccaggttcacgccattctcctgcctcagcctcccaagtagctgggactacaggcacccgccaccacgcctggctaatattttgtatttttagtagagatggggtttcaccatgttagccaggatggtctcaatctcctgacctcgtgatccgcctgcctcggcctcccaaagtgctgggattacaattttacaggatgtttttaagtatgttgggttagcacattctctgccaatccgtggaggtgggcaaggaaggcagtattccattttatgcatgagaaaatagccttgggatgataagtgattcatcccacttatacacaggaagcagtgaagaaacagaatcagtgtcttctggttcccaattcatttctctgtgctgctgtgttgtttccatgtatgtatgtatgtatttatttttttgagacgttaagtcttgctctgttgcccaggctggagtgcagtggcatgatcttggcttacagcaacctctgcctcctgggttcaagctattcttctgcctcagcctcccgagtagctgagactacaggtgcgtgccaccatacctggctaatttttgtgttttttagtagagacagggtttcactgtgttagccaggatggtcttgaactcctgacctcgtgatctgcctgccttggcctcccaaagtgctgggattacaggcatgagtcaccatgcccggctttgtttgtcttatttctaaattttattgatttatttattttcacagtcatagctctggagtcttttttatcttctcccctctaacctgctcccacccgaacctttccatttcagcagatagcatcattgcaacgggctgtgccagatccagccatcacatccacctttccagccaaagggagggtggaagggcaggatgcagaaggtcaatctccccctcctcagggacatttcatggaagttgcacgcattggccagaacccggtcacatggccacagctaactgcaaaggatgctgggaagtgttgcctgtgttgcagacagccacgtgccagtcgaaaatcagaggttctttctccctccgtcttgctgctggctcgcttctccagaccacagtcattgtgcacgtgtctcctgctgctccggctgtggcctgcactcctctcatcctcttccaagctgctgtcacagcgctgtttccagagggcaaatctgattggtcactcccctgctttactccccaagggcttcctgttttcttttatttttatttttattttcattttttgagatggagtctcgctctgtcgctcaggctggagtgcagtggcacaatgtcagctcactgcaagatctgcctcctgggttcatgccattctcctgcctcagcctcccaagtagctgggactacaggcgcccgccaccacgcccagttaattttttttgtatttttagtagagacggggtttcaccatctactcttagccaggatggtctcgatctcctgaccttgtgatctgcccgcctcagcctcccaaagtgctgggattacaggagtgagccaccgcgcccggccagcttcctgttttcttaacacatcaggtgcttaatgacttaaaagggcccagtgtgatcaagtttctgcctctgtgttctcagctcatgccgccttgtgctcctggcctttgcccaggctcttgctgtggcctggaatactcccctttctttgcctgccttccttcctcttgccctcccctgacctgcaggctggattaggagtttctgctgggcatcccatggcacccgtccctgcactggggatcctgctttcctggtaggccacagaccttgtgaggggagggactgtgtctgttgggttcatgacagtgtgcccagcccccagcaggtgcctggcgtagatcaggtttgtggaacaaatgaatgtgatatattaatttagctttagagtattcattgagggctgctgtgtgccaggccctctgtgccacctgggtggagggtggaggactgttgcattgagggcagttgaaggagtgagctgggaagtgggaggtggaggatggggactgggatgcagggtttgaggttatcaggggtcccagaagcagtaatgccaaggcctaggctgtgacctggagtgagggctgcgatggggtggggtggggtcgaggctgtggaggagggtcatcagggcactgctggagccctggggttctccagggccgggggtggtcattgcagtgttctcccagctcctctcaacaccctgcggtctgtggagagcaggcctggtgcactggacttgcctctggccagggctgagtttctgccttctaaacgatcttcctcctgtgttgccctagaggcctctggactgtcctgagtacttgacgcgtgttagagtgagcatgggctgctagccttccgctccaggtggaggagtttctgttgttcttttgctgctgttgctgcagtgagctgccaggctgagcttctggatggacctgggggatggaattaggagcttctgaattcttgggttgtataacctaaggccggagagtcccacagcactgctgctgggcggagagactggaccctgctgatacagacagcgacagcagcaggagcatctgcagtttcccagcaggtcctgcatgcctgggcttggcactagtctaagtagtaactcatgttatcctcacgacagtcccacgaggtggggtcattactgacctcctattacagatgaggaaacagaggcttgcagaatttgagatcacacagctggtcagcgtagcgattattcagaccctgtcacctggctccagaacccactcgtttacctttcttacatcagggctgctttgtagtgtggcgagctgagtggagctccacccgcctgggctgatcctggcccttcctgcctgacctatggtgcgggggccctggctctccccgtgtgagcccccaggggtcacttgtaatatgcctgtgtacactatgatagcatagatacttctgttcctggtacagattaatcatttacggctggcattgacttgtaacagatgacatttgatgaaatcaaccagcctctcactggtatctcagcagaaacagggctgtacctcccaggcatcctgggaaggatgatagaagtgtgtgatctgtgcttccctaccgggagctgacttttgaggctctctggactgggactttgccataaaactgcttatcagaaacctcagataagtggagtgccctgtgtcctggccacgtactctggggccagctcctccatccattcagtcctcccacatcccatcttcaccaagcagagtggaaagcggcaggtctctgcgagaaaaggaggctctgtacccagccttcagtgagataactttagagtggggccttgtattccctacacaggccttgtccccgacacggcctctttgcccttgcttctccttctgctaagaatgctccttcccaactccttggctggacacacggctcctgctctgtgggcctgtcctgttcccactcagagcctcagcaccccccatgtggccaagacacagcccctcttgccttaggttgccgtgggtctgtttccacatctgtttcccctccagactgcagggctcctgagggacagggcctggggccaagtctcctctgcgttcctgatgcctggtggtgtgccacgctctccgtgggtgcacggtaaatatctgccgagtggctagatgtatccatggttgctgaaggccaagtgtgttgaccagagggcgtgggaaaggctccactggggtggctggggtagagatagaccttaaggggtccagaagactccaccagctggagggaaaggccctacagagacaaggtactaggaaaggcccagaggacagaggaggggccctgtggggagcctgtgggcaggaagggcctgtgctgggctttgaaactggggactcaggtactgctctagcgtgagggtccttggcattttttttggtccaggaccccctgaggtccctggggaatgagaacaggctcacacagccactttcaagaggtttgcaggtcccctgaggcttagccacagacccctcccaccccagcagagacacagcagaggcttctgagtggaggccaggtggcttcagcctggggttctagaagggagggaagagacacacccccgtgtgtcctccagagcctcagccttctccctgaatctcccctttgcctcctcactgtaacccacacctggctctccttgaaggacccgcttgccccgcagcctcctgagagttttctctcccagtccctctcccactgggcctggaggtggggtagggtcctccttgcccccagccttgaatcttctgtcaccctacaataccacttgctgtcaccccggtgataggtatctacgagcctggggtgctcccccacatcctcaaagatgtgagcccctgactcagcgttgcctctggttcctgaccctccacattcacatgaccacgcgctggcctttatcatcgccagtgacagcagctctcccgtaaatacaagtttcaagcaccccactttccagtctctgccttctgtctttccagttcattccctctagtcctccacccacacagtgcttttccccattgacagggaattgctcctggccgcttttcccagccccatcccgttcatgtgccttgctttgtacccagcatggactccatggcctgtcattgtcactccttcacctatacttcctgcctccttgcttctctctctcttcgtcatcctggcatcaccaccccagaactgcttggtttcagttctccaccatggctaggggaacatacctttttgctgactgctctcactttctttttttttttttttcttttttttttttttgacacagagtctcgctctgttgcccaggctggagtgcagtggcacactctcagctcactgcaacctccacctccggggttcaagcagttctctctgcctcagcctcctgagtagctggtattataggcacccgccaccacacccggctaatttttgtattttttttagtacagacagggttttgccatggtggccaggctggtcttgaactcctgacctcaggtgatatgcctgccttggcctcccaaagtgctgggattacaggcatgaaccaccctgcccggccctattgctctcactttgaaatcacgacatgagccacagtgagcctatgatgtggtttgacgtctttctgcatttctctgttcacccctctcccagaaggcatgcctccttccctcccctcagcctgcagccccttcccctccacgcttactctcagctgatagccctgctgctgtctcgctgagaaaatagaaatagccagaggagaattccctctaccccatgcacacacctctgtccccgcctactccacattccctgttgtcagcaccgatgtgtttagctgagggtggtccccccattcaaggccatcatctcctgtcatctacttcttgacaccatttgaacaattatctcccctctttcctacataacactttccccttttctactatatattttttgctatggattgaaagtatccccccgaaatcatatgttgaagccccaatccctcgtgtgatggtattaggaggtagagcactatgggggtgattaggtcatgaggatggagccctcatgaatgggattagtgcccttagacgaagaggcaagaaagagatgatctgtctctgccatgtgagggcacaacgagaagatagccatctgcaaaccaggaagtgaaccctcatcaggaactctatcagccagcaccttgatcatagacttcctagcctctagaactgtgagaaataaaggttgtttaagcctcccagtctgtagttttctgttataatgtcctgacctaagttattttccatcgctatacaatgggttatttttttctttaaaaaaaaattatttcttgactctactttttcctccagagactgcttatattccactgtcttcattcttctcctcctgttttctctctttaaacttttcaaaaatagcaaaatataacacatatagagaaaatgatatacagctcagtgatttatcacaaacacctgtgtaaccaccactcgaatctagagataggacattacagcaccccagaagccctccttttgtcccctcttcccaaagaagggtaaccaataacttgccttttatgataaaggctttttttttttgagatggagtctcactgtgttgcccaggttggagtgcggtggcgcaatctctgcttactgcaagctctgcctcctgggttcacgccattctcctgcctcagcctcctgagtagctgggactacaggtgcccgccaccacgcccggctaattttttgtattttagtagagacgaggtttcaccgtgttagccaggatggtcttgatctcctgacctcgtgatccacctgcctcagcctcccaaagtgctgggattacaggcgtgagccaccgcccccggccaagataaaggcttttctatctggcttctttgttagcattttgttggcgagattgatacgttttgtgtgcagctgtctgtcattttcattgcaatagaattccattgtctactatatcacagttactcattctactactgatgaaaatttgggttatttctagtttttttggtgcatacatgcatacatttctggtagacatacctagaagtgaactggctgcattatgggccataacttgtcttcaacgttagtaaataataccgcccgtctgttttccaagcagcagtaaatggcactttctgttacttcatatcttctgttacttggtactgtcaggttttaaaattttagtcattctgtcgggtgtctagtagtatgttattgtggttttattttgcatttgcctgattgcaaatgaagttgagcactttttgatacagtgattaaccatttggatatcctcttcagtgaagtatcagctcaattctcttgactatttaaaaaataaagttgtttatctttttcttacagagttttaggaggagttttttggtacatgtgcagtccaaatacacaccttttgtcagtgatacgtgttcagctgcacacacggtgttttgcctttttattcttttaatggtatctattgataaacatgagttcttagttttaatgaagtcaaatttgttcatcttctttacggtgtactttttgtgtcttgtttaaggaagtccttctctatcttaaagctttgagaagcattccttctttctcctattttctaaaaattgttgaagatctccttccttccttccttccttccttccttccttcctttcatctatctctctctcacccaggccaaacttcagtggcatgatcatggctcactgcagcctcaacttcccaggctcaagtgatcctcctgcctcagcctcctgagtagccaggactacaggcacgcaccaccatacctggctaattttaaaaattttttgtagagacacggtctcatcaagttacccaggctggtcttgaactcctgggctcaaacaatcctcccacctcagcctcccaaagtgctgggattacaggcatgagtcacatgtctagcctgtattctttctttcttaaatgtttggaagaattcatgggtaaaaccatgtgaccctggagtttatttgtgggaagcttttaaaacatggattcgatttctttaacaaatataggactatgagattttcatctcatgtcggtttgggtatgttgtgttttcaaggaatttttctattttatcgaagttgtcaaatttgtctgcaggtccccttatttcctttttaatgtatggaggatctgaagggatggtactttgtgttgtctctatttcttgtttggttttgctagtgatttgccaatttaaaaaatctttccaaagaaccaacttttggctttgtttattttttgaaaacctgagtagctgggattacaggcgcccaccaccacacccggctaatttttttatttttagtagaggtggggtttcaccatattggccaggctggtctcgaactcctgacctcagatgatccacccgcctcggcctcccaaagtgctgggattacaagtgtgagccagtgtgcctggcaagccgctttttaaatggcaccaatcccattcatgagggcagagccctgatgatcgaattacctcctaatggccccatttcttaatactatcacactgagaattaagttttaacataagaattttaggaagacacaaacattcagaccatggaacatatataaaacagttgtcctaccaactaacagaatacacattcttttcaagaacacctatataaaaattatagacactgacctatgctggccataaagcaaatatgaacaaatttcagatacctgaagagatttagactatgttctccaactacagtgcaattaagctagaaatcaatagcaaaaatgtaactataaatgagcccgtatgtttgaattttaagcaagatatatgtaaattatctatggttcaaaaaagaagtcacagtgaaatttagaaaatatcttgacgtggcgggttgcagtggctcacgcctgtaatcccagcactgtgggaggccaaggcgggtggatcacctgaggtaaggagtttgagaccagcctggccaacatggtgaaaccctgtctctactaaaaatacaaaacattagccaggcgtggtggtgggcacctgtggtcacagctacttgggaggctgaagcgggagaatcacttgaacccgggaggcagaggttgcagtgagccgagattgcaccactgcactccagcctgggcaacatgagtgaaacttcatctcaaaaaaaaaaaaaaaagaaaagaaaaagaaaatatcttgacccaatgatgatgcaaatactacgtatcaaacttgtaggatgaacttccacttctggccatgacagaggagcctgtatcagactagccttcctatttatatatttatttttgagatggggtgtcgctctgttgcccaggctggagtgcggtggtgcaatctcagctcactgcaacctccacctcctgagttcaagtaattctcctgtcccagccttccaagtagctggaattacaggcgcccaccaccacacccagctagttttttatatttttagtagagacggggtttcaccatgttggccaggctggtctcgacacctgacctcaggtgatccacctgcccctgcctcccaaagtgccgggattacaggtgtgagccactgcgcctggccgtgagtgacctttttaatgtgttgttgaatttgatttgctggtattttgttgagaagttttgcatcaatatccatcagggatactggcctgtagttttctttttttatatgtctttgtctggttttggtgtcagggcaatactggcctcatagaatgagtttggaagttttctctcctctgtttttcataatagtttgagtagggttggtattagtttttgtttaaatgtttggtaaaattaagcagtgaagccactgggtcccaggcttttctttgctgggagacttttcattacagctttgatctcattacttgttattggtctatttaggttttggatttcttcacggttccatcttggtaggttgtgtatgcctaggaatttatccatttcttctagggttttcaatttattggcatataattgttcacagtaacctctaataatcctttgagtttctgtgatattggttgtaatatctcttttgtcatttctgatttttttgtttgggttttctctctttttttgttagtctagttaaagatttattgattttgtttatcttttcaaaaaactttattttgttgatcttttgtattgttttgtttcaatttcatttatttctgctatgatctttattatttcttttcttctactaattttgggtttggtttgctcttttctagttctttaagagacatcattagattattttgaagtttttctacttacttgatgtaggtgcttataggtacaactttcctcttagtacttctttccctgtatctcacaggttttgatatgttgtgtttccattatcatttgtttcaggatgtttttaaatttccttcttaatttcttcattgaccattcaagagcatattatttcatttccatgtgttcgtatggtgtgcaaaataccttgtttttgatttgtagttttatttcattgtgatcacagaagatacttgatatgatttcaaatttaaaaagtaatttggctgggagaagtggctcatgcttgtaatcccagcgctttgggaggccgaggcaggcagatcacgaggtcaggagatcgagaccatcctggctaacacagtgaaaccccgtctctactaaaaatacaaaaaattagccaggcatggtggcaggtgcctgtagtcccagctactcaggaggctgaggcaggagaatggtgtgaacccgggaggcagagctggtagtgagccgagatcgcgccgctgcactccagcctgggtgacagagcaagactctgtctcaaaaaaaaaataataacaataataataatttaagacttgttttgtggcctaccatatggtctatccttgagaatgatccatatgctgaggagaagaatgtgtattctgcagccgttggatgaaatgttctgtaaatatctaataggttcatctgatctatactgcagactaaggctggtgtttctttgttgattttctgtctggatgaactgtctaatgctgaaagtggagtattgaagtctccagctattattgtattgaggtctatctctctctttagctctaagaatacttcctttatatatctgggtgttccagtgttgagtgcatatgtatttaaaattgttacattatcttgctgaattgacccttttatataatgaccttctttgtctctttttatagtttttgtcttgaagtctgttttgcctcatagaatagcatagctattcctgctcttatttggtttccatttgcatggaatatctttctccatccctttagtttcagtctatgtgtgtctttacaggtaaagtgtgtttcatgtaggcaacagatcactgggtcttgtttttctatccgttctgccactctgtgtcttttgattggagagtttagtccatttatgttcaatgttattactgacaagtaaggacttactcctgccactttattaattattttcttgttgctttgtgatcttctttctttccttcctgttctccttttagtgaaggtgattttctctggtggtatgttttaatttcttgctttttatttttttgtgtgtatctgctgtatgttttttgatttgaggttaacatgaggcttgcaaataatatcttataacctaatattttaaactgatgacaccttaacactgattgcataaacagacaaacaagcaaagagaaaactaataaaaactctacattttaactttgtccccccactttttaacttattgtactgtttatgtctgaaaagttgtagttattatttttgattggttcctcttttagtctttctactcaagatatgagtggtctacatatgacagtgttataatattctatatgtttctgtgtacttgctattaccattaagttctgtactttcaagtgatttcttattgctcattaatgtccttttctttcagattgaaaaactccctttagcatttagcagtatgtgaactgcatttttcaagtccagaatttctgcttgattcttttttttttttttgagatggagtcttgctctgtcgcccaggctggagtgcagtggcgcgatttccgctcactgcaagctctgcctcccgggttcacaccattcttctgcctcagcctcccgagtagctgggattacaggcgcccgccaccacgcctggctaattttttgtatttttagtagagatgggatttcaccatgttagccaggatagtctcgatctcctgaccttgtgatccgcctgccttggccttccgaagtgctgggattacaggcgtgagccactgtgcccagcctgcttgattcttttaaattatttcaatctctttgctaagtttatctgttaggattctgaattccttctctgtgttagcttgaatttcactgagttccctcaaaacagctattttgaattctctgtctgaaaggtcacatatctctgtctctccagaattggccactggtaccttaattagttcatttggtgaggtcatgttttcctgtatggtcttgatgcttgtgatgttcgtcagtgtctgggcattgaagttaggtatttattgtagtctttgcagtctgggcttgtttgtatctgttcttcttaggaagactttccaggtaataaaagggacttgggtattgtgatctaagtttttggtcactgcagccatatctgcattagggggcaccccaagcctactaatactatggctcttgcagactcgtaaaggtaccacttgggtggtcttggataagatctggaagaattctctggattaccaggcagaggctcttgttctcttcccttactttctcccctaaaagtggagtctctctctctgtgctgggccgcctggagctaggagaggggtgacacaggcacctctgtggccactatcactaggactatgctggctcagacctgaagccagcacagcactgggtctcacccaaggcctacagtctccactgcctggctactgcctacgtttgcttaaggcactagggctctacagtcagcaggtggtgaagccagtgagattatgtccttcccttcaaggcagcaagttccccctacccccatcctgggaaggtccttagatgccatctgggaggcagggcctgcagtcagaaaccttagtaatctccccagtgctctattctattacagcctggctgatacccaagccataaggcaaagtccttcctgctcttccctcccctttccacaagcagagaagtctctctccatggccaccactgccccagccctgtggcagtgctgccaggccactgccaacgttcattcagggcctaagggctcttgaagcaactgaacactgccaggcctgggactctccctttagggtagtgggctcccctctgacccagggcaggtccagaactgccaccccacagccaacacttagaatctgggaccccaagagccctcttggtgctctgccacactgtagctgagctggtacctaggctgatttttgctttttatgaaggtacttttttgtgtgtatagttcaatttggttttcctccagggaggacaattggtggaggtttctatttgggcatcttttttttttttttttgagacggagttttgctctttcacccaggctggagtgcagtggcgcgatctcggctcactgcaacctctgcctcctgggttcaagcgattctccagcctcagcctccccagtagctgggattacaggtgcctgccaccatgcttggctactttttttttcaattaaaaagtaaactttaatgtcgaaaatgcaaacttggggaaggcagaaagatcacacacaaggctgtcgcttcacacttggaaggttgcacggcggccaggagaggcactcctcacttcccagacagggcgggggccgggcagaggcgctcctcacttgccagacggggcggcggccacatgcctggctaatttttgtatttttagtagggacggggattctccgtgttggccaggctggtctcaaactcctgacttcaggtgatccacgcacctcggcctcccaaagtgctgggattacaggcatgagccaccgcgcccagccctatttggccatcttgctttgcctccaccttcatttgataacagaacacccccatgtaaccaccaccacaatcaagatataagacatttctgttattctccaaatttccttcaccctcctttatagtccatggcacccaccccatccctgggcaacacctatgtgcttcctttttttttttccccgcaggaggacgtcttcctatacctatgtgcattccatcactgctgcttttaatcatatagcgtgtagtcttatgagtctgactttttcacttagcataatgcttttgcaatttgtgattgagcgttttcatatgattctgttttttctgtctcttagcttggaagttatacactttttagtagtaactgttgggagatcgttctccaagagtctctctcatatttccatacatcctgctagcagagacattgactacctgtttttgtctgtttagtgttgctataaaggaatacctaagtctgagtattatacatagaaaagaggttttatttgtctcatggctcctcaggccatacaagaaacatggtgccagcatcttaccagtgtcacatggcaagaaaggaagtgaggaagagaaaataagttgttaactggttgttaaaaagtgccaggcacgggccaggcacagtggctcgtgcctgtaatcccagcactttgggtggccaaggcgagtggatcacctgaggtcgggagttttgagaccagcctgaccaacatggagaaaccctgtctctactaaaaaaaatacaaaaaaattagctgggcatggtggtgcatgcctgtaatcctagctactcgggaggctgaggcaggagaatttcttgaatccaggaggtggaggttgcagtgagccaagatcacctgggcgacaagagcgaaactctgtctcaaagaaaaaaaaagtgccaggctctttttaacaaccagttcttacaggaactaatagagtgaaaactcactcacccccaccccacagggagggcattcattcatgagggatccacccctatgacccaaacacctcccattagccccccacctccaacattggaatcaaaatttaacatgaggtttggggggcagaaatccaaattatagcactacctttgttccaggctaccttcaaaggatgtttatacagcaaacagccttggaaaatagagttagggtctccttgtagagcacagggtaagtttgcttacttttcagcataatcaagattgtgtcttcttctggagcaaaactttgacaacaacaagcggggcaaagtctgaaaccttttgcacatcttgacagaaccttagagattacgagatttatctctgccttactcaaggtccattagtatcttccagaacaataagttggtcttagaatcctttagctatgtattcccttccaggcttcgatgctgtgtgctgttgttttatttagtttttattttaaacccaacaagacgctataccatcaatacttatttagatccccccacatatttaacttgccatggtgcttcattctttcatgcctctttaagcatccatctaggatcgtgttcattccacatgaagagaaagcttttggcccagcacgatggctcacacctgtaatcccagcactttgggaagcctaggcgggaggatcgcttgagcccaggatttccagaccagcctgggctacgtggcaaaaccctgtctctactgaaaatacaaaaaattagccaggtgtggtggttcacgtccctgctactcgggaggctgaggtgggaggattacttaaacctgggaggttgaggctgcagtgagcgttgattgcaccactgcactccagcgtgggtgacaggagtgagaccatgtctccaaaaaaaaaaaagaaggaaagaaaaagcttttgtatttcctttcgtgtaggtctgctaatgacaaagtctctgggttttttgtttgactagagaaatgttttaattttaaccttattcttgaaggttttgtttttgttttcattttgttttgtgtgctaagtacagaattctcattggcatttatttatttagagacagagtcttgctctgtggcccaggctagagtacagtggcacgatctccgcctcccaggttcaagcgattctcctccctcaacctcctgagtagctggggctacaggcatgcaccactacacctgactaatttttgtatttttagtagagacggggtttcaccgtgttgcccaggctgatctcaaactcctgagctcaagtgatttgcctgccttggcctcccaaagtgctgggattataggcatgagccgccgtgcctggccagcatttattttcttttcagctctttaaggaagtcattccattatctctgggttccattgttgagaagccagctgtcattctaatggttgccctttgaagataacttttttccctctgctattttaaatatttcctccttgtattttattttcaacaggtgtaatgtggcacatatatcagcaattgttatgttacatacaatacatattgtgcaacatatgtatcattatcagttattgctgtgtaacaaactactccagaacacagtggcttataaaaggaatcatttatttagtccttaaatctgcaatttgagcagagctcagtgggaaagcctcagctttactttatatggcaccatataaggtaactcgcaactggcaagttggtgctggctgttggctggtagttcattcagggctcagggcccaggaccaagagtcgtcaccatggcttgcttcagcctccttgaggcatgatggctgggtcccaagagaagagaaatagaaacttccagtctcttaaggcattggtctggaagctgggacggcatcacttttgccatattctgttggtaacgcagttacatcgccagattaaagggtaaagagatacaaattcccactgctcagtgcaaggaatatcagtgattttagggggccctgttttaaaacccctacaaggtgctaagcgtggatttctggggctttcttgttttttgtttttttctatgtgtttttttttttttttttggtggtggggtcagggagggcttatagggtatgttaaatcagcagaataattttatttatttatttggagatggagtttcactcttttgcctaagctggagtgaagtagcgtgatcagagatggagtttcactcttttgcctaagctggagtgaagtagcgtgatctcggctcactgcaacctccgccccgctggttcaagcaattcccctgccttagcctcccaagtagctgggattataggcacccaccgccacgcccggctaatttttatatttttagtagacatggggtttcgccatggctagtctggaattcctgacctcaggtgatccacccaccttggcctcccaaagtggtgggattacaggtatgagccactgtgcctgacctataatgttttttaaaaatcagttttggaaagtttgcagacattaacttttcaaatgtagcttccatttgattctttttctactctgcctctgatcctccacttatgtatgtatgctagatcttttattagatagtctgtgtctcttatgtactctactatattttgtattcttctgtctctccatgctttattctgtttactctttcctgattatattttttaattttgtaatttccatttgatgcttttttgatcattcaaaactcttcaccaaaattctaaatttccttttttaacctctcgaatgttatcacagttactttaaagtctattttggataacttaaatatttacagtcccctcacagatatgtttcttttgtatattgtttctgttggttttctttcatgtcttatctccacatatgcctggtgagttttgattatgtgttggtcattgtatttgcaagtatgctcgtagaaataatctggaatggccgggcgcagtggctcatgcctgtaatcccagcactttgggaggctgaggcaggtggatcacgagatcaggagatcaagaccatcctggctaacatggtgaaaccccatctctactaaaaatacaaaaaattagctgagcatggtggcacgttcctgtaatccctgctactcgggaggctgaggcaggagaatcacttgaaccaggaggcagaggttgcagtgagccgagatcacgccactgcactccagcctgggtgacagagcgagactccgtctcaaaaaaaaaaaaaaaaaaaaaaaaagaaataatctagagcctagtttgatgtttccttacaaagaatgaatttatttttgcttctcccattgcaactaggataacctcagtctagtttctggaactgaaatcacttgaggctgaactgtggtctctgtgagagcgtgtctgtgtatggctcacccttattcctaggctacgtagttctttaggaccctaacccaaagtaagagatgttcatcagggctctcctcttggcagacgcctgggctccagtccctgtgtcctgagccccatgaggctgttactggtgctgctcgtctgcccatcctctccagtaacagccacctgaacactgcaattcctgggtttccatcattccttccagcctggtgagtcatcagtgtcttttgaggtatccagtgcctgccagcagatgttttttaataatttgtccagcatttctggctgtcctcagtaggtggtctgtttcacattccctagtctgctgttaatggaaagtggaagttctgagagagaatcatcgttcccgtcagcattcaaatgcctgattacactttccccattcgctatcctttcctttatttgctcctcaccacagcaaaactcctcaaaaatatctatctttgcaatcttcagattctcacattgtgtccttaaacccactttaatcaggccttggttccctccattccactaaaagtaatgttgtcaaggtcgtgcatgcctccgtgatgctaattccagtgatgagttttcagttgtcattctctgacatatcggcaacacttgatgtggagtaccctgatgttgagaggctggtgagatgaaggaaaaacccagccaagggcaatgaggaatggcttccttccgcctcctccttccctatctttgttgtggtttttgttgtttctgtaacactgattacgttatagtttatttaatgtacttccttattctatgtttttactttagtcattttgttgatctcctccataataacataggctcgggccaagcacagtggctcacgcctgtaatcccagcactttgggagaccaagatgggtggatcacttgaggtgaggagttcgagaccagcctggccaacatggcgaaaccctgtgcctactaaaaatacaaaaattagctgggcgtggtagcaagcgcctgtaatcccagctactagggaggctgaagcaggagaattgcaggagaatcacttgaacccagggggcagaggttgcagtgagctgagatcgcgccactgcactccagcctgggtaacagagtgagactctgtctcaaaaaaaaaaaaaaaaaaaaggcttcaggagggcagagcattttatgcaattgttcattaattgacccctccatttggcacagatcacatgcccagtagttaactgttaatcaacgcactctctgtggaacaacaggctggtcccgttgagccaacactctctgggcactgccttcactagactctggctggctgctgcgcttgtagaggtatgcaagacaaaaccttttggtatgttaaaagccctggtcagaactttaagtaaccatcactgacatataatggttatggttttgaaagtgcttttatagtggtttttcatctgtcctcacagcacctctgggaggtaggtaggacaggtacagttagtctcatgtttcaaatggggctcagagagggaaaaggatttcccaagatcacacagcaccttagtagcaaaacttggactcaacctcaacacttaaaaatgaacaaagctggccgggcgcagtggctcatgcctgtaatcctagcactttgggaggcccaggcaggcaggtcacctgaggccaggagtttaagatcagcctggccaacatgacaaaactctgtctcttctaaaaatacaaaaaattagccgggcatggtggcgggtgcctgtaatcccagctactcaggaggctgaggcaggagaatcacttgaacctgggagatggaggctgcagtgagccgagatcgtgccattgtactccagcctgggcaacaagaatgaaactccatctcaaaaaaaaaaaaaagaaaagaaaagaaaaagaaaagtttccctttttttaaatatctcattttaatgactgcataatagtttattacatagttataccataatttatataatattttgttgctgtacatttaggttaaacaatacttacttagttcctactatgaagaggggccaagtactcgaggctggagctctcacatgtggcaatgaaattagaaagtggatatggcagggctgtggtaaaataaaatataaaaataataaatgatattaccaaagaaaaggaaagtttttcaaaataaaggaaaatctagacaagcatagtggctcacacctgtaatcccagtacttttggaggctgaggcaggaggaacacttgaggccaggagttcaagaccagcctgggcaacatagcaagaccccctgtcaacaaaaataaaaaaaaattaggccaggcacagtggctcacggtggctagtgcctgaaatcctagcactttgagaggctgaggggggtggattgcctgagctcaggagttcgagaccagcctgggcaacatggccaaaccccatctctactaaaaacacaaaaaattagccaggtgtggcagcacacgcctttaatcccagctactctggagactgaggtaggagaattgcttgaacccgggaggtgaaggtcgcagtgaggtgagattacaacactgcactccagcctgggtgacaaaatgagactctatctcaaaaaaaaaaaaaattagctgggcatggtggtgcatgcctgtaatcccagctactcaggaactaaggtaggaggatcccttcagcccaggaattcgaagatgcagtgagtcatgatcacaccaccgcaccccagcctgggttacagagcaagaccttgtctctaaaaaacaaagaaagtctaacctaaacgccattatgtcatttacatgtgtataggggtgtgtgtgtgtgtgtgtgtgtgtgtgtgtgtgtgtgtgtgtgtgtgtgtttgcttgggaggggagtcgggctggagctggccaggccgcagcctggggaccttctgattccagcagggatgtgggccgagggtcccgccttactcatttcgggtcttgctcctctgtcctggctctacagactcttccagctggagttggaggctgacgccctagtgaatttccatcagtattcttcccagctgctacccttctatgagagctcccctcaggtcctgcacactgaggtcctgcagcacctgaccgacctcatccgtaaccaccccagctggtcagtggcccacctggctgtggagctagggatccgcgagtgcttccatcacagccgtatcatcaggtgagcaagggaacaagaccatttggacaacgtgtgtgtacctgcttgtgtgggcagtgggggccgcaggcctcggttcccctccatagtttgacttaaaaaggagcagggcctggcatggtcgctcactaacgcagtcccagcactttgggaggctgaggagggaggatcacttgagactaggagttcaagaccagcctggcaaaatagcaagaccttgtctctacgaaaaaattaaaaaattagcatgtgtctatactcctagctacttgggatgctgaggcaggaggattgcttgagcccaggagttagagtttacagtgagctatgattgcaccactgcacttcagcctgggtgacagaatgagaccttgtctctaggaaaaaaaaaaaaaaaaaaaaaaaggtgctgcgttgctaccagattaaaatgtaagaaggacaatgtaatgtttccagagtccggagtgctcaccaggtgccaggtctgtgggagctgatttctacccaccatgaaattgaattttcccaacccccacaaggtatcgtcattttattttactttattttattttattttattttattttattttattttattttatgttacgttatgttattttattttgagacggagtcttattctgtcacccaggctggagtgcagtggcgcgatcttggctcactgcaccctctgcctcctgggttcaggtgattctcctgcctcagcctccggaatagctgggattacagtaatgtgccatcatgcccgggtaattttttttttttttttttttttttttgagacggagtctcgctctgtcgcccaggctggagtgcagtggcgcgatctcggctcactgcaagctccgcctcccgggttcacgccattctcctgcctcagcctcccgcgtagctgggactacaggcgcccgccaccacgcccggctaatttttttgtgttttttagtagagacggggtttcaccatgttggccaggttggtctcgaactcctaacctcaggtgatctgccctccttggcctcccaaagtgccgggattacaggcgtgagccaccatgcccggcccaggtatcatcattctagagagagctaacaggacttgtgcaggtcactcagccagagagggtgaaagaggggcttggatccttggtgtctgcccaggctgctcttctggaagctgaaggcctccttttgtgaatccattcagccagcagatggagcagctgttgcccctggtgagggcactgtccccacccttgcacagggcaccagttggccatcttgtgcagaggtagccacacctcctctgagtctctatcctagatagctcagttaagctcccaggcccagaactcaaaacctcactgctggccgggcgtggtggctcacacctgtaatcccagcactttgtgaggccgaggcgggtgtatcacttgaggtcaggagtttgagaccagcctggccaacgtggtgaaaccccgtctctactaaaaatacaaaaaattagcaaggcgtggtggcgcacgcctgtaatcccagctactcgggaggctgaggcaggagaattgcttgaacccagaggcggaggttgcagtgagccgagattgtgtcactgcattacagcctgggcaacaagagtgaaactccacctcaaaaaaacaaaacaaaacaaaaaccctcactgcactttagtttccaggcgtgcttttggacagcactgtctcatctcaccatcactctgtccatttcctggggcaggcacagcagcttgtgtcgataaggatattgacgcccagaaaggttaagtgaattgcctgaggctagtgagatatccgtgttctgtgaccctttcctgtgccaccaccctgcccacttcctgctggtgtggccctggggcccatctcttgtacgagtgagcaaactgaacagaaacctgatacaggtcacatcagatataattacattcaaatcagcccaactagctgagtggcgggaatgctcttgagctcaaataaaccagaaagtccgagtttccgagtgcacttccctgcatgtgcacttaggtccccctgccaccttgtaccacacctgctcacctctgctcaccctggccctctcctgcagctgtgccaattgcgcggagaacgaggagggctgcacacccctgcacctggcctgccgcaagggtgatggggagatcctggtggagctggtgcagtactgccacactcagatggatgtcaccgactacaagggagagaccgtcttccattatgctgtccagggtgacaattctcaggtgctgcaggtgagcagggggaggggcagggtgactggtactgatacctcccggtgtccacggttccctttgggcccctaggctcaggtgtcactctcaggcctctcactgtcccccattggtccttgaggcctgagctccttcatggagggtgcagacccctccctggctcttccctcccagcccttttccaggagccacgtcctcagtctctttgcttgataaacctggggacggcctccaacccagcaaaataaaccccaaaaaaggcccagctccagtcagttagttcagttccacttttcctgagcacaaactgtgagccagatgcctgcctggaggggctcgtgggccagcgggacctgggcttaaccttttgcaagcttgtccaatctgtggccctgcaggctgcatgcagcccaggacggctttgaatgtggcccaacacaaattcacaaactttcttaaaacattatgagatccatgcatggaccttttttttagatcagctgttgttagcgttcatgtattttatgtgtgacccaagacaattcttctgatgtggcccagggaggccaaaatattggacaaccctattttacaggaattcaaaccaagcaaaccaaactgtctccagttcctgtaggcatttgtgccagaggccctcctgttaacgtttttgattacctgggcaaaagatgtgattttttaattgtgggcaagcagatggggtgatactattaaatagctatttcatatattagattgaacagaaaaggcaggatgttggattatgttttattgtctagaattagaaaattcttctaaagatcatgttctctctgccttggcatcagaatgcaactacgttataccagaaaatgtggattcctttttttttttttttttttttttttttgagacagagtttccctatgtctcccaggctagagtgcagtggtgcgatctcggctcactgcaacctccacctcctgggttgaagtgatgctcgtgcctcagcttcctgagtagctgggattacaggcatgtgccaccatgcctgggtagtttccgtatttttagtagggatggggttttgccatgttgcccaggctggtctccaactcctggccttaagtgatccacctgcctcagcctcccaaaatgccgggattacaggtgtgagccactgtgcccggcccagaaaatgtggattcatatcttatgcttcttgctctcagggaagggaattctccacccactgttgaactccactttcaccgagaatcctctgcgcacccagcatggtgccgcgcagaccctgcctccatgcgggggtgtgcacacccgcttctcgatagtcatgcacgactgcagctgtcctttatccggtgctgattggtgcctgaccttgaactgagtgttgtatgtgttccagttaattcttagaatacactcatggggtggaggtcattattcccctttcctctccgaagaaactgaggttcagtgttgttaattaagaagcgtgcccagggagggccacaaagctgagagagtggggcttgaccttacattggcctcgatgccagccctttgctcttcctgctgtgtctctggcctgccttcaggtccagtgggactgctgtgaggtgaccctggtgtcacatgggtacactgtggttgtaatgaacctcatggggacagcactgagccaaaagtgagacagtaaaaccctcctagcactttcttttttttgagacagcatctagctctgtcgcccaggctggagtgcagtggtgtgattgtggctcactgcagcctcaacctcctggactcaggtgatcctcccacctcagcctcctgagcagctgggactacaggctcgtgccaccacatgggctaattttttttttttttgagacggagtcttgctctgtcgcccaggctggagtgcagtggcgcgatcttggctcactgcaagctctgcctcccgggttcatgccatcctcctgcctcagcctccagagtagctgggactacaggcgcccgccaccacacccggctaattttttttgtatttttagtagagacagggtttcaccgtgttcgccaggatggtcttggtctcctgaccttgtgatccgcctgcctcggcctcccaaagtgctgggattacaggcgtgagccaccacacccaggccacgccagctaatttttaaaatttttttggtaaagatggggtctccctatgttgccgaggctggtatcacactcttggtctcaagtgatcctctcacctcccagtgtgttggaattacaagcatgagccactgcgcctggcccctggctctctttttaatactgctgttctttcattgaaaacatagtacctgcatgtagaaaaaaatcagtcaggacagaatgaaaagcaagaatcattcccacctggacccccagtgcccatcctgagatacagctaccttttaagttccttgactcagaaatgtttcatgtgagccacagtcatgccaggtcgaccccttccctcccatccacactggcacttggctttcctggtgcttctctttacgttctttttttttagacagagtttttgctctattgcccaggctagagtgcaatgatgcaatctcagctcactgcaacctctgcctcctgggttcaagcgattctctttcctcaggttcctgagtagctgggattacaggtgcctgccaccatgcccggctaatttttgtatcgttagaagagacgacatttcaccatgttggccaggctggtctcaaactcttgacctcaggtgatccacccaccttggcctcccaaagtgctaggattacaggcatgagccactgcgcccggcctctttacgttcttatcagcatcctatggagtcaaacttcccttcctctttcatcagctccttggaaggaacgcagtggctggcctgaaccaggtgaataaccaagggctgaccccgctgcacctggcctgccagctggggaagcaggagatggtccgcgtgctgctgctgtgcaatgctcggtgcaacatcatgggccccaacggctaccccatccactcggccatgaagttctctcagaaggggtaagacctcctcccctccccatctgctggcctgctgggctccagctctcctgtcacctgtcccgtgcctgaggcaagcagtatccaccatagatcttagcatctccagcctcagagcagaggccccgggttcacaagcctcattaggccccgcctggcccaaagaaggtgctccatcattgtatcatgggtaggaatctcggttcacaagttcagctgtgcaaggaggagactttaaaatttttctggctgggcgcggtgtctcacgcctgtaatcccaacactttgggaggctgaggtgggcagatcacctgaggtcgggagttcgagaccagcctgaccaacatgaagaaaccccatctctactaaaaaatacaaaattagctgggcgtggtgacacatgcctgtaatcccagctacttggaaggctgaggcaggagaatcggttgaacccgggaggcggaggttgcagtgagccgagatcgcaccgttgcactccagcctgggcaataagagcgaaactgtctcaaaaaataaataaataaataaataaataaataaataaaaataaatttatttaatgtaccttaattcctaggagtgaatctccctctataaaactggagacaaccaatcttagccctctttggggtctcctctttccagctcccctccaggtggtgctccagttctggagtctgatgcaaccccaaggcccacctggcccctcctctaacccagcccagcctgatctgaacagccccccgatggcttcagtgctccttggtttcttgtgtgcccagctcaaagcctgggaaatgcttggtaaggtggccgagtgcccgtccacctagatgcctctttcctttctggctggtggcacgttgggaggcaggtacaggctcatgttttgggagcctgggaacccctggtgtcaggaaaattgtcttcaaaggggtaggggatgagataaaaagataaatgaatatctcaaatctcaaaatactatctaggccaggcgcggtggctcacacctgtaatcccagcagtttgggaggccaaggtgggtggatcacctgaagtcaggagttcgagaccagcctgaccaatatggtgaaaccctgtctctactaaaaatacaaaaattagccaggtgtggtggtgtgtgcctgtagtcccagctactcaggaggctgagacaggagaattgtttgaaactgggaggcagaggttgcagtgatttgagattgtgccacagcactccagccagggcgacagaacaagactccatctcaagaaaaaaaatactatctaacaggaacaacatctagaatgaatgaatgagccaatgagtccttcgatcctggcactgtgctaaagcaccagcctcaccgaaatgaataagccactccaggacaggagacaccccagccacccagaatctcatagcgcagtgccagacaagcagtgagaaggcatggacgggcagcactcaggcagggaggctggcacttgtgcctgtcctcaggttgttccttcctctgggagctgcatccaccttgctagccccatggggcattgctagcccttctaagggctggaccaagcctggacaaaccctcctttccttgaatctcccaagcacagccagaatgagctagagctttcagaaatacttgaccaaacagagaagataccaacacccccagccccgcagtcaggttccccatttgcaggttgtgacctgagtggacaccaggtgatgctcttctctacccagagggctggcacatggccccactcttgcttgtctccagccaccctgagctgtactgggcaggagctgtaattgaccagttttctctctcttcaaacaacctcagccctcaccggtccctctgtccccacacaggccatcctgggtgggtccagcgtcccatcacataagaggatctttgcacagaagacaaaggaagaggctcctaccttgagtggagcagggagatcccttatcgacttggcagccagcacagccctactccaagaatcccacggcctcagtgttactgacaagtggttccctcacagctcagactaggagctccctcgctgtttttctttttcttttcttttctttgttttgtttttgagacagagtttcactctgtcacccaggctggagtgcaatggcatgatcttggctcactgcaacctctgcctcccaggttcaactgattctcctgcctcagcctcccaaggagctgggattacaggtgtgcgccactatgcccagctaatttttgtatttttagtagagatggggtttcatcatgttgaccaggctagtcttgaactcctgacctcaggtgatctacttgcctcgccctcccaacatgctgggattacaggcgtgagccaccgcgcctggccacctctgctgtttttcaatgcagctgacctttcccacaaagctcggtttgtgcctgcggttctcagatggttaagcccctgctgaggaagggaaacagataatcccagacagtgagatggaggctgagactgaggatgcctgggggctgcactaggagctcagagacggcatcaggcagctggagttcagggaaggtttgggggcagcagagcccgagccaagccatggacactagccggagctggccactcgggtgaagacttggggggctccagagggcccagggaaagaagctgggcctgactccatgtgcctagtgctgagcaccaagcgctggcataagggctgtagggagctgggcagcataaatcctgggcctgtgctgggcacccctaataatagagaacagcagctgaacactaacgctgtcccagccaccggcttagccttcatgtgggctatttcactatagcccagagagctgatgtattttattccccctctaaagctgagggccaagtgtggtggctcatgcctctaatcccagcactttgggaggctgaggcaggaggatcgcttgagcctaggagtttgaggctacagtgagctatgatcatgccattgccctccagcctgggtgacaaagggaaatcctgtctcaaacaaacaaacaaaaaacagatgaggaaaccagggcttagagagattaagtaatttgctcaaagtcaggcagtcagtaagtgccagacctgggaattaaacccatgtgggctgtcctagtaattgcactaaaaaaaaaaaaaaaaaaaagctttattgagatatagttcctattccatacaatccacctattgaaagtatacaatgattctgatatattatgtttattttttccaactgtgatagattatatataacataaaatttgccattttaaccacttttgttttttgtttttgagacagagtttcgctctcgttgctcaggctggagtgcaatggtgtgatctcggcttaccgttacctccacctcccgggttcaagtgattctcctgcctcagcctcccgagtagtagctgggattacaggcatgcaccaccatgcccagttaattttgtattttttagtagagacagggtttctccatgttggtcaggctggtctcgaactcccgacctcaggtgatccacccaccttggcctcccaaagtgctgggattacaggcgtgagccaccacacccggcccattttaaccacttttaagtgtacaattcggtggttttaatcacatttacaatgttgtccaaccattacccctttctaaaacttttcttatcacctcaaacagaaactgtaaccattaataactcccgattctcccctccccacagcccccgataagtcccatatcctctctgtctctcagaacttgcctgttctagaacctcgtatcagtgaaatcatacagcgtttgtccttttgtgcctggcttatttcacttagcatgatgtcttcaaggctcatccatgttgcagcacgtatcagaatttcctttctttttaaggcagaatactattttgtttatccattcagtccttcactgatagacgcctgggttgtttccaccttttgtctgttgtgaagaatgctgctgtgtacatgggtctgcaaatgtccattcaagtccctgcattccgtcctttgatacttccgacctcaggtgatccgcctgcctcagcctcccaaagtgttgggattacaggcgtgagacaccgcgcccagccagaaaaattttaaagtcttctccttgcacagctgaacttgtgaaccgagattcctacccatgatacaatgatggagcactttctttgggccaggcggggcctaatgaggcttgtgaacccggggcctctgctctgaggctggagatgctaagatctctggtggacactgcttgcctcaggcaccgagtagaaagcaattgtgctctttcccactctgtcatactgcttcctatagcatgcaggtcactgtgtgactcactgacagtgtggtaaggaggtggagggtggctgtgtgccaggcacagaactgggctctgaaatgcctggtcttccttacaccccagccactcctctcagcactctctccatgttgctcagcttctggaggccaccagtgaggaagctggggcttgacttcaagcccatctgactctaaagccagtaccagggagggtgatcattgctggtggcagcatcaggaaggcttcctggaggagggggttagttgtgccttgaggggctcagtacagccttaaccatggtgagtgtgctggttgggtttgctgaactttgtttgcagtgatgctctctgtaagcagtagatgaagctccaagtcctggcttcatcccacgccacgcagaccctagcttctgctcaccaaccggggcccctctctcaccaggtgtgcggagatgatcatcagcatggacagcagccagatccacagcaaagacccccgttacggagccagccccctccactgggccaagaacgcagaggtgagtggatcctgaggtgggtgggtggggcagggggccgggccccgcaggtcctcagggccctcaggaagcaggttcccgagaggaccctgaggctagcacttgggggctgaccttgcagtgggtgtgcaggcagagaagtccatgaagagctgggatcctggcagggctctgctgctctctggctgggcggggggatccgccctgtgcctcagtttcctcatccatgaattctgctttggcgatgtgatgaagtcagcaaggcagtgtgtgacaaaactcggcacaaattgtaaagtgcttcccaaatagaaggtggcgtgatgatgattgtattattagtcaggattctctagagggccagaactaacaggagatatatatatagagagagaggggggtttatttttttattttattttttttgagacggagtctcgctctgtcgcccaggctggagtgcagtggcacaatcttggctcactgcaagctctgcctcccaggttcatgccattctcctgcctcagcctcctgagtagctgggactacaggcgcccgccaccacacccggctaatttttttgtatttttagtagagacgaggtttcaccgtgttagccaggatggtctcgatctcctgacctcgtgatctgcctgccttggcctcccaaagtgctgggattataggcgtgagccaccgtgcctggcctaaagggggatttattaaggagcattaactcacacgatcacaaggtcccacaataggccatcgcaagctgaggagcaaggaagccagtccaagtcccagagctgaaggacttggagtctgatgtttgagggcaggaagcatccagcacgggagaaagatgtaggctgggaggctaagccagtctagccttttcacatttttttctgcctgctttatattctggccgtgctggcagctgattagatggtgcccacccagattaagggtaggtctgccttcccctactgactcaaatgttaatctccgttagcagcaccctctcagacacacccagggtcaatactttacatccttcaatccaatcaagttgacactcattattaaccatcaagatgatgatgatgatgatggatgatgatggtggtggtggtggtgctgggcctagctgcacacacagggagcctggctgggcatctcctctgagttcttcccctaagctaagctctgtcctcctgggaggatggaggcctctggtctcatcaccaggaagcacagcttgacagagaatgggatgccccagagttcatggcctacttctcaatgtgatgggccaggagggagggcactgccagcctcagggtacctctgcattccaggagccggacaccgagtcaggcccttccgtgtaggtttggtcactcattgtcatcacatgctgtgaggtggggacttgcattcccatcttcacagaagccctgaagtgcacatggctacagtgacccatccaagcgcaggcagctgggatgagtgaagctgggctttgggctcaggtctgtgactccaaagccaggctcccctccctgttcccaaggctctgccagggatgtgcattgccaaggcccagtgagaggtgatacctttgcagggttccagggagggatgcagggagcggggtgcttcaggacaggccccagaggagcctttgcaaggagagtgggttctgttggcactaggaaaggaccagaagcctcttaaaacagtcagcacatctttggctttttgtccctagtcttgggatgctgatgggatgggaggcagtctaggcccccctagaactggggcctgcccctggaatcctcttgctagcgctttccaacatcccagtacctgtaggcctctcagagcagaagtggcagtgcccacgtgtcccggggtgcggcagctccccgagtgcctgtgctaactcagcctgaccgtctcccgcagatggcccgcatgctgctgaaacggggctgcaacgtgaacagcaccagctccgcggggaacacggccctgcacgtggcggtgatgcgcaaccgcttcgactgtgccatagtgctgctgacccacggggccaacgcggatgcccgcggagagcacggcaacaccccgctgcacctggccatgtcggtgagcccaggaccgcgtgtcctgccctgtggggccccggtgggaatgcaggagggctgtccggactggagccctcctccccactgtctccctcctatcgtcagctgctccaaatcatcttcccacccaaagctcagttcagaccctgactcctccctcaggaagccttccaagtccccctctcagcccaaaataacaccacctcctgtgtgctgtggtaccttttccacctgtgcccccatttggcacttgcatggcacgagagggaaaaatgacagctctggccatagactggccctgagcaagccatgtcacctgtcagcctcgatttcctcatctggaaaatggtggtgtcaatacttatctggaagagttgtggaaaagttatggtggacacttggtcaccctctacagaatgtctaagtgacacacgcagtacctggcccgagtgagcatcctgcttcccttcactggtccgcgtgttgctctcatcttccctgggaggctgtaagatcctggcaggcaaagcctgagtgtgcagcccagcagcctgtggcaggtgccaggcatattcgttggtttattatagaacacagttcctgccctcaaagcccttactgtctggttacacatctagagtatgaacatattaaacctagcagaggaggacgttactgtgttacagacatatgtgtgtgcatgtattcttttttttcgagatggagtctcgcactgtcgcccaggctggagtgcagtggcgcgatctcggctcaccacaacctccgcctcccaggttcaagcgattctcctgcctcagcctcccaagtagctgggactgcaggcacgtgccaccatgcccagctaatttttgtatttttagtagagacggggtttcaccacgttggccaggctggtctcgaactcctgtgttggccaggctggtctcaaactcctgacctcatgatccacccgccttggcaccccaaagtgctgggattacaggcgtgagccaccgcgccccaccgtgtgcacgttttctatagcaataccgtatgtacagaagtctgtttactgagtctcagtgacagaacatgagagacccccgggactctaaaagctgattcaggacacattcagagacatcctgttttataccaaaggtcaaaacttggaagagatgttgttgcccaaaaggctgaaactataaatagtttcatttttgaaactgtggacatttttagcactgggtgggcccttggaatgatctaactcagcagttctcaagttttttggcctatttgatccctttatactctgaaaaattattgaggatcacaaagattttttaatcatctggattttctttatctatatttaccattttagaaatttaaagtgtgaaaatttcaaaatattaattcatttaaaaataacaataataaatatatatgcctactatgtacccacaaaaattaaaattaaaaattttttaaaaaacttaaaaaataactggccagctgcagtggctcgtgtacaccagcactttgggaggccaagatggtcagatcacctgaggccaggagttcgagaccagcctggccaacatggcgaaagcccatctctactaaaaatgcaaaattagctgggtgtgagacctctgaaagggtatcacgtgttcacaggggtccccaggtcttactttaagaactgctgatagactttggtcatcttcatcccatcttcacagtttttggcatattcatcaaccacctttacaattatgtacttaatcacctcttcaaattggcttacttttatttatttattttgagacagagtttcgcttttgttgcccaggctggagtgcaatggcacgatcttggctcaccgcaacctctgcctcctgggttcaagcgattctcctgcctcagcttcccgagtagctgggattacgttcatgcgccaccacacctggctaattttgtatttttagtagagacggggtttctccatgttggtcaggctggtcttgaactcctgacctcaggtgttccacctgcctcagcctcccaaactgctgggattacaagcgtgagccaccgtgcccggcctggcttacttttaaactgacttaaatttattttgagagaaatgttgcatcactaccataaatggccatccatccatccagtgccaaccataaaaggtaaccaatgcagggcgcggtggctcacgcctgtaatcccagcattttgggaggccgaggtgggcgaatcacgaggtcaggagttcaagaccagcctggccaacatggtgaaaccctgtctctactaaaaatacaaaaaattagctgggcgtagtggtgggcacctgtaataccagctactctggaggctgaggcaggagaattgcttgaactcggtaggtagaggttgcagtgagctgagatcacgccactgcactccagcctgggtgacagagtgagactccgtctcaaaaaaaacaaaacaaaacagtaacaacaacaaaaaatcacagttaatgctgaaaacacacacatatctgtagccatagaagtcctaatagaatgtgaagaactgtttggaaaaccccattctagacccacagcttcattctctaggcagggaaatcgggtcccaagaagaggaaggtgacaaggccagagcccacagttccaggtggccagtgtgtcctctgaaaccatgccatgctctgcgcccctgcccggcctccaggtgtggaaatgtgtgacgttcttcgtggggacactcccccgaaggctgccattaggggcacgtgtgttcggttacccctcagggatgacaccctggactgggtgggcaagatggccttccctgccctcacccaccctctccttgctactcctgaaagccatcagcagctgacctactgtgtccccatggctcctgggtcggggtcacagatgcactgcatctttggaggcggagctggcagagcaggggcgagtcacttctagtttctgcctgggttcttacaccctcccctgtgggtgcttttaagcctgtttgtcaggtccccagccatcaaatggcagactttggactaccagattgacttgggtgggggtgaggagggttccagtgtctccccgtgctgaggagaggcccgctgggtgagttgacaggttggggctggcagccaggggcccctttgttcttcacttccccggcagttgcacgtcttatcctctctccatctccaacagaaagacaacgtggagatgatcaaggccctcatcgtgttcggagcagaagtggacaccccgaatgactttggggagactcctacattcctagcctccaaaatcggcagacgtatgtgctctgcactctggggctggagtggggtgagggttgggtggatacagggaccgaggaggagggaagtcccaggcatcaggtgccagcatcctgtgctgacccgccctgctcagagctgccaggagcacctcgtactcagagagggggcttccttacccaagcacaagggccctgagcagtagatgcaggcccaccacggggcttgctataccagcatcctctcccgtgcagcgccccccacctcagggagctaagattcccagcaggggtggggacaggagagccagcagcagccttctttccccaccgttggggaattcactgatggaaccactggctagaatgaccaagggtgcatgcactacactgcacgagctctgggcatgcctgtgtgggcagagtgcatggccatgtgctgcacgctcgcacagtgagccttagcttcagagctggacagagcagatcctcctcaccagaggcctggagcccgctctggagggtttcagcagctgtgggggtcactgtgggcaggtacctgatggcagcagtgtgtgtgtgccagtgcacacgtgtgtgtctgcatgcaccgcatctatgacctccttttcagcaatcccatccatcaaatggagtaggtgccccctggctggctcattagtccctttggaaccctgaactatcacttagcatttttgagaatcactgaatgtggccatgggattcctgctttcttggctggagtagaaggaaagaaggggttcccacaggcatcgggcagggtgacactgacctcctcctcccatatcctccttccctggccttaggaagctgcttgggatgtaccagcctgggggcagcactccctgtcagggtgggctgaggcctctggagcagcccacgtgcccagggcctgggagctgggacaggggacggagtgtggaaaggaggggcctctcctttgcatgttgacatcatttctgatcctgtgccatctccccttccccaaaccatgacaagttgtcaccaggaaggcgatcttgactctgctgagaaccgtgggggccgaatactgcttcccacccatccacggggtccccgcggagcagggctctgcagcgccacatcatcccttctccctggaaagagctcagcccccaccgatcagcctaaacaacctaggtaggcctcgcctcccgactccctcttctccagctggttcccaggcccctggatcacagcaggccccaccaaagcaacaggatccctaggacggaagtcactaaaggaagccggggaggatggggccggagttgtcagcctctaggcagccagcaacccacagatcccagaggcctagggtgtccctggctgatgtcccatgctccgttgcccctgagaggatgtgtcctgcacacagtctcaggcctgggcatttccagtggcacccatgaggtggctgctgttactgccctcctgtccccagggcgttcagggtgggcagtgaggagtgctgtcgggggactgggggcccgggccctctggcttcacctgtccctctggcttcacctctatcacactgtttgaatctcggttgggcctgagacctgtgtgcccccttcctggccccgtggtgactttcagacgttgaatgtggccaggcagccagcatctgccccggtgcattccttggtgcccagggagacatccccagactagacaggacccttctctggactttctgtgggctggcccactcagggacctccattgtttgggagcggggtcccctgaacagagggcagccaggagccagtccttggtgagccagacttcactgtggaggcggcagcaccttcagccagggtagcccgaccaagcctggaactctggagaggcaccgtgactgtggcttctagtcctggctccacctctctctcccctcccaggaactccccctccacctcccatctttatctctcaattttgcaggcagtcacccaagccaggccggatggtgggcctggggtgcggcgtcagatgggtaacgccctgggcctggagaggccaccgagcctagccatgcggcattagctctagctctcactccctaatccgtccttcttagctgcgcacacaccacacgccccctcccctgcaccctgtccccggcctctctcagccactcttctgcttcccttgttcactgtggagccgtgtgccctggggagggggagacaccgcttcgcagccctcggttctgctttgctgcttctagactctgcacagtggtggggggctgtcagagttggggtcacgcgggctgctgcaccaggcacctggggactgggctgcttgtcaggaggggcagctagtcagttgggtggacgtcaggcaggccttggacacaaaggaagacatggacagagtggatggtgggcctgatcccggaggccactgggatttccagacctgggatcaggacgagggatgtctcctttcatccatggacttaaaccccgaggaacgtcctgactcagccttttgactaaatgaccttgggtgaattatggaccctcttagagcctcacctgtcaatagggaataagaattcttaggccccaggtggttattgcagcatcggctccgatgcaagaagaagcactttgtctgaagaggacacgcaagggtattcatgccttggggtttcaagaggaagagattgaggggaacctgggagctggctgggcagggtggggagcccttcccagagcagtgggcccccctttccactccagcccatttctctcctgtggcctgtggctcagctttctcctgggacagagtccttcctgtggggaagggacagatgacagggggagtggggggatgagggcgtggccgtgggcgaggcacagcccaggtttgatctagggacctctggggtagcagggcttggggacccacctgaccacagcatgccctgctctgtgcctcacagaactacaggatctcatgcacatctcacgggcccggaagccagcgttcatcctgggctccatgagggacgagaagcggacgtaagtggatcgagatcgggggcagagcggggaacgtgtgcgctttcctgcccctcacccaccccctgttgtgggctcagggctttactctctgcaccctcacagccggcgaagtggctctgctcctagtcttatagttctcagcagagacagaacatggagagcctgtgtcgctcgttcattaatgctgggcggtgcaggctctggagaccagcccagggtgccaggcttcttggacttggtggggctggcgcagtgttctggcctccctccctgatctccttatggctagaagagggggagatgcctgggtcccccctggggagatctcagcagctgcttcccactgctcctactggcttccttaaccacctcccactgcagaatagtggcgtgggctgccttccccagcacctgctgtatacctagtcccattgtaagaggcgggcctgggtgacaggatgcaaagagaagacgcccaggccttgcccttcaggcataatcccgggtgcttgaactcagtgccagctggcacggcaaggtaccaggacaaatgcgtttccagccactgtgctgtcgccacctcccttgattgctgcagttgattcatttattctttattagtctctcatgttcctaatagccttcccagggaggaatttgtaaccttgttttacagatgcagaacctgagcccctgagaggtgaagtgacttgctcaaggtcacacggagtgagtgtcagggtggcaactcacagccgggtcttccgaacccacgtcctttgtgctaccgcaggctctctctgggttctctgtggactctatacctagtgccagccctctgcagggaaagctctcttctcagaatcagaggcagctccactcccagggccaggcagtgatcgtgcagctctgtgggtcctctcacttcgcactcacttccatgctaccctgttgtgtgccctggaggttcccctgccccatcagcattccctcccctgtgccccctgcatgctcttgcacgcgggcacacgcacacacacacgcacacatgcacgcacacacacccacatgcacatgcctgcgggttgcccacatgcatgtgttgcccacatgcaaacacatggacacgcacacacatgcacacatgcaaacacacgtgcatgcacacacatacacatgcgcacacatacacatgcatgcatgcacatggacacccacacacatgcacacacatgtacacacatgcatgtacatacacacacctgtgcaggggctgaggtgaggcagctgcacctgaaggggggacccacatttcccaagggaggaaaagcagattccccagattctggagcctcagaaccctgcctggagcggggctgaggcaagagtcaggagacccctcggtagctccccacttgggccttccaagctacagagccctgcgccctctgggttgatctctgtcgccagccccgcatcttcgggagtttgctttggcctccagcaacagtgtagtctctcccctgccacctctaggcttgctgtggggctgggtacctggtccaggaaaagacccctagaggtgggacccgggcctcctccatttatcagccctcttgggcacctcctgcatccccttgacacacagcgctgcccagagcagaggcggcttctgccctggtggagcttccaggtcagcgcaggagagagtaaaagaaagattgcgaatggaatggaagcagcctccaccaggaagcaggtggagcagcaggcgggctgtgagggagggtctcgatggcatcagggcaggcttctctcagcttcatcaagctgagatgggaagatgagaagatcagaggaaggttccagactgaaccaaccacaaaggcattcccccagggcatggccaatgaggacaggcaggatgtggggagacgtgtcagggcgcgctggagagcatgtgactcaggaggcggcagacctgggtccaggtccagtccgcatccatatgacttggttcccgtcacctaacctctgagctacactccctccgtcactcaaaaatatgcacagagagtaggcgcagtggctcctgcctgtagtcccagctactcgggaggatcacttgagctcagaaggttgaggctgccgtgaactgtgattgcaccaccacacaccagcctgggtgacagagtgagaccctgtctctataaataaataaataaataaataaggctgggcacggtggctcgtgcctgtaatcccagcactttgggaggccgagacaggcggatcacatgaggtcgggagttcaagaccagcctggccaacatggagaaaccccgtctctattaaaaatacaaaattagctgggtgtggtggcgggcacctgtgatcccagctactcgggaggttgaggcaggagaatcgtttgaacccgggaggcagaggttgcggtgagccgagatcgcgttattgcactccagcctgggcaacaagagtgaaactccgtctctaaataaataagcacagggatgtcagggagggtctgcctcagaggcgtttgggacaatgacatgagctaatgctggtagcacccctcccatagcccctggcatgaacctctcccttcctccctgccccctcctcccctgcttcttccaccttgtgtggaggccctgatactctgtcactgcccattcctggcctggctgtagggtccccgcccctccttccccagccttatttaattccaacagactttatcaggcacctgctttggatcaggcctgatactgaccaaaatcaggtgtcccaagttggggagactggccgagatcctgctgggatggcgcctggtcagtgatgctatcccccgaccttcctttccctttctctgttgcactctccagcccctgaaatactagacatttgttcctttactgccctcacccccaccctcgctgtcctgcataggacagaagttcctcgggtccgtctgggtctgtctgccaggacacagctgcaggggacaagggctatgagggtggatgtaaagtactgggctgtggcaggaccctcctctctcccactgctgttcccactgcagccacgaccacctgctgtgcctggatggaggaggagtgaaaggcctcatcatcatccagctcctcatcgccatcgagaaggcctcgggtgtggccaccaaggacctgtttgactgggtggcgggcaccagcactggaggcatcctggccctggccattctgcacagtgagggcggcccctggggatggggccaggcggggctgagacctgtgtcctcaaggggccgagtttgtcttcagggctttgcaaaaagagagtggaggagtagaggagggctataagcactttgaggaggcaggggcggggctgcaggtgctgaggtcccaggctggaaggagaagggctgggcccatgggcttgggtttggggatcccccgccctctggccacagagggtagagctggctgtgtgaaattttggcataggaagcgtttcctatcgactgccttaacccctcctcccctcacccctgcaaagcaggcaccaggggccacacagcctgctgcacataaggaatcccattcccagggtgcacgcagcaggcagtctcaggaatgaggagccactgagcctcaggatgccagagccctcgcctgcacacttcattttactgggaaattttactgggaaattaagttcccaggtggggagggatgacgtgaagtcacatagctcatccatggggtcgctgggctggagcacagtcccctagactcccagcctggcacctcctaggccacagggcactgtgtagtctcctttcactgccgctttgcgaaggcgcctggcttgctggacagatagccgggtggtcagtgttgtgacggctcctctgtggagctgtctgagcttctaggtgctgacaggtggggaggggcactgccagatcagggtcctcagctccccccaaccccctggacattgtcctgggactcaacatgtctgactggtgcccctgcccctgtgctggtcagattccattttctccagagcgcccccacatctggatcctggtcatgcaaagtcttggaggtgcccggggaggactccccaccctagggtgggtatcagggcctgtgggccaggcctgtgttggatgctggggatgcagagctgagccaggcataccccagcctcaggagcagggggctcagccagtccaggaggtgctggggacagagtcccatgggcggaggaggagagtcatctgtcaagttgccgggacgttagtgtccacggcggtttattgactggtatttcatttccttttgatgattctcaccatagccctgcggggtgagcagatggggaaactgagaaccagagaggatcagccagtgaattgggcagtcaggactgggtctccagcagtgtgcccagctctctaccccagcctcagggtcccagcatcccctctctggtcttccacagggtccaagggcgggcacgaggtctgagcaggcagactgggcagagtcctagcttcttctccaaaagggccacgtccttcttcagggaccatttcttccccatccggggtcttgagactcccaggggccatggaggggatttgagaggtctcctggctgatcctccggtgtgggcagatggcctcctttcagctaccctctgcttgtacatccctggccctggggaactcactgcctcacgggggaagtggggcagcttctccttcctggaggtgcagccggccccttggccctgtctgttctgaaggctcaaaggacagggctattccttgttttctgtgacaaacaacgtgggtctagcttttataagcttttactcttgaggggctcttctttaaggaaaataatacaaaatcatgaatacaagatgaagtgcagagccgtggggcttcagtggtttttgagtctctccgttgcccaggctggagtgcagtggtgcatcttggctcactgcaacctccgctcccgggttcaagcgattctcctgcctctcagcctcccgagtagctgggactacaggcgcccgccaccacacctggcgaatttttgtatttttaatagacggggtttcaccatgttgggcaggctggtctcaaactcctgacctcaagtgatccacctgcctcagcctcccaaagtgctgggattacaggcgcgagccaccatgtccagccggaaggaggtttctctctgtctgtctgggaggttgcaaaggaagggcccagaatttgggtttgcttaggcctcggtaaacccgcttcctcctgccacctcctgcgttcaggcgctctgcaggctgttctacgggagccctgcgtgtggccgctgcatctccccgcctctgacccctttgttcctaggtaagtccatggcctacatgcgcggcatgtactttcgcatgaaggatgaggtgttccggggctccaggccctacgagtcggggcccctggaggagttcctgaagcgggagtttggggagcacaccaagatgacggacgtcaggaaacccaagtaagccctggcgcactggggccgtggccgcagctgtgcccactgtggctgttccctggggacagagggctccctgtcctgctgagggagggggaagagcgccccacgcttgaggggagcagagggaacccccttcccagggaggcagagggctggggtgtggctctcacttgggcatgcagacacctgctgagcgcaggaggggcgtggcctggtgggcctggctctgccctgcctggctctgccctgcccggctctgccctgccggctctgccctgcctggctctgccctgcccggccaggggtctggggcttgcctggagagagcctgggccacccttctctgagaccacctgggcagaggctgggtttttgctgcccaggcaaaaggaacccactggcctttcaaatgacacggctaaacattttctcacatttcagacagcactcgctcccaggatcggactactaggttataatcagagggcttcagtcttacctttaatttaaggcctacaagacttgaactaatttaagtcagactgaaggagaaagtcacatttccaggaaacatttgtttgggaagcccaaatcctaggactaagcaatgcatcccgttcggggctggatgaatggtgtgttccaagaggagtgttttgagcatttctgagtgattttttcatattttgaaagtgagtgtcccccagtcttaggggcccggcatcccctctgcggtcttccctagggtccaaggccagggaccttcaatcttttttcccactctgtggcttgtctttctgctctgtggtgtttctaggtttttgttttttgttttttgttttggttttggttttggtggcccatgttcttaatgaggtagataatatttataaatatttttcttcttgtagtttgtgattttttcctttctttctttcttttttttgaaacagggtcttgctgtggggcccatgctggagtatattgctgtgaacacggcttactgcagcctcgacctcctgggttcaagcagtcctcccatctcagccgcctgagtgcctgggactactagcatgtgccaacacatgtattttttgtagagatggggtttcaccatgttgtccaggctagtcttgaactcctgagctgaggcgatcctcccgccttggtttcccattacaggcatcagccaccatgcccagcctagtttgtgctttttatttctcgttcataaacccctttgctgcccccaagcagcacacgattctcctgtgtcgagctggaaagctctctagatctgccttttacattgaggtcttttatcaacctggaattgatttttgtatgagggtgaaatccaagatccaatttaatgttttccacgtgattggccaatttttcccagccccatctgtgaagtctgtccttccctccgcttcctcagcagtgggtcaagcatccctctgctcttggatctgctccaggctgtgttttgttccactggttggaaagctgtctctgtgcccggaccacagagcataaaaaactaccgctgtgtggtgagtcctggtgtctgggtggcagatcctccaccttggccttcttcaaaaacatcatggctattcttgggggcagtagagagaagtggatacaagcatagaccctgaagtttctacctcttctcaaaaataggaatatgccaggcatggtggctcaagcctgtaatcccagctctttgggaggctgaggcaggaggatcacttgaggccaggaggtcgagaccagcctgggcaacatagtgagaccctcatctctacaaaaaatttaaaactaacaattagctgggcatggtggcactatggctgtagtcccagctaattgagaggctgaggtgggaggatcacttgagccccggaggctgaggctacagtgggctgtgatcccatcactgcactccagcctgggcaatagagtgagaccctgtcttaagacaaaaaaaaaaaaacaaaaacaaacaaactcacaaactataaaaagaaaaaatatttataaattctactccattaagaacatgggtccatccaaataaataaataaaacaaaaacaccataaagggagtaaaaagacaagccacagagtgggagaaaagatttcgaatccatacatccatcaaaggactcattttcaaaatatgaaaagatcattcagaaatgctcaaaatagtaaccaccattttactttctcttcctatgagtttaactgctccaggtactgttaagtaaaatttttaggggataattgatttggaccaggattctgtaccaggcccaacagaagaaacgaatatggagtcattcatgccaagtgaacctagttagcttaggcgtatacccatgtaacaaatagctgagttctggttagctacaacagctaagctttaatcaatcatagatggccacctgattcaaacaaggcaaaccaattaagctccacacctcactttggttttcagcccatcaacactgcctgaccacgttgcaggccagagttctttgaacctattctggttttgtggcctgcctgactctcagttcatcaataaaagccaattaacatctttaaatttgttgcaattttatctttgaccgtaccttatgtaagtggaatcatacagtatttgtctttttgtgactggcttatttctttctttttttttttttttgagatggagtcttgctctatcacccaggctggagtgcagtggcgcgatctcggctcactgcaatttctgcttcccaggttcaagtgattctcctgcctcagcctccggagtagctgggattataggcgtgcaccaccatgcccggctaattttttgtattttagtagagacagggtttcaccatgttggccaggccagtctcaaactcctaacctcgtgatccacccacctcggcctcccaaagtgctgggattacaggggtgagccaccgtgcccggccatgactggcttatttcacttggcatccatgttgtagcgtgtgtcagaatttccttcctttttaaggctgaaaaactccattgtctgttggatacacgttttgcttctccattcatccattgatggatattttagttgtaaattgactgctgtcaatgtcggatgtgcaaatacctgtttgaggcctactctctcttactggtgccttctctagagagaattctgatgggttcagtttgatcatattttgtttaagatttttggccaggcgcagtggctcacgcttgtaatcccagcactttgggaggccgaggtgggcggatcatgaggtcaggagatcaagaccacagtgaaaccccatctctactaaaaatacaaaaaattagccgggcgtggtggcgggcgcctgtagtcccagctactcagagaggctgaggcaggagaatggcgtgaacccgggaggcagatcttgcagtgagccgagattgcgccactgtactacagcctgggcaacagagtgagactccgtctcaaaaaaaagatttttgtgtccacgctcgtgggcgaacttgacccgttttttcctattttgggttttgaggaaatatttcctctttttatttttcttggaagagttagtataatagtttattttgaatttatggtagaacttgatagtaaattcttctaggcctggagtttgcttggtgggaggatttttgatgatggaattaatttctatagtggttgtgagactgaccactcggggtttctaaatacctttttgagttagttttggttaagtgaggtttttctaggaatgtgtccatttcatctaaatctttaagcttattggcttagagttgttcaaaatattctgtttttttttttttttttttttttttgagacggagtttcactcttatcgcccaggctggagtgcaatgacgtgatctcggctcactgcaacctctgcctcctgggttcaagcaattctcttgcttcagcctcccaagtagctgggattacaggcatgcgcaaccacacctaatttttgtattattagtagagacggggtttccccatgttggccaggctggtctcgaactcctgacctcaggtgatccacctgcctcggcctcccaaagtgctgggattacagacatgagccaccatgcccagccgattctcctttttctaacgtctgcagtgtgtgttggtgcggcccccttttctttcctgattttgataacagataacagccatgttttatcagtcttgcaacaggtttttccattggattagcctttcaaaaaaaccaacttttgctgaattgtgcccccaaggttggaccaatctgacactcctccagcactgccggagagagcctgttttgcggggatggtgcggggagaagcccacctatcccgaacagaggttggagtgggcactctgctacccaaggccctggggtgtgaattgtggggaaagggaaaggtggatgggcgggtggctcagccgtcctcctgcctcatttctctccagggtgatgctgacagggacactgtctgaccggcagccggctgaactccacctcttccggaactacgatgctccagaaactgtccgggagcctcgtttcaaccagaacgttaacctcaggcctccagctcagccctcaggtttaaaccatgtttgatgcatccatgggaagcgactggcccgagaggctgtggggtggtgggtgggagtcgtgcacttgccatcaggcaccctcaccgtgccaccagcccacccgctgcactggtctttattggctgaggacagggattgcgggggagctgtcaggcccctggcaggttagaaaagtccctggaaagtcctcagctgtacctgccttccaccaggacgaactagccagagagtgtggcttcgtgggtcctgcttctgaagagttcccagcctcccctcttcccgcacccccagcccccaacacgcacaccctgagatctggagtgcatgggttttatgccagtcccttgtgccactgggccgccctccttccccgcccctagaccagctggtgtggcgggcggcccgaagcagcggggcagctcctacttacttccgacccaatgggcgcttcctggacggtgggctgctggccaacaaccccacgctggatgccatgaccgagatccatgagtac

SEQ ID NO: 15715 - DNA, 41716 bp, Homo sapiens
agtgacctcgcgggtgggcggggcctgggggtccgttccccaacttcctcggcgctccggactcccaagtctccgccggaccctcctttggatattcctcgtgtctccgattctgaggcatgtcctccattaacccttatgtgactccctgagtgcccccaccttccatcttttcatccccctgcgtccccaattcccatcccgagaccgcccgtgtctcatctcgaacttgtggaccccagggaccccagcttcgaccctgagtttctcccctgaaccccagtctcctccgtgtgtctccctcagtatccctaacttcccgagtcaatccatctcttctctttccccgaccctcagtgcctctttaggccccattggccgtcctaattttccttcctgtgctcctctaagtgctcacttgattccccacttcacgtccgtctccacctttcgtggtgcctctactcatttctcactccctgcttctcctgcctttcctccctgctttttttccttgcctttcctctctcgcgtgcctccagacctgcccccgacatgctccctccttcccctcagcctggccaccccagagtctcccacccctaatcctgtgtccacctcctgctcccacagatgacttggaagctggtgacagggagcatgtgaccagggtgatcatgggactgggtcggggcaagcctgtgggtgtgggacagggagggcacagggcaaggggacctgtggccgtatttttaatgggctacccacatgaccccaacgaatacctccccctagcttctgggtctttccctcacctgcctcttacccgcccaacaggatgtcaggcaggttcggtttggcaacgttgaggctgcacccttgggctgaatgcattgtttttgaatgcattgtttttgttagagtttctgcctggagtttggaacctgttttctgtccaagtctcagtttcctcatctgtgacaggggaactgtacctcctgccctcgtaagtctgccatgaggttcaaaatttgaatgagaaaatgtagaaggtaaagctttataaccagtatggccctgtacaaatacatgattttactgttgggtcataggcagaattgaaaggagtggaaagggaaagggctagaatgagaagacaaggagagaaggatgagcaggaggtcccttgtctttcagtgtatcatttggcagtgtttgttcatcacctcttgtgagtcaggctcttctgtatatgttctcttcaccattcattcagtcatcgtttatctaacaaatatttacggactgtctgatgttctaggctacccttggtgtggccaatgatattctcacttcacatgagaaaaagagggcgcatgagttgcttgaggtcacaccgatgaggttgaagctggaatctgacaccagagcctgtgtgattgtcctgatgtgtaaggtttgctactgtttaggacacttcttgttccttccgtggattactttcttgttacatgagagactccccaaaagggagtttccctcttactcagcagaatgacatcactaagagatacagaaaggagaaatttaaatactctgtgtgtgtgtgtgtgtgtgtgtgtgtgtgtgtgtgtgtgtgtctgcagacatctattgggtgtgtgtgctgggggaagtaggtaggcaaggagtaaggggccgtagtgaagagtgtgttacaaacttcactttgtagagggtggctccctgggagaatatgttctgtgtctttcacagtggattttgatagggtcatgtcttaaatgcctcttctcgttttcggatggtgatctcatccagtcttatttctttaagtgccgtctctattctgtcagcccacaaatttatatccccagtccagtccagacctttccctggaatgacatactcaaatctagttgcttactcagcacctcaaacttaggcttttcaaacttgaagtatttatttattgatttatttattttttgagacagagtctcactctgtcacccaggctggaatgcaatggcacgatctcggctcactgcaacctccacctcctgattctcctgcctcagcctcccaagtagctgggattacaagcatgcgccatcatgcccaactaatttttgtatttttgtagaggcggggtttcaccgtgttggccaggctggtctcgaactcctgatctcaagtgatccacctgccttggcctcccaaagtggtgggattacaggtgtgagccaccgcgccaggcctcaaacttaagagtttagaattgagctcctgttagttctgccctccatccctgaccccactcttcaccaaaacatgtccctcccactctctttctcatcttaggacataggagtattgttcattcagttgctcaggtcaaagctgtgagattatctatgatgcctctctgtttcttaccccacacccagccagagtgatcttgttaaaatgttgtttctttgcagtggcctctcctctcatggcacatgcctggccccctgttgcctctctgatgtcactggcttccttgcttttcctggaactcgctaaacatgttccagccccatggcctttgcacacgctctctttgcctagctattcatatgactttcatctctctccatcaggtatttatttaagatcaatttcttggtgaagacttctctcctcacccaatctaaaatttcactctccacctcagcacttcctatccccattctctggtttttctcctcagtagttaattgtcatctaaaacctttgtaaatatttacctgtttatcttctttattattagtagctctgtctaaaatataagttccaggatgtcagggattttgtggggttttttttggttggttggttgttttggttttgagacagggtctcactctgttgcccaggctggagcgcagtggtgcgatctcagctcactgcagcctccgcctcctgggtttgagtgattctcccacctcagtctcccaggaagctggaattacaggtgcacgccaccacacccagctaatttttgtattttttggtagagatggggtttcactatgttggccaggccggtcttgaactcttgacctcaagtgatccacccgcctcggcctcccaaagttctgggattactggtgtgagccaccgcgcccggccttgttttgttttaagacagggtctcactgtcgctcaggctggattgcagtggcacaatcacagctcactgcagcctcgacctgctagacttaagcaatccccccacctcagccaccttagtagctgggacttacaggcatgagagataccatgcctgggtaattgttaagtttttgtagaggtgaggtctcactatattacccaggctggtctcaaagtcctgagcttaagtgatcctccttccttggcctcctaaagtgctgggattacaggagtgaactgccgtgcctgaccagtctgttttgtttacgattgtatcctcagcggttagaacaatgcctgccacaatccatctcagtaaatatttgtggagtgagtcataacatgggccacactgtaccgtgccaccagcccaaagatctcttaaagtcacccctgtctcatgtgcttgggagctccagtgacagtttcggggcagtttgcttccagctgtggtccagccaagcggagtgaatgaaagagatgctttttccttttgtgaaaggacgttttgctctggctcacgtgagcagcagtgcattttgagacgagggccttggcttttggaatctaagagcctgttgagcaagcctcgctcagccaccttctttcagctttctcctgaaggcagtttgaggattaagagcctgatgctctggattccacctaattgggttcagatcctggcaaactgtgtaacctgtgccccagtttcctgtgtaatgtggagagacctggaccttttcttacaggtgtttggagggttaaatgtggcaattcggccgggcgcagtggctcatgcctgtaaccccagcactttgggaggtggaggtgggcggatcaccggaggtcaggagttcaagaccagcctggttaacatggtgaaaccccgtttctactaaaaatacaaaaaattagccgagtgtggtggtgcgcgcctgtaatcccagctagtctggagactgaggcaggagaatcgcttgaacccgggaggcagaggttgcagtgagccaagatcacgccattgcactccagcttgggcaacaagagtgaaactctgtctcaaaaaaaaaaaaaaaaaaaaagtggcaatttacccgaaactgtggtgaagcgtctggcgccctgtgggtgctgggcagcagtgggtgctgatggggtgtgaggggatgggatcaagccctttcccactaacttaggaaagaggttggaatgagctggggtcagagggaacatttgcggggacattttgccgggaggctgccttggaggttcagaggctcagatgacccctgtgttcattcagtgttttctcacccacagattgagcacctgctgtgtggccagccctttgcctagtgctgttcaagagtcagaggacataggcaggcaatcccccaccacaacctgccaccccatttcctctcttggggccttgatttctccacatgccaaacagggagaatgattgcaccttccttgtttctttttttttttttttgagacagtctcactttgtcatccaagctttagtgcagtggcatgatctcggctcactgcagcctctgcctctcgggttcaaagattctcctgcttcagcctcccaagtagctgtgattataggcacccaccatcacgccaggctaattttttttgtagttttagtagagatggggtttttttctcacacgttggccaggctggtcttgaacttctgacctcaggtgatctgcccatctcaccctcccaaagtgctgggattacaggtgtgagccaccgcgcccggctgcgccttccctgtttctttgtgagcttggaggtggatcacaagtgtgaaaccctttgccaaccgtgaggcatggtggccttgtgagaggacggaggccggtgtgtggtggcatgctcccgtgctgtgtggcacagacggagctacaggaaggaagttggggcagcttggcactctgagtggaccctgagtttccagcctgctctgtcttgactgggtgggaggagggtgctcaggagggtgtcactgctgccaggttctgctgccaggaccatccaacagttgttccaatcatgggacatcctgtcgtcagcagctggggctcgtgaggcctgatttccacctcgggcagttctgtgtgtgctcctggaatcccccacgtggccaagcctgtgaggtctgcttcctggcctgctgcctgtgggttcctgtcacgcacctctcgggcagctgtccggctcctctgctctcggcttagtcaagaaggaagcagaaggcttggagtctttcctgcttggactaggagtgagctcagcctaagtgccctgactatatataaagctgaactttccagaccgaagcctggggatggatcagtccgatcacttagggccgctcctgaaggagtgcaggtgctagatacaggttctcccggtggaggagcgaaccccttgtgggccgttagctactggtgggatttgagcatggtatttccctatccgttgtggagaggagcatggcagctcagagtgggtgggaacagtgtgtggtccctgttatcaccttcaagggaataaagtgtgtctgggggcttcagaggtgctggccccatgggcttataggtggttcattcattcattctcattcattcattcaccaaacttattaaacacccactgtgagtcaggaacatcatgccaggtgcttagggaaacaaatcaaagcgggttgggtgagcagcccaagccaacagatgcacccccattctcacatggtgtgtgttcctgtgggctgggccctgggtggtgtggggtgctggggagaagaggaaggcacaccaggctgcagggcggaggtgcgggtatgaattttcagaggagatggcacctgagctgtatcttcatggataagaagagatttgttcatttgtcctttgtggagcacacattcaggttaagaaagtggggaggatgggctacgctgatggagcgtatgtgtggtatccccaagtgcactgagacacgagtttgacgtgttctgggaagatcgatggtgcggcgtggctggagtagaggtgagggatgagttggaggggtgagttgggccagctctcatggatgctggagtctgggctttccctgggaggtcatggggcgccactggccagggtcagcagggagacctgcagctggatttgcatcgtacagtgggcatggaggggtgtcaggctgggttgggaaccgtgcaggctggaagggcactctggtgctctgagcattcagagggggcagctgggccttgaaggatgagcaggggctccagcaggaactggagagcgcattccagggaggacgcaagtgcaggcccctttcactacagaaaagcagttttcacacagaccttccaaaggggaggagaggggactgcctgggcctggcagctgcggcaggtagcagcaatcagagggcagggaccgctcctcccgtgcctgagacctgcccagggtccttcagggaattcgtagctgaggaggaaccagatttttgggactgagttctccctcaccacccgctctgagccaccctcttggtcccttgtcctctactgcacttcttccggggcttggctcctcgtcatgagaggagcttccctgggcatggcgaggggcgtgactgacatagcagccctggacaagtggctccaggtgacctgtgttcacgttgatcacagcactaaccacggcccctcctctcagcaccttcccctctcgagccgtccagtcccagtgaaaatgctcaccgttcatgggtgggctgagcaagcccctgatctctgccttcctccgtgttctgatctgcttcatctgctgtgaaggcctctcgccatttcccccgctggcaaactcctgttcttcctggaaagttcagctaaaaagtcatcccctttaggggtccttccctcaggggaccgtgcacttggcgagacagggactggtcttgggtctctctgttgactgttttatgaacccaggtagtcacttccagggaactcatcagagatgctaccattggctccaatctccctctgttcccactcgaggttttttgtttcttcgtttgtttttctttctttctttttttttgagacagagtctcgctctcgcccaggctggagtgcagtgacatgatctcggctcactgcaagctccgcctcccgggttcacgccattctcctgcctcagcctcccgaatagctgggactacaggcacccgccaccacgcccagctaattttttttgtatttttagtagagacggggtttcaccatgttagccaggatggtctcaatctcctgatttcgtgatccgcccgccttaacctcccaaagtgctgggattacaggcgtgagccactgcgcccagcccgtttgtttttgttttttggtggacatcaactttaatttgccctttgttttgttttgtttttgaggcagggtcttgctctgtctcccaggctggagtgcagtagtgcaatcttggctcactgcagtctcgacctcaagaggatcaagcaatcctcttgccttagcctcccgagtagctgggaccacaggcgcacaccaccatgcccagctaattttattttatattttgtagagacagggttttgccatgttccccaggctggtctcaaattcctgggctcaagcaatccgtctgcctcagcctcccaaaatgctggaattacaggcacgagccactgtgcccggccttaatttgccctttgaacatgtacaattcagggcctctctgggcctcagtttcttgatctctgagatgggaagatgggataataatacttgttcctcccgtccttcagctcctccaggggaccctcacaccagcacactctctgtcagtcttccctcaatgaacccagcaggcaagcttggttttgacagaggatgggtgagcagagataaggaaaacggccagaaatatctggcttccctcagcaggggcaccaaaattggtacctggaaattgcctggcttggacaggcagaattgtcactgtcaacccccaccaccaaaggtcttgggtctttgtctttctgcttgtggtgtttgagagagctgcttgacacagccgaggtgcggtctgtgtcaggtgacctgggcatcctgggggtgcagggagaagcccaggtaaggaggaggaggggccggtcatcagtggggaaaagtgattgtctaccccacgggaaggtcaagggtaggacgctgtgagaagccagggggagagatgaagtgaggcatgatgcggggggccctcatccaccatccccctcttgcagctgtgctgggaagagcctaggctccagggtccaaggtggcagggacagaaggaagcacgtgtgagcactttctccctgctggcccgccttcctggttggcaatgccgtgagtgttccaggatgtggccccgtggctgtcatttcctttcttccacctagtgataacaatggccactgtttgtgtgcccacagtcggcctgtgtcccagacaccttccctccattgcgtcatctcgtcctcctgcctaccctgaaggctggatgccagccaagcctgtcgtttctgtggccatgctgtcgtgggtgtgtggggggcatcccctagccccaggctctggtggggggtacacaggctgggccattgacgaaggggtgtgtggaatctttctttgatttcactgcacccctggtgactttctccctcaatctgaggctcatgggtgctggatgctcttgactctctgcccttcctgggcgcacccctccgcgtccctgtgggcccgtcctcggggtagcctctctgcgctcttccaggccaggcctgagtcccacaggtccccatcttcccggctgcagcccccagaggctcagcctatactgctacttcctttgaaaactataatcgctttacatagcatctggaaaatagggaaaaggaaaaaacaaaagcccataaacccagcaccctcatctactcaatggcatgttttctgtcagtctatcttggtttgttttctatcaggctttgttttttctatgcataatatttactcagttaaatttttgttttgacaaactttctgtgagccaagcttgtggacggagatgaaaagacgagcagctgcctttgagaaactcagactctgggccagcccatctgggtgccagctttcactgctccacccactagctgggtgaccctgggcccgtgactttacccctctgttctttggtgttctcatatgtaaaatgaggataataatagtaaccagttcatagagtggttgtcagacagaatgattaatgtacgtaaagctttcaggatggtgccagcaagatgcacaggagtgtttggtaggaggatgacgaagcttaccgtctggcaggaggggcagttgtaacatgctgggctgtgatagtacagatgtgtttaaagtgagggagagcccagagcaaggagagagaacctggcatctggtgatggtgtatcaagaacattttaggccagacacggtgactcacacctgtaatcccagcactttgagaggctgaggcaggcagatcgcttgaacccgggcgttcgagaccagcctgagcaacgtggtaagaccctgtctttataatttttttttttttttttctgagacggagtcttcactctgtcacctaggctggagtgcggtggtgctatcttggctcactgcaacctccacctcccgggctcaagtgattctcctgcctcagtctcccaagtagctgggattataggtgcccaccaccatgcccagctaatttttttatatttttagtagagacggagtttcaccatgttggtcaggctggtctcaaattcctgacctcaagtgatctgccctcctcagcctcccagagtgctgggattacgggcatgagccaccatgcctggcctctataaaaattgtttggaagaaattacctaggcctggtgatacacacctgtagtcctagctactcaggaggctgaggtggaaggaggtagaggctgcagtgagccatgattgagccactgtactccagcctgggcaacagagccagaccctgtttcaaaacaacaacaacaaaaacatttttaaggaggaggctgagaaccacgagaaccaagcttggatttgaagaaggatcagggctttctcagacagaaaaggagaggaagaacattccagatagacatcattgagagatggcactgagccttgtaatgggacactgcgaacttttcttcagttgttatgatctttttttttttttttttgagacggagtttcgctcttgttgcccaggctggagtgcaatggcgccatctcagctcaccgcaacctccgcctcccaggttcaagcgattcttctgcctcagcctcccaagtagctgggattacaggcatgcgccaccatgcctggctaattttttgtatttttagtagagacggggtttctccatgttggtcaggctggtctcaaactcctgacctcaggtgatccgcccgagtcggcctcccaaagtgctgggattacaggcgtgaaccaccgtgccttgttggtataattattagtattgatcttttttccttttcatgtgcctcttagtgggccccttgcttttgtcttccttctgtccccagggttgatcctgtgctcagcacataggccagggaagaatgtggctgtgacccagtgtccactcagatgtcctctctcccccagggcacccatactctgtccttagtgtcttttgtctggtgacatcttggcacagaggcagagggcggcctccgtctgattggcgcctggctttggtgacagtaccttaggaaggcagtgtattttctgggaacctaggaaataacaaggtatctaattccatcatcaacactggggacaatttccatggcagaaactatgactctgaatatgcagcgtaaagttaccacccagacactgctgctcctgagtctcgaatggcatcttctgcaggggctcccccacctgcccctgcagaaggtgcagttcgttcatttccaaggagcttgcttttgtgtgctgtctctcggagctctttgggaaacctgtggtagcaggaaacaaaggatttagaccaatgccgatgatccccttgctccgatagagtgtgacatgatgctggtcaccttttggtatctaggaggggggacattgattttgtttgcggaagtgaaatgatccatgctggcctctttttttttttttttttttgagacagagtcaccctatcgcccaggctggagtgcagtggcgcgatctcagctcactgcaacctctgcctcccgggttcaagtgattctcctgcctcagcttcccgggcagctgggactacaggcgcctgccaccacatctggctaatttttgtatttttagtagaggcagggtttcgccatgttggccaggctggtctcgaatttctgacctcaaatgatccgcccgcctcagcctctcgaagtgctgggattacatgcctgagccactgtgtctggtccatactagcctctttgagtgctgaaaggttatctctgtaacttatttagtgagaaccctccatttgcccagggcattactgcctataatgtatgttcacatgtgctatctcctttggtcaataccacacactacaggtgaggaaactgagtctctgctgggacactgggtcaggaagcaggcagttaaggtcacctgtgcacagtggcagcacagggggacagccttctaggtagccagcctggcctgagggttctgtcacttttacctcccactcagtgttgtttctctttctttcccctccttttaagatccctccaggcccaggatctggggacaacgctggtggggagtgatctgggtgtctgtgcaggaaaccgctgcactgggtgagatgggcatgggagactgtgcctggctgaccagagacctcgttttcttccagacagagggggaagacggtggggcctccccacctgccccgcagaagatgcagttctttggccgcctggtcaataccttcagtggcgtcaccaacttgttctctaacccattccgggtgaaggaggtggctgtggccgactacacctcgagtgaccgagttcgggaggaagggcagctgattctgttccagaacactcccaaccgcacctgggactgcgtcctggtcaaccccaggaactcacagagtggattccggtgggtgatgctcagcgggaacatacttctctcctttcactcccccacgtctcggattggaggtcttattggccgagaagcagtttctttgagtctctgtctgaggggtctggagaggggtgggagagaggggagactgtactcttggaccagagggaagggcttccgagactccacacttctggcccatcagtgtcccagcacgaggctgaggatggaagcctgggttgtttctggcctggaggctcgacctatatggacaaagggaagaaggaaggacagggagactgagagtgtccacatcagataaggcccatggggagaacctttagccctggctctttatttttggttttggtttttgttttttgagacagtcttgctctgttgcccaggctggagtgcagtggcgcaatctcggctcactgcaacctctgcctcccaggttcaagcgattctcctgcctcagcctcctgagtagctgggattacaggcacccaccaccacgcccagctgatttttgtatttttagcagagacggggtttcatcatattggccaggctggtctcaaactcctgacctcaggtgatctgcccaccttggcctcccaaagtgctgggattgcaggcgtgagccactgcacctggcctagccctggctctttaagggcatggccgttctcataggggctgcccagggtttgcttaggaaggctggacagagctgttgcctcttggggcatgctgggactcccctgggcctgaagagaaggctcaaaagccaggacaggcctgagggaaccgggccaacggcagagctggttgggaaaaggggagaagcagccaaggttccaaatgcaggccccagcagtgcttggcagactggcatctagttgggctcagacagatatccctgtttccgctcacctatccatctggctgtcctgtcagccatccattcaacatgcaccaagcacctccagtgtctccagagtcctgggcttcgggccagtcctggctggcctgtgagatgacaaacatgtcctgtgtctttaaggaacgtacagtctggtgggggaggtccggtgcaaacaggcgtcatagcaccccttgaggagtgctgtgacagagggagagcctaggaaacagtgtggatcacaaggaggtgattgagagctactctgcgtctggaagagtgaggaggagcctgtgtggcagaacaaaatggataaggtcgttccagccgtgcagaagtgtggaggtgtgagcctgcaggcaggtggctctggttggatcccaggtgcatgcagggctttggtgagagtgaggctgaaggaagcagctggggactcattctgactaaagaggcatggcaggaggggtctctgaaagtgtcaggctgggggccaggggctgccaccaacagaagagcaaggcaggtatcagggccccatccaatcaggtgagaattcagagcctggctccacaaggaacctgaggcagaggcacccacagcaggtgcttgggctaaatgcagctcagtggccagtgcaggcaccagttttaatacagtggggccattccagattctgagtgcagatggggctgagcagaccgccttccagctggactcgatcaggactgaccctggacggggcaggcttgcacttgtagcttcagagctccactgcaggcacagctgaccagggcagcgggtccactccttggagagctggacagccccacttttgaggtacacggccctggggataccactaatctccacgtaccaataatcaccaagttctgtcagttgtaaaatcccttgacaggattccagatttgtctcagccagcttaagccccagtgtgggcagacctccatcccaggaggatttagtcctttgtcagcagcttcttagctacacgtaagctattctgtggtactttatagtttacaggattttttgttttcttttttttttttttttgagacagagtctcgctctgtcacccaggctggagtacagtgacgcgatctcggcttactgcaagctccgcctcccaggttcacgccattctcctgcctcagcctcccaagtagctgggactacaggcacccgccaccacgcctggctaatattttgtatttttagtagagatggggtttcaccatgttagccaggatggtctcaatctcctgacctcgtgatccgcctgcctcggcctcccaaagtgctgggattacaattttacaggatgtttttaagtatgttgggttagcacattctctgccaatccgtggaggtgggcaaggaaggcagtattccattttatgcatgagaaaatagccttgggatgataagtgattcatcccacttatacacaggaagcagtgaagaaacagaatcagtgtcttctggttcccaattcatttctctgtgctgctgtgttgtttccatgtatgtatgtatgtatttatttttttgagacgttaagtcttgctctgttgcccaggctggagtgcagtggcatgatcttggcttacagcaacctctgcctcctgggttcaagctattcttctgcctcagcctcccgagtagctgagactacaggtgcgtgccaccatacctggctaatttttgtgttttttagtagagacagggtttcactgtgttagccaggatggtcttgaactcctgacctcgtgatctgcctgccttggcctcccaaagtgctgggattacaggcatgagtcaccatgcccggctttgtttgtcttatttctaaattttattgatttatttattttcacagtcatagctctggagtcttttttatcttctcccctctaacctgctcccacccgaacctttccatttcagcagatagcatcattgcaacgggctgtgccagatccagccatcacatccacctttccagccaaagggagggtggaagggcaggatgcagaaggtcaatctccccctcctcagggacatttcatggaagttgcacgcattggccagaacccggtcacatggccacagctaactgcaaaggatgctgggaagtgttgcctgtgttgcagacagccacgtgccagtcgaaaatcagaggttctttctccctccgtcttgctgctggctcgcttctccagaccacagtcattgtgcacgtgtctcctgctgctccggctgtggcctgcactcctctcatcctcttccaagctgctgtcacagcgctgtttccagagggcaaatctgattggtcactcccctgctttactccccaagggcttcctgttttcttttatttttatttttattttcattttttgagatggagtctcgctctgtcgctcaggctggagtgcagtggcacaatgtcagctcactgcaagatctgcctcctgggttcatgccattctcctgcctcagcctcccaagtagctgggactacaggcgcccgccaccacgcccagttaattttttttgtatttttagtagagacggggtttcaccatctactcttagccaggatggtctcgatctcctgaccttgtgatctgcccgcctcagcctcccaaagtgctgggattacaggagtgagccaccgcgcccggccagcttcctgttttcttaacacatcaggtgcttaatgacttaaaagggcccagtgtgatcaagtttctgcctctgtgttctcagctcatgccgccttgtgctcctggcctttgcccaggctcttgctgtggcctggaatactcccctttctttgcctgccttccttcctcttgccctcccctgacctgcaggctggattaggagtttctgctgggcatcccatggcacccgtccctgcactggggatcctgctttcctggtaggccacagaccttgtgaggggagggactgtgtctgttgggttcatgacagtgtgcccagcccccagcaggtgcctggcgtagatcaggtttgtggaacaaatgaatgtgatatattaatttagctttagagtattcattgagggctgctgtgtgccaggccctctgtgccacctgggtggagggtggaggactgttgcattgagggcagttgaaggagtgagctgggaagtgggaggtggaggatggggactgggatgcagggtttgaggttatcaggggtcccagaagcagtaatgccaaggcctaggctgtgacctggagtgagggctgcgatggggtggggtggggtcgaggctgtggaggagggtcatcagggcactgctggagccctggggttctccagggccgggggtggtcattgcagtgttctcccagctcctctcaacaccctgcggtctgtggagagcaggcctggtgcactggacttgcctctggccagggctgagtttctgccttctaaacgatcttcctcctgtgttgccctagaggcctctggactgtcctgagtacttgacgcgtgttagagtgagcatgggctgctagccttccgctccaggtggaggagtttctgttgttcttttgctgctgttgctgcagtgagctgccaggctgagcttctggatggacctgggggatggaattaggagcttctgaattcttgggttgtataacctaaggccggagagtcccacagcactgctgctgggcggagagactggaccctgctgatacagacagcgacagcagcaggagcatctgcagtttcccagcaggtcctgcatgcctgggcttggcactagtctaagtagtaactcatgttatcctcacgacagtcccacgaggtggggtcattactgacctcctattacagatgaggaaacagaggcttgcagaatttgagatcacacagctggtcagcgtagcgattattcagaccctgtcacctggctccagaacccactcgtttacctttcttacatcagggctgctttgtagtgtggcgagctgagtggagctccacccgcctgggctgatcctggcccttcctgcctgacctatggtgcgggggccctggctctccccgtgtgagcccccaggggtcacttgtaatatgcctgtgtacactatgatagcatagatacttctgttcctggtacagattaatcatttacggctggcattgacttgtaacagatgacatttgatgaaatcaaccagcctctcactggtatctcagcagaaacagggctgtacctcccaggcatcctgggaaggatgatagaagtgtgtgatctgtgcttccctaccgggagctgacttttgaggctctctggactgggactttgccataaaactgcttatcagaaacctcagataagtggagtgccctgtgtcctggccacgtactctggggccagctcctccatccattcagtcctcccacatcccatcttcaccaagcagagtggaaagcggcaggtctctgcgagaaaaggaggctctgtacccagccttcagtgagataactttagagtggggccttgtattccctacacaggccttgtccccgacacggcctctttgcccttgcttctccttctgctaagaatgctccttcccaactccttggctggacacacggctcctgctctgtgggcctgtcctgttcccactcagagcctcagcaccccccatgtggccaagacacagcccctcttgccttaggttgccgtgggtctgtttccacatctgtttcccctccagactgcagggctcctgagggacagggcctggggccaagtctcctctgcgttcctgatgcctggtggtgtgccacgctctccgtgggtgcacggtaaatatctgccgagtggctagatgtatccatggttgctgaaggccaagtgtgttgaccagagggcgtgggaaaggctccactggggtggctggggtagagatagaccttaaggggtccagaagactccaccagctggagggaaaggccctacagagacaaggtactaggaaaggcccagaggacagaggaggggccctgtggggagcctgtgggcaggaagggcctgtgctgggctttgaaactggggactcaggtactgctctagcgtgagggtccttggcattttttttggtccaggaccccctgaggtccctggggaatgagaacaggctcacacagccactttcaagaggtttgcaggtcccctgaggcttagccacagacccctcccaccccagcagagacacagcagaggcttctgagtggaggccaggtggcttcagcctggggttctagaagggagggaagagacacacccccgtgtgtcctccagagcctcagccttctccctgaatctcccctttgcctcctcactgtaacccacacctggctctccttgaaggacccgcttgccccgcagcctcctgagagttttctctcccagtccctctcccactgggcctggaggtggggtagggtcctccttgcccccagccttgaatcttctgtcaccctacaataccacttgctgtcaccccggtgataggtatctacgagcctggggtgctcccccacatcctcaaagatgtgagcccctgactcagcgttgcctctggttcctgaccctccacattcacatgaccacgcgctggcctttatcatcgccagtgacagcagctctcccgtaaatacaagtttcaagcaccccactttccagtctctgccttctgtctttccagttcattccctctagtcctccacccacacagtgcttttccccattgacagggaattgctcctggccgcttttcccagccccatcccgttcatgtgccttgctttgtacccagcatggactccatggcctgtcattgtcactccttcacctatacttcctgcctccttgcttctctctctcttcgtcatcctggcatcaccaccccagaactgcttggtttcagttctccaccatggctaggggaacatacctttttgctgactgctctcactttctttttttttttttttcttttttttttttttgacacagagtctcgctctgttgcccaggctggagtgcagtggcacactctcagctcactgcaacctccacctccggggttcaagcagttctctctgcctcagcctcctgagtagctggtattataggcacccgccaccacacccggctaatttttgtattttttttagtacagacagggttttgccatggtggccaggctggtcttgaactcctgacctcaggtgatatgcctgccttggcctcccaaagtgctgggattacaggcatgaaccaccctgcccggccctattgctctcactttgaaatcacgacatgagccacagtgagcctatgatgtggtttgacgtctttctgcatttctctgttcacccctctcccagaaggcatgcctccttccctcccctcagcctgcagccccttcccctccacgcttactctcagctgatagccctgctgctgtctcgctgagaaaatagaaatagccagaggagaattccctctaccccatgcacacacctctgtccccgcctactccacattccctgttgtcagcaccgatgtgtttagctgagggtggtccccccattcaaggccatcatctcctgtcatctacttcttgacaccatttgaacaattatctcccctctttcctacataacactttccccttttctactatatattttttgctatggattgaaagtatccccccgaaatcatatgttgaagccccaatccctcgtgtgatggtattaggaggtagagcactatgggggtgattaggtcatgaggatggagccctcatgaatgggattagtgcccttagacgaagaggcaagaaagagatgatctgtctctgccatgtgagggcacaacgagaagatagccatctgcaaaccaggaagtgaaccctcatcaggaactctatcagccagcaccttgatcatagacttcctagcctctagaactgtgagaaataaaggttgtttaagcctcccagtctgtagttttctgttataatgtcctgacctaagttattttccatcgctatacaatgggttatttttttctttaaaaaaaaattatttcttgactctactttttcctccagagactgcttatattccactgtcttcattcttctcctcctgttttctctctttaaacttttcaaaaatagcaaaatataacacatatagagaaaatgatatacagctcagtgatttatcacaaacacctgtgtaaccaccactcgaatctagagataggacattacagcaccccagaagccctccttttgtcccctcttcccaaagaagggtaaccaataacttgccttttatgataaaggctttttttttttgagatggagtctcactgtgttgcccaggttggagtgcggtggcgcaatctctgcttactgcaagctctgcctcctgggttcacgccattctcctgcctcagcctcctgagtagctgggactacaggtgcccgccaccacgcccggctaattttttgtattttagtagagacgaggtttcaccgtgttagccaggatggtcttgatctcctgacctcgtgatccacctgcctcagcctcccaaagtgctgggattacaggcgtgagccaccgcccccggccaagataaaggcttttctatctggcttctttgttagcattttgttggcgagattgatacgttttgtgtgcagctgtctgtcattttcattgcaatagaattccattgtctactatatcacagttactcattctactactgatgaaaatttgggttatttctagtttttttggtgcatacatgcatacatttctggtagacatacctagaagtgaactggctgcattatgggccataacttgtcttcaacgttagtaaataataccgcccgtctgttttccaagcagcagtaaatggcactttctgttacttcatatcttctgttacttggtactgtcaggttttaaaattttagtcattctgtcgggtgtctagtagtatgttattgtggttttattttgcatttgcctgattgcaaatgaagttgagcactttttgatacagtgattaaccatttggatatcctcttcagtgaagtatcagctcaattctcttgactatttaaaaaataaagttgtttatctttttcttacagagttttaggaggagttttttggtacatgtgcagtccaaatacacaccttttgtcagtgatacgtgttcagctgcacacacggtgttttgcctttttattcttttaatggtatctattgataaacatgagttcttagttttaatgaagtcaaatttgttcatcttctttacggtgtactttttgtgtcttgtttaaggaagtccttctctatcttaaagctttgagaagcattccttctttctcctattttctaaaaattgttgaagatctccttccttccttccttccttccttccttccttcctttcatctatctctctctcacccaggccaaacttcagtggcatgatcatggctcactgcagcctcaacttcccaggctcaagtgatcctcctgcctcagcctcctgagtagccaggactacaggcacgcaccaccatacctggctaattttaaaaattttttgtagagacacggtctcatcaagttacccaggctggtcttgaactcctgggctcaaacaatcctcccacctcagcctcccaaagtgctgggattacaggcatgagtcacatgtctagcctgtattctttctttcttaaatgtttggaagaattcatgggtaaaaccatgtgaccctggagtttatttgtgggaagcttttaaaacatggattcgatttctttaacaaatataggactatgagattttcatctcatgtcggtttgggtatgttgtgttttcaaggaatttttctattttatcgaagttgtcaaatttgtctgcaggtccccttatttcctttttaatgtatggaggatctgaagggatggtactttgtgttgtctctatttcttgtttggttttgctagtgatttgccaatttaaaaaatctttccaaagaaccaacttttggctttgtttattttttgaaaacctgagtagctgggattacaggcgcccaccaccacacccggctaatttttttatttttagtagaggtggggtttcaccatattggccaggctggtctcgaactcctgacctcagatgatccacccgcctcggcctcccaaagtgctgggattacaagtgtgagccagtgtgcctggcaagccgctttttaaatggcaccaatcccattcatgagggcagagccctgatgatcgaattacctcctaatggccccatttcttaatactatcacactgagaattaagttttaacataagaattttaggaagacacaaacattcagaccatggaacatatataaaacagttgtcctaccaactaacagaatacacattcttttcaagaacacctatataaaaattatagacactgacctatgctggccataaagcaaatatgaacaaatttcagatacctgaagagatttagactatgttctccaactacagtgcaattaagctagaaatcaatagcaaaaatgtaactataaatgagcccgtatgtttgaattttaagcaagatatatgtaaattatctatggttcaaaaaagaagtcacagtgaaatttagaaaatatcttgacgtggcgggttgcagtggctcacgcctgtaatcccagcactgtgggaggccaaggcgggtggatcacctgaggtaaggagtttgagaccagcctggccaacatggtgaaaccctgtctctactaaaaatacaaaacattagccaggcgtggtggtgggcacctgtggtcacagctacttgggaggctgaagcgggagaatcacttgaacccgggaggcagaggttgcagtgagccgagattgcaccactgcactccagcctgggcaacatgagtgaaacttcatctcaaaaaaaaaaaaaaaagaaaagaaaaagaaaatatcttgacccaatgatgatgcaaatactacgtatcaaacttgtaggatgaacttccacttctggccatgacagaggagcctgtatcagactagccttcctatttatatatttatttttgagatggggtgtcgctctgttgcccaggctggagtgcggtggtgcaatctcagctcactgcaacctccacctcctgagttcaagtaattctcctgtcccagccttccaagtagctggaattacaggcgcccaccaccacacccagctagttttttatatttttagtagagacggggtttcaccatgttggccaggctggtctcgacacctgacctcaggtgatccacctgcccctgcctcccaaagtgccgggattacaggtgtgagccactgcgcctggccgtgagtgacctttttaatgtgttgttgaatttgatttgctggtattttgttgagaagttttgcatcaatatccatcagggatactggcctgtagttttctttttttatatgtctttgtctggttttggtgtcagggcaatactggcctcatagaatgagtttggaagttttctctcctctgtttttcataatagtttgagtagggttggtattagtttttgtttaaatgtttggtaaaattaagcagtgaagccactgggtcccaggcttttctttgctgggagacttttcattacagctttgatctcattacttgttattggtctatttaggttttggatttcttcacggttccatcttggtaggttgtgtatgcctaggaatttatccatttcttctagggttttcaatttattggcatataattgttcacagtaacctctaataatcctttgagtttctgtgatattggttgtaatatctcttttgtcatttctgatttttttgtttgggttttctctctttttttgttagtctagttaaagatttattgattttgtttatcttttcaaaaaactttattttgttgatcttttgtattgttttgtttcaatttcatttatttctgctatgatctttattatttcttttcttctactaattttgggtttggtttgctcttttctagttctttaagagacatcattagattattttgaagtttttctacttacttgatgtaggtgcttataggtacaactttcctcttagtacttctttccctgtatctcacaggttttgatatgttgtgtttccattatcatttgtttcaggatgtttttaaatttccttcttaatttcttcattgaccattcaagagcatattatttcatttccatgtgttcgtatggtgtgcaaaataccttgtttttgatttgtagttttatttcattgtgatcacagaagatacttgatatgatttcaaatttaaaaagtaatttggctgggagaagtggctcatgcttgtaatcccagcgctttgggaggccgaggcaggcagatcacgaggtcaggagatcgagaccatcctggctaacacagtgaaaccccgtctctactaaaaatacaaaaaattagccaggcatggtggcaggtgcctgtagtcccagctactcaggaggctgaggcaggagaatggtgtgaacccgggaggcagagctggtagtgagccgagatcgcgccgctgcactccagcctgggtgacagagcaagactctgtctcaaaaaaaaaataataacaataataataatttaagacttgttttgtggcctaccatatggtctatccttgagaatgatccatatgctgaggagaagaatgtgtattctgcagccgttggatgaaatgttctgtaaatatctaataggttcatctgatctatactgcagactaaggctggtgtttctttgttgattttctgtctggatgaactgtctaatgctgaaagtggagtattgaagtctccagctattattgtattgaggtctatctctctctttagctctaagaatacttcctttatatatctgggtgttccagtgttgagtgcatatgtatttaaaattgttacattatcttgctgaattgacccttttatataatgaccttctttgtctctttttatagtttttgtcttgaagtctgttttgcctcatagaatagcatagctattcctgctcttatttggtttccatttgcatggaatatctttctccatccctttagtttcagtctatgtgtgtctttacaggtaaagtgtgtttcatgtaggcaacagatcactgggtcttgtttttctatccgttctgccactctgtgtcttttgattggagagtttagtccatttatgttcaatgttattactgacaagtaaggacttactcctgccactttattaattattttcttgttgctttgtgatcttctttctttccttcctgttctccttttagtgaaggtgattttctctggtggtatgttttaatttcttgctttttatttttttgtgtgtatctgctgtatgttttttgatttgaggttaacatgaggcttgcaaataatatcttataacctaatattttaaactgatgacaccttaacactgattgcataaacagacaaacaagcaaagagaaaactaataaaaactctacattttaactttgtccccccactttttaacttattgtactgtttatgtctgaaaagttgtagttattatttttgattggttcctcttttagtctttctactcaagatatgagtggtctacatatgacagtgttataatattctatatgtttctgtgtacttgctattaccattaagttctgtactttcaagtgatttcttattgctcattaatgtccttttctttcagattgaaaaactccctttagcatttagcagtatgtgaactgcatttttcaagtccagaatttctgcttgattcttttttttttttttgagatggagtcttgctctgtcgcccaggctggagtgcagtggcgcgatttccgctcactgcaagctctgcctcccgggttcacaccattcttctgcctcagcctcccgagtagctgggattacaggcgcccgccaccacgcctggctaattttttgtatttttagtagagatgggatttcaccatgttagccaggatagtctcgatctcctgaccttgtgatccgcctgccttggccttccgaagtgctgggattacaggcgtgagccactgtgcccagcctgcttgattcttttaaattatttcaatctctttgctaagtttatctgttaggattctgaattccttctctgtgttagcttgaatttcactgagttccctcaaaacagctattttgaattctctgtctgaaaggtcacatatctctgtctctccagaattggccactggtaccttaattagttcatttggtgaggtcatgttttcctgtatggtcttgatgcttgtgatgttcgtcagtgtctgggcattgaagttaggtatttattgtagtctttgcagtctgggcttgtttgtatctgttcttcttaggaagactttccaggtaataaaagggacttgggtattgtgatctaagtttttggtcactgcagccatatctgcattagggggcaccccaagcctactaatactatggctcttgcagactcgtaaaggtaccacttgggtggtcttggataagatctggaagaattctctggattaccaggcagaggctcttgttctcttcccttactttctcccctaaaagtggagtctctctctctgtgctgggccgcctggagctaggagaggggtgacacaggcacctctgtggccactatcactaggactatgctggctcagacctgaagccagcacagcactgggtctcacccaaggcctacagtctccactgcctggctactgcctacgtttgcttaaggcactagggctctacagtcagcaggtggtgaagccagtgagattatgtccttcccttcaaggcagcaagttccccctacccccatcctgggaaggtccttagatgccatctgggaggcagggcctgcagtcagaaaccttagtaatctccccagtgctctattctattacagcctggctgatacccaagccataaggcaaagtccttcctgctcttccctcccctttccacaagcagagaagtctctctccatggccaccactgccccagccctgtggcagtgctgccaggccactgccaacgttcattcagggcctaagggctcttgaagcaactgaacactgccaggcctgggactctccctttagggtagtgggctcccctctgacccagggcaggtccagaactgccaccccacagccaacacttagaatctgggaccccaagagccctcttggtgctctgccacactgtagctgagctggtacctaggctgatttttgctttttatgaaggtacttttttgtgtgtatagttcaatttggttttcctccagggaggacaattggtggaggtttctatttgggcatcttttttttttttttttgagacggagttttgctctttcacccaggctggagtgcagtggcgcgatctcggctcactgcaacctctgcctcctgggttcaagcgattctccagcctcagcctccccagtagctgggattacaggtgcctgccaccatgcttggctactttttttttcaattaaaaagtaaactttaatgtcgaaaatgcaaacttggggaaggcagaaagatcacacacaaggctgtcgcttcacacttggaaggttgcacggcggccaggagaggcactcctcacttcccagacagggcgggggccgggcagaggcgctcctcacttgccagacggggcggcggccacatgcctggctaatttttgtatttttagtagggacggggattctccgtgttggccaggctggtctcaaactcctgacttcaggtgatccacgcacctcggcctcccaaagtgctgggattacaggcatgagccaccgcgcccagccctatttggccatcttgctttgcctccaccttcatttgataacagaacacccccatgtaaccaccaccacaatcaagatataagacatttctgttattctccaaatttccttcaccctcctttatagtccatggcacccaccccatccctgggcaacacctatgtgcttcctttttttttttccccgcaggaggacgtcttcctatacctatgtgcattccatcactgctgcttttaatcatatagcgtgtagtcttatgagtctgactttttcacttagcataatgcttttgcaatttgtgattgagcgttttcatatgattctgttttttctgtctcttagcttggaagttatacactttttagtagtaactgttgggagatcgttctccaagagtctctctcatatttccatacatcctgctagcagagacattgactacctgtttttgtctgtttagtgttgctataaaggaatacctaagtctgagtattatacatagaaaagaggttttatttgtctcatggctcctcaggccatacaagaaacatggtgccagcatcttaccagtgtcacatggcaagaaaggaagtgaggaagagaaaataagttgttaactggttgttaaaaagtgccaggcacgggccaggcacagtggctcgtgcctgtaatcccagcactttgggtggccaaggcgagtggatcacctgaggtcgggagttttgagaccagcctgaccaacatggagaaaccctgtctctactaaaaaaaatacaaaaaaattagctgggcatggtggtgcatgcctgtaatcctagctactcgggaggctgaggcaggagaatttcttgaatccaggaggtggaggttgcagtgagccaagatcacctgggcgacaagagcgaaactctgtctcaaagaaaaaaaaagtgccaggctctttttaacaaccagttcttacaggaactaatagagtgaaaactcactcacccccaccccacagggagggcattcattcatgagggatccacccctatgacccaaacacctcccattagccccccacctccaacattggaatcaaaatttaacatgaggtttggggggcagaaatccaaattatagcactacctttgttccaggctaccttcaaaggatgtttatacagcaaacagccttggaaaatagagttagggtctccttgtagagcacagggtaagtttgcttacttttcagcataatcaagattgtgtcttcttctggagcaaaactttgacaacaacaagcggggcaaagtctgaaaccttttgcacatcttgacagaaccttagagattacgagatttatctctgccttactcaaggtccattagtatcttccagaacaataagttggtcttagaatcctttagctatgtattcccttccaggcttcgatgctgtgtgctgttgttttatttagtttttattttaaacccaacaagacgctataccatcaatacttatttagatccccccacatatttaacttgccatggtgcttcattctttcatgcctctttaagcatccatctaggatcgtgttcattccacatgaagagaaagcttttggcccagcacgatggctcacacctgtaatcccagcactttgggaagcctaggcgggaggatcgcttgagcccaggatttccagaccagcctgggctacgtggcaaaaccctgtctctactgaaaatacaaaaaattagccaggtgtggtggttcacgtccctgctactcgggaggctgaggtgggaggattacttaaacctgggaggttgaggctgcagtgagcgttgattgcaccactgcactccagcgtgggtgacaggagtgagaccatgtctccaaaaaaaaaaaagaaggaaagaaaaagcttttgtatttcctttcgtgtaggtctgctaatgacaaagtctctgggttttttgtttgactagagaaatgttttaattttaaccttattcttgaaggttttgtttttgttttcattttgttttgtgtgctaagtacagaattctcattggcatttatttatttagagacagagtcttgctctgtggcccaggctagagtacagtggcacgatctccgcctcccaggttcaagcgattctcctccctcaacctcctgagtagctggggctacaggcatgcaccactacacctgactaatttttgtatttttagtagagacggggtttcaccgtgttgcccaggctgatctcaaactcctgagctcaagtgatttgcctgccttggcctcccaaagtgctgggattataggcatgagccgccgtgcctggccagcatttattttcttttcagctctttaaggaagtcattccattatctctgggttccattgttgagaagccagctgtcattctaatggttgccctttgaagataacttttttccctctgctattttaaatatttcctccttgtattttattttcaacaggtgtaatgtggcacatatatcagcaattgttatgttacatacaatacatattgtgcaacatatgtatcattatcagttattgctgtgtaacaaactactccagaacacagtggcttataaaaggaatcatttatttagtccttaaatctgcaatttgagcagagctcagtgggaaagcctcagctttactttatatggcaccatataaggtaactcgcaactggcaagttggtgctggctgttggctggtagttcattcagggctcagggcccaggaccaagagtcgtcaccatggcttgcttcagcctccttgaggcatgatggctgggtcccaagagaagagaaatagaaacttccagtctcttaaggcattggtctggaagctgggacggcatcacttttgccatattctgttggtaacgcagttacatcgccagattaaagggtaaagagatacaaattcccactgctcagtgcaaggaatatcagtgattttagggggccctgttttaaaacccctacaaggtgctaagcgtggatttctggggctttcttgttttttgtttttttctatgtgtttttttttttttttttggtggtggggtcagggagggcttatagggtatgttaaatcagcagaataattttatttatttatttggagatggagtttcactcttttgcctaagctggagtgaagtagcgtgatcagagatggagtttcactcttttgcctaagctggagtgaagtagcgtgatctcggctcactgcaacctccgccccgctggttcaagcaattcccctgccttagcctcccaagtagctgggattataggcacccaccgccacgcccggctaatttttatatttttagtagacatggggtttcgccatggctagtctggaattcctgacctcaggtgatccacccaccttggcctcccaaagtggtgggattacaggtatgagccactgtgcctgacctataatgttttttaaaaatcagttttggaaagtttgcagacattaacttttcaaatgtagcttccatttgattctttttctactctgcctctgatcctccacttatgtatgtatgctagatcttttattagatagtctgtgtctcttatgtactctactatattttgtattcttctgtctctccatgctttattctgtttactctttcctgattatattttttaattttgtaatttccatttgatgcttttttgatcattcaaaactcttcaccaaaattctaaatttccttttttaacctctcgaatgttatcacagttactttaaagtctattttggataacttaaatatttacagtcccctcacagatatgtttcttttgtatattgtttctgttggttttctttcatgtcttatctccacatatgcctggtgagttttgattatgtgttggtcattgtatttgcaagtatgctcgtagaaataatctggaatggccgggcgcagtggctcatgcctgtaatcccagcactttgggaggctgaggcaggtggatcacgagatcaggagatcaagaccatcctggctaacatggtgaaaccccatctctactaaaaatacaaaaaattagctgagcatggtggcacgttcctgtaatccctgctactcgggaggctgaggcaggagaatcacttgaaccaggaggcagaggttgcagtgagccgagatcacgccactgcactccagcctgggtgacagagcgagactccgtctcaaaaaaaaaaaaaaaaaaaaaaaaagaaataatctagagcctagtttgatgtttccttacaaagaatgaatttatttttgcttctcccattgcaactaggataacctcagtctagtttctggaactgaaatcacttgaggctgaactgtggtctctgtgagagcgtgtctgtgtatggctcacccttattcctaggctacgtagttctttaggaccctaacccaaagtaagagatgttcatcagggctctcctcttggcagacgcctgggctccagtccctgtgtcctgagccccatgaggctgttactggtgctgctcgtctgcccatcctctccagtaacagccacctgaacactgcaattcctgggtttccatcattccttccagcctggtgagtcatcagtgtcttttgaggtatccagtgcctgccagcagatgttttttaataatttgtccagcatttctggctgtcctcagtaggtggtctgtttcacattccctagtctgctgttaatggaaagtggaagttctgagagagaatcatcgttcccgtcagcattcaaatgcctgattacactttccccattcgctatcctttcctttatttgctcctcaccacagcaaaactcctcaaaaatatctatctttgcaatcttcagattctcacattgtgtccttaaacccactttaatcaggccttggttccctccattccactaaaagtaatgttgtcaaggtcgtgcatgcctccgtgatgctaattccagtgatgagttttcagttgtcattctctgacatatcggcaacacttgatgtggagtaccctgatgttgagaggctggtgagatgaaggaaaaacccagccaagggcaatgaggaatggcttccttccgcctcctccttccctatctttgttgtggtttttgttgtttctgtaacactgattacgttatagtttatttaatgtacttccttattctatgtttttactttagtcattttgttgatctcctccataataacataggctcgggccaagcacagtggctcacgcctgtaatcccagcactttgggagaccaagatgggtggatcacttgaggtgaggagttcgagaccagcctggccaacatggcgaaaccctgtgcctactaaaaatacaaaaattagctgggcgtggtagcaagcgcctgtaatcccagctactagggaggctgaagcaggagaattgcaggagaatcacttgaacccagggggcagaggttgcagtgagctgagatcgcgccactgcactccagcctgggtaacagagtgagactctgtctcaaaaaaaaaaaaaaaaaaaaggcttcaggagggcagagcattttatgcaattgttcattaattgacccctccatttggcacagatcacatgcccagtagttaactgttaatcaacgcactctctgtggaacaacaggctggtcccgttgagccaacactctctgggcactgccttcactagactctggctggctgctgcgcttgtagaggtatgcaagacaaaaccttttggtatgttaaaagccctggtcagaactttaagtaaccatcactgacatataatggttatggttttgaaagtgcttttatagtggtttttcatctgtcctcacagcacctctgggaggtaggtaggacaggtacagttagtctcatgtttcaaatggggctcagagagggaaaaggatttcccaagatcacacagcaccttagtagcaaaacttggactcaacctcaacacttaaaaatgaacaaagctggccgggcgcagtggctcatgcctgtaatcctagcactttgggaggcccaggcaggcaggtcacctgaggccaggagtttaagatcagcctggccaacatgacaaaactctgtctcttctaaaaatacaaaaaattagccgggcatggtggcgggtgcctgtaatcccagctactcaggaggctgaggcaggagaatcacttgaacctgggagatggaggctgcagtgagccgagatcgtgccattgtactccagcctgggcaacaagaatgaaactccatctcaaaaaaaaaaaaaagaaaagaaaagaaaaagaaaagtttccctttttttaaatatctcattttaatgactgcataatagtttattacatagttataccataatttatataatattttgttgctgtacatttaggttaaacaatacttacttagttcctactatgaagaggggccaagtactcgaggctggagctctcacatgtggcaatgaaattagaaagtggatatggcagggctgtggtaaaataaaatataaaaataataaatgatattaccaaagaaaaggaaagtttttcaaaataaaggaaaatctagacaagcatagtggctcacacctgtaatcccagtacttttggaggctgaggcaggaggaacacttgaggccaggagttcaagaccagcctgggcaacatagcaagaccccctgtcaacaaaaataaaaaaaaattaggccaggcacagtggctcacggtggctagtgcctgaaatcctagcactttgagaggctgaggggggtggattgcctgagctcaggagttcgagaccagcctgggcaacatggccaaaccccatctctactaaaaacacaaaaaattagccaggtgtggcagcacacgcctttaatcccagctactctggagactgaggtaggagaattgcttgaacccgggaggtgaaggtcgcagtgaggtgagattacaacactgcactccagcctgggtgacaaaatgagactctatctcaaaaaaaaaaaaaattagctgggcatggtggtgcatgcctgtaatcccagctactcaggaactaaggtaggaggatcccttcagcccaggaattcgaagatgcagtgagtcatgatcacaccaccgcaccccagcctgggttacagagcaagaccttgtctctaaaaaacaaagaaagtctaacctaaacgccattatgtcatttacatgtgtataggggtgtgtgtgtgtgtgtgtgtgtgtgtgtgtgtgtgtgtgtgtgtgtgtgtttgcttgggaggggagtcgggctggagctggccaggccgcagcctggggaccttctgattccagcagggatgtgggccgagggtcccgccttactcatttcgggtcttgctcctctgtcctggctctacagactcttccagctggagttggaggctgacgccctagtgaatttccatcagtattcttcccagctgctacccttctatgagagctcccctcaggtcctgcacactgaggtcctgcagcacctgaccgacctcatccgtaaccaccccagctggtcagtggcccacctggctgtggagctagggatccgcgagtgcttccatcacagccgtatcatcaggtgagcaagggaacaagaccatttggacaacgtgtgtgtacctgcttgtgtgggcagtgggggccgcaggcctcggttcccctccatagtttgacttaaaaaggagcagggcctggcatggtcgctcactaacgcagtcccagcactttgggaggctgaggagggaggatcacttgagactaggagttcaagaccagcctggcaaaatagcaagaccttgtctctacgaaaaaattaaaaaattagcatgtgtctatactcctagctacttgggatgctgaggcaggaggattgcttgagcccaggagttagagtttacagtgagctatgattgcaccactgcacttcagcctgggtgacagaatgagaccttgtctctaggaaaaaaaaaaaaaaaaaaaaaaaggtgctgcgttgctaccagattaaaatgtaagaaggacaatgtaatgtttccagagtccggagtgctcaccaggtgccaggtctgtgggagctgatttctacccaccatgaaattgaattttcccaacccccacaaggtatcgtcattttattttactttattttattttattttattttattttattttattttattttatgttacgttatgttattttattttgagacggagtcttattctgtcacccaggctggagtgcagtggcgcgatcttggctcactgcaccctctgcctcctgggttcaggtgattctcctgcctcagcctccggaatagctgggattacagtaatgtgccatcatgcccgggtaattttttttttttttttttttttttttgagacggagtctcgctctgtcgcccaggctggagtgcagtggcgcgatctcggctcactgcaagctccgcctcccgggttcacgccattctcctgcctcagcctcccgcgtagctgggactacaggcgcccgccaccacgcccggctaatttttttgtgttttttagtagagacggggtttcaccatgttggccaggttggtctcgaactcctaacctcaggtgatctgccctccttggcctcccaaagtgccgggattacaggcgtgagccaccatgcccggcccaggtatcatcattctagagagagctaacaggacttgtgcaggtcactcagccagagagggtgaaagaggggcttggatccttggtgtctgcccaggctgctcttctggaagctgaaggcctccttttgtgaatccattcagccagcagatggagcagctgttgcccctggtgagggcactgtccccacccttgcacagggcaccagttggccatcttgtgcagaggtagccacacctcctctgagtctctatcctagatagctcagttaagctcccaggcccagaactcaaaacctcactgctggccgggcgtggtggctcacacctgtaatcccagcactttgtgaggccgaggcgggtgtatcacttgaggtcaggagtttgagaccagcctggccaacgtggtgaaaccccgtctctactaaaaatacaaaaaattagcaaggcgtggtggcgcacgcctgtaatcccagctactcgggaggctgaggcaggagaattgcttgaacccagaggcggaggttgcagtgagccgagattgtgtcactgcattacagcctgggcaacaagagtgaaactccacctcaaaaaaacaaaacaaaacaaaaaccctcactgcactttagtttccaggcgtgcttttggacagcactgtctcatctcaccatcactctgtccatttcctggggcaggcacagcagcttgtgtcgataaggatattgacgcccagaaaggttaagtgaattgcctgaggctagtgagatatccgtgttctgtgaccctttcctgtgccaccaccctgcccacttcctgctggtgtggccctggggcccatctcttgtacgagtgagcaaactgaacagaaacctgatacaggtcacatcagatataattacattcaaatcagcccaactagctgagtggcgggaatgctcttgagctcaaataaaccagaaagtccgagtttccgagtgcacttccctgcatgtgcacttaggtccccctgccaccttgtaccacacctgctcacctctgctcaccctggccctctcctgcagctgtgccaattgcgcggagaacgaggagggctgcacacccctgcacctggcctgccgcaagggtgatggggagatcctggtggagctggtgcagtactgccacactcagatggatgtcaccgactacaagggagagaccgtcttccattatgctgtccagggtgacaattctcaggtgctgcaggtgagcagggggaggggcagggtgactggtactgatacctcccggtgtccacggttccctttgggcccctaggctcaggtgtcactctcaggcctctcactgtcccccattggtccttgaggcctgagctccttcatggagggtgcagacccctccctggctcttccctcccagcccttttccaggagccacgtcctcagtctctttgcttgataaacctggggacggcctccaacccagcaaaataaaccccaaaaaaggcccagctccagtcagttagttcagttccacttttcctgagcacaaactgtgagccagatgcctgcctggaggggctcgtgggccagcgggacctgggcttaaccttttgcaagcttgtccaatctgtggccctgcaggctgcatgcagcccaggacggctttgaatgtggcccaacacaaattcacaaactttcttaaaacattatgagatccatgcatggaccttttttttagatcagctgttgttagcgttcatgtattttatgtgtgacccaagacaattcttctgatgtggcccagggaggccaaaatattggacaaccctattttacaggaattcaaaccaagcaaaccaaactgtctccagttcctgtaggcatttgtgccagaggccctcctgttaacgtttttgattacctgggcaaaagatgtgattttttaattgtgggcaagcagatggggtgatactattaaatagctatttcatatattagattgaacagaaaaggcaggatgttggattatgttttattgtctagaattagaaaattcttctaaagatcatgttctctctgccttggcatcagaatgcaactacgttataccagaaaatgtggattcctttttttttttttttttttttttttttgagacagagtttccctatgtctcccaggctagagtgcagtggtgcgatctcggctcactgcaacctccacctcctgggttgaagtgatgctcgtgcctcagcttcctgagtagctgggattacaggcatgtgccaccatgcctgggtagtttccgtatttttagtagggatggggttttgccatgttgcccaggctggtctccaactcctggccttaagtgatccacctgcctcagcctcccaaaatgccgggattacaggtgtgagccactgtgcccggcccagaaaatgtggattcatatcttatgcttcttgctctcagggaagggaattctccacccactgttgaactccactttcaccgagaatcctctgcgcacccagcatggtgccgcgcagaccctgcctccatgcgggggtgtgcacacccgcttctcgatagtcatgcacgactgcagctgtcctttatccggtgctgattggtgcctgaccttgaactgagtgttgtatgtgttccagttaattcttagaatacactcatggggtggaggtcattattcccctttcctctccgaagaaactgaggttcagtgttgttaattaagaagcgtgcccagggagggccacaaagctgagagagtggggcttgaccttacattggcctcgatgccagccctttgctcttcctgctgtgtctctggcctgccttcaggtccagtgggactgctgtgaggtgaccctggtgtcacatgggtacactgtggttgtaatgaacctcatggggacagcactgagccaaaagtgagacagtaaaaccctcctagcactttcttttttttgagacagcatctagctctgtcgcccaggctggagtgcagtggtgtgattgtggctcactgcagcctcaacctcctggactcaggtgatcctcccacctcagcctcctgagcagctgggactacaggctcgtgccaccacatgggctaattttttttttttttgagacggagtcttgctctgtcgcccaggctggagtgcagtggcgcgatcttggctcactgcaagctctgcctcccgggttcatgccatcctcctgcctcagcctccagagtagctgggactacaggcgcccgccaccacacccggctaattttttttgtatttttagtagagacagggtttcaccgtgttcgccaggatggtcttggtctcctgaccttgtgatccgcctgcctcggcctcccaaagtgctgggattacaggcgtgagccaccacacccaggccacgccagctaatttttaaaatttttttggtaaagatggggtctccctatgttgccgaggctggtatcacactcttggtctcaagtgatcctctcacctcccagtgtgttggaattacaagcatgagccactgcgcctggcccctggctctctttttaatactgctgttctttcattgaaaacatagtacctgcatgtagaaaaaaatcagtcaggacagaatgaaaagcaagaatcattcccacctggacccccagtgcccatcctgagatacagctaccttttaagttccttgactcagaaatgtttcatgtgagccacagtcatgccaggtcgaccccttccctcccatccacactggcacttggctttcctggtgcttctctttacgttctttttttttagacagagtttttgctctattgcccaggctagagtgcaatgatgcaatctcagctcactgcaacctctgcctcctgggttcaagcgattctctttcctcaggttcctgagtagctgggattacaggtgcctgccaccatgcccggctaatttttgtatcgttagaagagacgacatttcaccatgttggccaggctggtctcaaactcttgacctcaggtgatccacccaccttggcctcccaaagtgctaggattacaggcatgagccactgcgcccggcctctttacgttcttatcagcatcctatggagtcaaacttcccttcctctttcatcagctccttggaaggaacgcagtggctggcctgaaccaggtgaataaccaagggctgaccccgctgcacctggcctgccagctggggaagcaggagatggtccgcgtg

SEQ ID NO: 15716 - DNA, 36237 bp, Homo sapiens
ttgtttgcggaagtaggaggaagtagaagtgctgagtaagccgaggtgagtgacctcgcgggtgggcggggcctgggggtccgttccccaacttcctcggcgctccggactcccaagtctccgccggaccctcctttggatattcctcgtgtctccgattctgaggcatgtcctccattaacccttatgtgactccctgagtgcccccaccttccatcttttcatccccctgcgtccccaattcccatcccgagaccgcccgtgtctcatctcgaacttgtggaccccagggaccccagcttcgaccctgagtttctcccctgaaccccagtctcctccgtgtgtctccctcagtatccctaacttcccgagtcaatccatctcttctctttccccgaccctcagtgcctctttaggccccattggccgtcctaattttccttcctgtgctcctctaagtgctcacttgattccccacttcacgtccgtctccacctttcgtggtgcctctactcatttctcactccctgcttctcctgcctttcctccctgctttttttccttgcctttcctctctcgcgtgcctccagacctgcccccgacatgctccctccttcccctcagcctggccaccccagagtctcccacccctaatcctgtgtccacctcctgctcccacagatgacttggaagctggtgacagggagcatgtgaccagggtgatcatgggactgggtcggggcaagcctgtgggtgtgggacagggagggcacagggcaaggggacctgtggccgtatttttaatgggctacccacatgaccccaacgaatacctccccctagcttctgggtctttccctcacctgcctcttacccgcccaacaggatgtcaggcaggttcggtttggcaacgttgaggctgcacccttgggctgaatgcattgtttttgaatgcattgtttttgttagagtttctgcctggagtttggaacctgttttctgtccaagtctcagtttcctcatctgtgacaggggaactgtacctcctgccctcgtaagtctgccatgaggttcaaaatttgaatgagaaaatgtagaaggtaaagctttataaccagtatggccctgtacaaatacatgattttactgttgggtcataggcagaattgaaaggagtggaaagggaaagggctagaatgagaagacaaggagagaaggatgagcaggaggtcccttgtctttcagtgtatcatttggcagtgtttgttcatcacctcttgtgagtcaggctcttctgtatatgttctcttcaccattcattcagtcatcgtttatctaacaaatatttacggactgtctgatgttctaggctacccttggtgtggccaatgatattctcacttcacatgagaaaaagagggcgcatgagttgcttgaggtcacaccgatgaggttgaagctggaatctgacaccagagcctgtgtgattgtcctgatgtgtaaggtttgctactgtttaggacacttcttgttccttccgtggattactttcttgttacatgagagactccccaaaagggagtttccctcttactcagcagaatgacatcactaagagatacagaaaggagaaatttaaatactctgtgtgtgtgtgtgtgtgtgtgtgtgtgtgtgtgtgtgtgtgtctgcagacatctattgggtgtgtgtgctgggggaagtaggtaggcaaggagtaaggggccgtagtgaagagtgtgttacaaacttcactttgtagagggtggctccctgggagaatatgttctgtgtctttcacagtggattttgatagggtcatgtcttaaatgcctcttctcgttttcggatggtgatctcatccagtcttatttctttaagtgccgtctctattctgtcagcccacaaatttatatccccagtccagtccagacctttccctggaatgacatactcaaatctagttgcttactcagcacctcaaacttaggcttttcaaacttgaagtatttatttattgatttatttattttttgagacagagtctcactctgtcacccaggctggaatgcaatggcacgatctcggctcactgcaacctccacctcctgattctcctgcctcagcctcccaagtagctgggattacaagcatgcgccatcatgcccaactaatttttgtatttttgtagaggcggggtttcaccgtgttggccaggctggtctcgaactcctgatctcaagtgatccacctgccttggcctcccaaagtggtgggattacaggtgtgagccaccgcgccaggcctcaaacttaagagtttagaattgagctcctgttagttctgccctccatccctgaccccactcttcaccaaaacatgtccctcccactctctttctcatcttaggacataggagtattgttcattcagttgctcaggtcaaagctgtgagattatctatgatgcctctctgtttcttaccccacacccagccagagtgatcttgttaaaatgttgtttctttgcagtggcctctcctctcatggcacatgcctggccccctgttgcctctctgatgtcactggcttccttgcttttcctggaactcgctaaacatgttccagccccatggcctttgcacacgctctctttgcctagctattcatatgactttcatctctctccatcaggtatttatttaagatcaatttcttggtgaagacttctctcctcacccaatctaaaatttcactctccacctcagcacttcctatccccattctctggtttttctcctcagtagttaattgtcatctaaaacctttgtaaatatttacctgtttatcttctttattattagtagctctgtctaaaatataagttccaggatgtcagggattttgtggggttttttttggttggttggttgttttggttttgagacagggtctcactctgttgcccaggctggagcgcagtggtgcgatctcagctcactgcagcctccgcctcctgggtttgagtgattctcccacctcagtctcccaggaagctggaattacaggtgcacgccaccacacccagctaatttttgtattttttggtagagatggggtttcactatgttggccaggccggtcttgaactcttgacctcaagtgatccacccgcctcggcctcccaaagttctgggattactggtgtgagccaccgcgcccggccttgttttgttttaagacagggtctcactgtcgctcaggctggattgcagtggcacaatcacagctcactgcagcctcgacctgctagacttaagcaatccccccacctcagccaccttagtagctgggacttacaggcatgagagataccatgcctgggtaattgttaagtttttgtagaggtgaggtctcactatattacccaggctggtctcaaagtcctgagcttaagtgatcctccttccttggcctcctaaagtgctgggattacaggagtgaactgccgtgcctgaccagtctgttttgtttacgattgtatcctcagcggttagaacaatgcctgccacaatccatctcagtaaatatttgtggagtgagtcataacatgggccacactgtaccgtgccaccagcccaaagatctcttaaagtcacccctgtctcatgtgcttgggagctccagtgacagtttcggggcagtttgcttccagctgtggtccagccaagcggagtgaatgaaagagatgctttttccttttgtgaaaggacgttttgctctggctcacgtgagcagcagtgcattttgagacgagggccttggcttttggaatctaagagcctgttgagcaagcctcgctcagccaccttctttcagctttctcctgaaggcagtttgaggattaagagcctgatgctctggattccacctaattgggttcagatcctggcaaactgtgtaacctgtgccccagtttcctgtgtaatgtggagagacctggaccttttcttacaggtgtttggagggttaaatgtggcaattcggccgggcgcagtggctcatgcctgtaaccccagcactttgggaggtggaggtgggcggatcaccggaggtcaggagttcaagaccagcctggttaacatggtgaaaccccgtttctactaaaaatacaaaaaattagccgagtgtggtggtgcgcgcctgtaatcccagctagtctggagactgaggcaggagaatcgcttgaacccgggaggcagaggttgcagtgagccaagatcacgccattgcactccagcttgggcaacaagagtgaaactctgtctcaaaaaaaaaaaaaaaaaaaaagtggcaatttacccgaaactgtggtgaagcgtctggcgccctgtgggtgctgggcagcagtgggtgctgatggggtgtgaggggatgggatcaagccctttcccactaacttaggaaagaggttggaatgagctggggtcagagggaacatttgcggggacattttgccgggaggctgccttggaggttcagaggctcagatgacccctgtgttcattcagtgttttctcacccacagattgagcacctgctgtgtggccagccctttgcctagtgctgttcaagagtcagaggacataggcaggcaatcccccaccacaacctgccaccccatttcctctcttggggccttgatttctccacatgccaaacagggagaatgattgcaccttccttgtttctttttttttttttttgagacagtctcactttgtcatccaagctttagtgcagtggcatgatctcggctcactgcagcctctgcctctcgggttcaaagattctcctgcttcagcctcccaagtagctgtgattataggcacccaccatcacgccaggctaattttttttgtagttttagtagagatggggtttttttctcacacgttggccaggctggtcttgaacttctgacctcaggtgatctgcccatctcaccctcccaaagtgctgggattacaggtgtgagccaccgcgcccggctgcgccttccctgtttctttgtgagcttggaggtggatcacaagtgtgaaaccctttgccaaccgtgaggcatggtggccttgtgagaggacggaggccggtgtgtggtggcatgctcccgtgctgtgtggcacagacggagctacaggaaggaagttggggcagcttggcactctgagtggaccctgagtttccagcctgctctgtcttgactgggtgggaggagggtgctcaggagggtgtcactgctgccaggttctgctgccaggaccatccaacagttgttccaatcatgggacatcctgtcgtcagcagctggggctcgtgaggcctgatttccacctcgggcagttctgtgtgtgctcctggaatcccccacgtggccaagcctgtgaggtctgcttcctggcctgctgcctgtgggttcctgtcacgcacctctcgggcagctgtccggctcctctgctctcggcttagtcaagaaggaagcagaaggcttggagtctttcctgcttggactaggagtgagctcagcctaagtgccctgactatatataaagctgaactttccagaccgaagcctggggatggatcagtccgatcacttagggccgctcctgaaggagtgcaggtgctagatacaggttctcccggtggaggagcgaaccccttgtgggccgttagctactggtgggatttgagcatggtatttccctatccgttgtggagaggagcatggcagctcagagtgggtgggaacagtgtgtggtccctgttatcaccttcaagggaataaagtgtgtctgggggcttcagaggtgctggccccatgggcttataggtggttcattcattcattctcattcattcattcaccaaacttattaaacacccactgtgagtcaggaacatcatgccaggtgcttagggaaacaaatcaaagcgggttgggtgagcagcccaagccaacagatgcacccccattctcacatggtgtgtgttcctgtgggctgggccctgggtggtgtggggtgctggggagaagaggaaggcacaccaggctgcagggcggaggtgcgggtatgaattttcagaggagatggcacctgagctgtatcttcatggataagaagagatttgttcatttgtcctttgtggagcacacattcaggttaagaaagtggggaggatgggctacgctgatggagcgtatgtgtggtatccccaagtgcactgagacacgagtttgacgtgttctgggaagatcgatggtgcggcgtggctggagtagaggtgagggatgagttggaggggtgagttgggccagctctcatggatgctggagtctgggctttccctgggaggtcatggggcgccactggccagggtcagcagggagacctgcagctggatttgcatcgtacagtgggcatggaggggtgtcaggctgggttgggaaccgtgcaggctggaagggcactctggtgctctgagcattcagagggggcagctgggccttgaaggatgagcaggggctccagcaggaactggagagcgcattccagggaggacgcaagtgcaggcccctttcactacagaaaagcagttttcacacagaccttccaaaggggaggagaggggactgcctgggcctggcagctgcggcaggtagcagcaatcagagggcagggaccgctcctcccgtgcctgagacctgcccagggtccttcagggaattcgtagctgaggaggaaccagatttttgggactgagttctccctcaccacccgctctgagccaccctcttggtcccttgtcctctactgcacttcttccggggcttggctcctcgtcatgagaggagcttccctgggcatggcgaggggcgtgactgacatagcagccctggacaagtggctccaggtgacctgtgttcacgttgatcacagcactaaccacggcccctcctctcagcaccttcccctctcgagccgtccagtcccagtgaaaatgctcaccgttcatgggtgggctgagcaagcccctgatctctgccttcctccgtgttctgatctgcttcatctgctgtgaaggcctctcgccatttcccccgctggcaaactcctgttcttcctggaaagttcagctaaaaagtcatcccctttaggggtccttccctcaggggaccgtgcacttggcgagacagggactggtcttgggtctctctgttgactgttttatgaacccaggtagtcacttccagggaactcatcagagatgctaccattggctccaatctccctctgttcccactcgaggttttttgtttcttcgtttgtttttctttctttctttttttttgagacagagtctcgctctcgcccaggctggagtgcagtgacatgatctcggctcactgcaagctccgcctcccgggttcacgccattctcctgcctcagcctcccgaatagctgggactacaggcacccgccaccacgcccagctaattttttttgtatttttagtagagacggggtttcaccatgttagccaggatggtctcaatctcctgatttcgtgatccgcccgccttaacctcccaaagtgctgggattacaggcgtgagccactgcgcccagcccgtttgtttttgttttttggtggacatcaactttaatttgccctttgttttgttttgtttttgaggcagggtcttgctctgtctcccaggctggagtgcagtagtgcaatcttggctcactgcagtctcgacctcaagaggatcaagcaatcctcttgccttagcctcccgagtagctgggaccacaggcgcacaccaccatgcccagctaattttattttatattttgtagagacagggttttgccatgttccccaggctggtctcaaattcctgggctcaagcaatccgtctgcctcagcctcccaaaatgctggaattacaggcacgagccactgtgcccggccttaatttgccctttgaacatgtacaattcagggcctctctgggcctcagtttcttgatctctgagatgggaagatgggataataatacttgttcctcccgtccttcagctcctccaggggaccctcacaccagcacactctctgtcagtcttccctcaatgaacccagcaggcaagcttggttttgacagaggatgggtgagcagagataaggaaaacggccagaaatatctggcttccctcagcaggggcaccaaaattggtacctggaaattgcctggcttggacaggcagaattgtcactgtcaacccccaccaccaaaggtcttgggtctttgtctttctgcttgtggtgtttgagagagctgcttgacacagccgaggtgcggtctgtgtcaggtgacctgggcatcctgggggtgcagggagaagcccaggtaaggaggaggaggggccggtcatcagtggggaaaagtgattgtctaccccacgggaaggtcaagggtaggacgctgtgagaagccagggggagagatgaagtgaggcatgatgcggggggccctcatccaccatccccctcttgcagctgtgctgggaagagcctaggctccagggtccaaggtggcagggacagaaggaagcacgtgtgagcactttctccctgctggcccgccttcctggttggcaatgccgtgagtgttccaggatgtggccccgtggctgtcatttcctttcttccacctagtgataacaatggccactgtttgtgtgcccacagtcggcctgtgtcccagacaccttccctccattgcgtcatctcgtcctcctgcctaccctgaaggctggatgccagccaagcctgtcgtttctgtggccatgctgtcgtgggtgtgtggggggcatcccctagccccaggctctggtggggggtacacaggctgggccattgacgaaggggtgtgtggaatctttctttgatttcactgcacccctggtgactttctccctcaatctgaggctcatgggtgctggatgctcttgactctctgcccttcctgggcgcacccctccgcgtccctgtgggcccgtcctcggggtagcctctctgcgctcttccaggccaggcctgagtcccacaggtccccatcttcccggctgcagcccccagaggctcagcctatactgctacttcctttgaaaactataatcgctttacatagcatctggaaaatagggaaaaggaaaaaacaaaagcccataaacccagcaccctcatctactcaatggcatgttttctgtcagtctatcttggtttgttttctatcaggctttgttttttctatgcataatatttactcagttaaatttttgttttgacaaactttctgtgagccaagcttgtggacggagatgaaaagacgagcagctgcctttgagaaactcagactctgggccagcccatctgggtgccagctttcactgctccacccactagctgggtgaccctgggcccgtgactttacccctctgttctttggtgttctcatatgtaaaatgaggataataatagtaaccagttcatagagtggttgtcagacagaatgattaatgtacgtaaagctttcaggatggtgccagcaagatgcacaggagtgtttggtaggaggatgacgaagcttaccgtctggcaggaggggcagttgtaacatgctgggctgtgatagtacagatgtgtttaaagtgagggagagcccagagcaaggagagagaacctggcatctggtgatggtgtatcaagaacattttaggccagacacggtgactcacacctgtaatcccagcactttgagaggctgaggcaggcagatcgcttgaacccgggcgttcgagaccagcctgagcaacgtggtaagaccctgtctttataatttttttttttttttttctgagacggagtcttcactctgtcacctaggctggagtgcggtggtgctatcttggctcactgcaacctccacctcccgggctcaagtgattctcctgcctcagtctcccaagtagctgggattataggtgcccaccaccatgcccagctaatttttttatatttttagtagagacggagtttcaccatgttggtcaggctggtctcaaattcctgacctcaagtgatctgccctcctcagcctcccagagtgctgggattacgggcatgagccaccatgcctggcctctataaaaattgtttggaagaaattacctaggcctggtgatacacacctgtagtcctagctactcaggaggctgaggtggaaggaggtagaggctgcagtgagccatgattgagccactgtactccagcctgggcaacagagccagaccctgtttcaaaacaacaacaacaaaaacatttttaaggaggaggctgagaaccacgagaaccaagcttggatttgaagaaggatcagggctttctcagacagaaaaggagaggaagaacattccagatagacatcattgagagatggcactgagccttgtaatgggacactgcgaacttttcttcagttgttatgatctttttttttttttttttgagacggagtttcgctcttgttgcccaggctggagtgcaatggcgccatctcagctcaccgcaacctccgcctcccaggttcaagcgattcttctgcctcagcctcccaagtagctgggattacaggcatgcgccaccatgcctggctaattttttgtatttttagtagagacggggtttctccatgttggtcaggctggtctcaaactcctgacctcaggtgatccgcccgagtcggcctcccaaagtgctgggattacaggcgtgaaccaccgtgccttgttggtataattattagtattgatcttttttccttttcatgtgcctcttagtgggccccttgcttttgtcttccttctgtccccagggttgatcctgtgctcagcacataggccagggaagaatgtggctgtgacccagtgtccactcagatgtcctctctcccccagggcacccatactctgtccttagtgtcttttgtctggtgacatcttggcacagaggcagagggcggcctccgtctgattggcgcctggctttggtgacagtaccttaggaaggcagtgtattttctgggaacctaggaaataacaaggtatctaattccatcatcaacactggggacaatttccatggcagaaactatgactctgaatatgcagcgtaaagttaccacccagacactgctgctcctgagtctcgaatggcatcttctgcaggggctcccccacctgcccctgcagaaggtgcagttcgttcatttccaaggagcttgcttttgtgtgctgtctctcggagctctttgggaaacctgtggtagcaggaaacaaaggatttagaccaatgccgatgatccccttgctccgatagagtgtgacatgatgctggtcaccttttggtatctaggaggggggacattgattttgtttgcggaagtgaaatgatccatgctggcctctttttttttttttttttttgagacagagtcaccctatcgcccaggctggagtgcagtggcgcgatctcagctcactgcaacctctgcctcccgggttcaagtgattctcctgcctcagcttcccgggcagctgggactacaggcgcctgccaccacatctggctaatttttgtatttttagtagaggcagggtttcgccatgttggccaggctggtctcgaatttctgacctcaaatgatccgcccgcctcagcctctcgaagtgctgggattacatgcctgagccactgtgtctggtccatactagcctctttgagtgctgaaaggttatctctgtaacttatttagtgagaaccctccatttgcccagggcattactgcctataatgtatgttcacatgtgctatctcctttggtcaataccacacactacaggtgaggaaactgagtctctgctgggacactgggtcaggaagcaggcagttaaggtcacctgtgcacagtggcagcacagggggacagccttctaggtagccagcctggcctgagggttctgtcacttttacctcccactcagtgttgtttctctttctttcccctccttttaagatccctccaggcccaggatctggggacaacgctggtggggagtgatctgggtgtctgtgcaggaaaccgctgcactgggtgagatgggcatgggagactgtgcctggctgaccagagacctcgttttcttccagacagagggggaagacggtggggcctccccacctgccccgcagaagatgcagttctttggccgcctggtcaataccttcagtggcgtcaccaacttgttctctaacccattccgggtgaaggaggtggctgtggccgactacacctcgagtgaccgagttcgggaggaagggcagctgattctgttccagaacactcccaaccgcacctgggactgcgtcctggtcaaccccaggaactcacagagtggattccggtgggtgatgctcagcgggaacatacttctctcctttcactcccccacgtctcggattggaggtcttattggccgagaagcagtttctttgagtctctgtctgaggggtctggagaggggtgggagagaggggagactgtactcttggaccagagggaagggcttccgagactccacacttctggcccatcagtgtcccagcacgaggctgaggatggaagcctgggttgtttctggcctggaggctcgacctatatggacaaagggaagaaggaaggacagggagactgagagtgtccacatcagataaggcccatggggagaacctttagccctggctctttatttttggttttggtttttgttttttgagacagtcttgctctgttgcccaggctggagtgcagtggcgcaatctcggctcactgcaacctctgcctcccaggttcaagcgattctcctgcctcagcctcctgagtagctgggattacaggcacccaccaccacgcccagctgatttttgtatttttagcagagacggggtttcatcatattggccaggctggtctcaaactcctgacctcaggtgatctgcccaccttggcctcccaaagtgctgggattgcaggcgtgagccactgcacctggcctagccctggctctttaagggcatggccgttctcataggggctgcccagggtttgcttaggaaggctggacagagctgttgcctcttggggcatgctgggactcccctgggcctgaagagaaggctcaaaagccaggacaggcctgagggaaccgggccaacggcagagctggttgggaaaaggggagaagcagccaaggttccaaatgcaggccccagcagtgcttggcagactggcatctagttgggctcagacagatatccctgtttccgctcacctatccatctggctgtcctgtcagccatccattcaacatgcaccaagcacctccagtgtctccagagtcctgggcttcgggccagtcctggctggcctgtgagatgacaaacatgtcctgtgtctttaaggaacgtacagtctggtgggggaggtccggtgcaaacaggcgtcatagcaccccttgaggagtgctgtgacagagggagagcctaggaaacagtgtggatcacaaggaggtgattgagagctactctgcgtctggaagagtgaggaggagcctgtgtggcagaacaaaatggataaggtcgttccagccgtgcagaagtgtggaggtgtgagcctgcaggcaggtggctctggttggatcccaggtgcatgcagggctttggtgagagtgaggctgaaggaagcagctggggactcattctgactaaagaggcatggcaggaggggtctctgaaagtgtcaggctgggggccaggggctgccaccaacagaagagcaaggcaggtatcagggccccatccaatcaggtgagaattcagagcctggctccacaaggaacctgaggcagaggcacccacagcaggtgcttgggctaaatgcagctcagtggccagtgcaggcaccagttttaatacagtggggccattccagattctgagtgcagatggggctgagcagaccgccttccagctggactcgatcaggactgaccctggacggggcaggcttgcacttgtagcttcagagctccactgcaggcacagctgaccagggcagcgggtccactccttggagagctggacagccccacttttgaggtacacggccctggggataccactaatctccacgtaccaataatcaccaagttctgtcagttgtaaaatcccttgacaggattccagatttgtctcagccagcttaagccccagtgtgggcagacctccatcccaggaggatttagtcctttgtcagcagcttcttagctacacgtaagctattctgtggtactttatagtttacaggattttttgttttcttttttttttttttttgagacagagtctcgctctgtcacccaggctggagtacagtgacgcgatctcggcttactgcaagctccgcctcccaggttcacgccattctcctgcctcagcctcccaagtagctgggactacaggcacccgccaccacgcctggctaatattttgtatttttagtagagatggggtttcaccatgttagccaggatggtctcaatctcctgacctcgtgatccgcctgcctcggcctcccaaagtgctgggattacaattttacaggatgtttttaagtatgttgggttagcacattctctgccaatccgtggaggtgggcaaggaaggcagtattccattttatgcatgagaaaatagccttgggatgataagtgattcatcccacttatacacaggaagcagtgaagaaacagaatcagtgtcttctggttcccaattcatttctctgtgctgctgtgttgtttccatgtatgtatgtatgtatttatttttttgagacgttaagtcttgctctgttgcccaggctggagtgcagtggcatgatcttggcttacagcaacctctgcctcctgggttcaagctattcttctgcctcagcctcccgagtagctgagactacaggtgcgtgccaccatacctggctaatttttgtgttttttagtagagacagggtttcactgtgttagccaggatggtcttgaactcctgacctcgtgatctgcctgccttggcctcccaaagtgctgggattacaggcatgagtcaccatgcccggctttgtttgtcttatttctaaattttattgatttatttattttcacagtcatagctctggagtcttttttatcttctcccctctaacctgctcccacccgaacctttccatttcagcagatagcatcattgcaacgggctgtgccagatccagccatcacatccacctttccagccaaagggagggtggaagggcaggatgcagaaggtcaatctccccctcctcagggacatttcatggaagttgcacgcattggccagaacccggtcacatggccacagctaactgcaaaggatgctgggaagtgttgcctgtgttgcagacagccacgtgccagtcgaaaatcagaggttctttctccctccgtcttgctgctggctcgcttctccagaccacagtcattgtgcacgtgtctcctgctgctccggctgtggcctgcactcctctcatcctcttccaagctgctgtcacagcgctgtttccagagggcaaatctgattggtcactcccctgctttactccccaagggcttcctgttttcttttatttttatttttattttcattttttgagatggagtctcgctctgtcgctcaggctggagtgcagtggcacaatgtcagctcactgcaagatctgcctcctgggttcatgccattctcctgcctcagcctcccaagtagctgggactacaggcgcccgccaccacgcccagttaattttttttgtatttttagtagagacggggtttcaccatctactcttagccaggatggtctcgatctcctgaccttgtgatctgcccgcctcagcctcccaaagtgctgggattacaggagtgagccaccgcgcccggccagcttcctgttttcttaacacatcaggtgcttaatgacttaaaagggcccagtgtgatcaagtttctgcctctgtgttctcagctcatgccgccttgtgctcctggcctttgcccaggctcttgctgtggcctggaatactcccctttctttgcctgccttccttcctcttgccctcccctgacctgcaggctggattaggagtttctgctgggcatcccatggcacccgtccctgcactggggatcctgctttcctggtaggccacagaccttgtgaggggagggactgtgtctgttgggttcatgacagtgtgcccagcccccagcaggtgcctggcgtagatcaggtttgtggaacaaatgaatgtgatatattaatttagctttagagtattcattgagggctgctgtgtgccaggccctctgtgccacctgggtggagggtggaggactgttgcattgagggcagttgaaggagtgagctgggaagtgggaggtggaggatggggactgggatgcagggtttgaggttatcaggggtcccagaagcagtaatgccaaggcctaggctgtgacctggagtgagggctgcgatggggtggggtggggtcgaggctgtggaggagggtcatcagggcactgctggagccctggggttctccagggccgggggtggtcattgcagtgttctcccagctcctctcaacaccctgcggtctgtggagagcaggcctggtgcactggacttgcctctggccagggctgagtttctgccttctaaacgatcttcctcctgtgttgccctagaggcctctggactgtcctgagtacttgacgcgtgttagagtgagcatgggctgctagccttccgctccaggtggaggagtttctgttgttcttttgctgctgttgctgcagtgagctgccaggctgagcttctggatggacctgggggatggaattaggagcttctgaattcttgggttgtataacctaaggccggagagtcccacagcactgctgctgggcggagagactggaccctgctgatacagacagcgacagcagcaggagcatctgcagtttcccagcaggtcctgcatgcctgggcttggcactagtctaagtagtaactcatgttatcctcacgacagtcccacgaggtggggtcattactgacctcctattacagatgaggaaacagaggcttgcagaatttgagatcacacagctggtcagcgtagcgattattcagaccctgtcacctggctccagaacccactcgtttacctttcttacatcagggctgctttgtagtgtggcgagctgagtggagctccacccgcctgggctgatcctggcccttcctgcctgacctatggtgcgggggccctggctctccccgtgtgagcccccaggggtcacttgtaatatgcctgtgtacactatgatagcatagatacttctgttcctggtacagattaatcatttacggctggcattgacttgtaacagatgacatttgatgaaatcaaccagcctctcactggtatctcagcagaaacagggctgtacctcccaggcatcctgggaaggatgatagaagtgtgtgatctgtgcttccctaccgggagctgacttttgaggctctctggactgggactttgccataaaactgcttatcagaaacctcagataagtggagtgccctgtgtcctggccacgtactctggggccagctcctccatccattcagtcctcccacatcccatcttcaccaagcagagtggaaagcggcaggtctctgcgagaaaaggaggctctgtacccagccttcagtgagataactttagagtggggccttgtattccctacacaggccttgtccccgacacggcctctttgcccttgcttctccttctgctaagaatgctccttcccaactccttggctggacacacggctcctgctctgtgggcctgtcctgttcccactcagagcctcagcaccccccatgtggccaagacacagcccctcttgccttaggttgccgtgggtctgtttccacatctgtttcccctccagactgcagggctcctgagggacagggcctggggccaagtctcctctgcgttcctgatgcctggtggtgtgccacgctctccgtgggtgcacggtaaatatctgccgagtggctagatgtatccatggttgctgaaggccaagtgtgttgaccagagggcgtgggaaaggctccactggggtggctggggtagagatagaccttaaggggtccagaagactccaccagctggagggaaaggccctacagagacaaggtactaggaaaggcccagaggacagaggaggggccctgtggggagcctgtgggcaggaagggcctgtgctgggctttgaaactggggactcaggtactgctctagcgtgagggtccttggcattttttttggtccaggaccccctgaggtccctggggaatgagaacaggctcacacagccactttcaagaggtttgcaggtcccctgaggcttagccacagacccctcccaccccagcagagacacagcagaggcttctgagtggaggccaggtggcttcagcctggggttctagaagggagggaagagacacacccccgtgtgtcctccagagcctcagccttctccctgaatctcccctttgcctcctcactgtaacccacacctggctctccttgaaggacccgcttgccccgcagcctcctgagagttttctctcccagtccctctcccactgggcctggaggtggggtagggtcctccttgcccccagccttgaatcttctgtcaccctacaataccacttgctgtcaccccggtgataggtatctacgagcctggggtgctcccccacatcctcaaagatgtgagcccctgactcagcgttgcctctggttcctgaccctccacattcacatgaccacgcgctggcctttatcatcgccagtgacagcagctctcccgtaaatacaagtttcaagcaccccactttccagtctctgccttctgtctttccagttcattccctctagtcctccacccacacagtgcttttccccattgacagggaattgctcctggccgcttttcccagccccatcccgttcatgtgccttgctttgtacccagcatggactccatggcctgtcattgtcactccttcacctatacttcctgcctccttgcttctctctctcttcgtcatcctggcatcaccaccccagaactgcttggtttcagttctccaccatggctaggggaacatacctttttgctgactgctctcactttctttttttttttttttcttttttttttttttgacacagagtctcgctctgttgcccaggctggagtgcagtggcacactctcagctcactgcaacctccacctccggggttcaagcagttctctctgcctcagcctcctgagtagctggtattataggcacccgccaccacacccggctaatttttgtattttttttagtacagacagggttttgccatggtggccaggctggtcttgaactcctgacctcaggtgatatgcctgccttggcctcccaaagtgctgggattacaggcatgaaccaccctgcccggccctattgctctcactttgaaatcacgacatgagccacagtgagcctatgatgtggtttgacgtctttctgcatttctctgttcacccctctcccagaaggcatgcctccttccctcccctcagcctgcagccccttcccctccacgcttactctcagctgatagccctgctgctgtctcgctgagaaaatagaaatagccagaggagaattccctctaccccatgcacacacctctgtccccgcctactccacattccctgttgtcagcaccgatgtgtttagctgagggtggtccccccattcaaggccatcatctcctgtcatctacttcttgacaccatttgaacaattatctcccctctttcctacataacactttccccttttctactatatattttttgctatggattgaaagtatccccccgaaatcatatgttgaagccccaatccctcgtgtgatggtattaggaggtagagcactatgggggtgattaggtcatgaggatggagccctcatgaatgggattagtgcccttagacgaagaggcaagaaagagatgatctgtctctgccatgtgagggcacaacgagaagatagccatctgcaaaccaggaagtgaaccctcatcaggaactctatcagccagcaccttgatcatagacttcctagcctctagaactgtgagaaataaaggttgtttaagcctcccagtctgtagttttctgttataatgtcctgacctaagttattttccatcgctatacaatgggttatttttttctttaaaaaaaaattatttcttgactctactttttcctccagagactgcttatattccactgtcttcattcttctcctcctgttttctctctttaaacttttcaaaaatagcaaaatataacacatatagagaaaatgatatacagctcagtgatttatcacaaacacctgtgtaaccaccactcgaatctagagataggacattacagcaccccagaagccctccttttgtcccctcttcccaaagaagggtaaccaataacttgccttttatgataaaggctttttttttttgagatggagtctcactgtgttgcccaggttggagtgcggtggcgcaatctctgcttactgcaagctctgcctcctgggttcacgccattctcctgcctcagcctcctgagtagctgggactacaggtgcccgccaccacgcccggctaattttttgtattttagtagagacgaggtttcaccgtgttagccaggatggtcttgatctcctgacctcgtgatccacctgcctcagcctcccaaagtgctgggattacaggcgtgagccaccgcccccggccaagataaaggcttttctatctggcttctttgttagcattttgttggcgagattgatacgttttgtgtgcagctgtctgtcattttcattgcaatagaattccattgtctactatatcacagttactcattctactactgatgaaaatttgggttatttctagtttttttggtgcatacatgcatacatttctggtagacatacctagaagtgaactggctgcattatgggccataacttgtcttcaacgttagtaaataataccgcccgtctgttttccaagcagcagtaaatggcactttctgttacttcatatcttctgttacttggtactgtcaggttttaaaattttagtcattctgtcgggtgtctagtagtatgttattgtggttttattttgcatttgcctgattgcaaatgaagttgagcactttttgatacagtgattaaccatttggatatcctcttcagtgaagtatcagctcaattctcttgactatttaaaaaataaagttgtttatctttttcttacagagttttaggaggagttttttggtacatgtgcagtccaaatacacaccttttgtcagtgatacgtgttcagctgcacacacggtgttttgcctttttattcttttaatggtatctattgataaacatgagttcttagttttaatgaagtcaaatttgttcatcttctttacggtgtactttttgtgtcttgtttaaggaagtccttctctatcttaaagctttgagaagcattccttctttctcctattttctaaaaattgttgaagatctccttccttccttccttccttccttccttccttcctttcatctatctctctctcacccaggccaaacttcagtggcatgatcatggctcactgcagcctcaacttcccaggctcaagtgatcctcctgcctcagcctcctgagtagccaggactacaggcacgcaccaccatacctggctaattttaaaaattttttgtagagacacggtctcatcaagttacccaggctggtcttgaactcctgggctcaaacaatcctcccacctcagcctcccaaagtgctgggattacaggcatgagtcacatgtctagcctgtattctttctttcttaaatgtttggaagaattcatgggtaaaaccatgtgaccctggagtttatttgtgggaagcttttaaaacatggattcgatttctttaacaaatataggactatgagattttcatctcatgtcggtttgggtatgttgtgttttcaaggaatttttctattttatcgaagttgtcaaatttgtctgcaggtccccttatttcctttttaatgtatggaggatctgaagggatggtactttgtgttgtctctatttcttgtttggttttgctagtgatttgccaatttaaaaaatctttccaaagaaccaacttttggctttgtttattttttgaaaacctgagtagctgggattacaggcgcccaccaccacacccggctaatttttttatttttagtagaggtggggtttcaccatattggccaggctggtctcgaactcctgacctcagatgatccacccgcctcggcctcccaaagtgctgggattacaagtgtgagccagtgtgcctggcaagccgctttttaaatggcaccaatcccattcatgagggcagagccctgatgatcgaattacctcctaatggccccatttcttaatactatcacactgagaattaagttttaacataagaattttaggaagacacaaacattcagaccatggaacatatataaaacagttgtcctaccaactaacagaatacacattcttttcaagaacacctatataaaaattatagacactgacctatgctggccataaagcaaatatgaacaaatttcagatacctgaagagatttagactatgttctccaactacagtgcaattaagctagaaatcaatagcaaaaatgtaactataaatgagcccgtatgtttgaattttaagcaagatatatgtaaattatctatggttcaaaaaagaagtcacagtgaaatttagaaaatatcttgacgtggcgggttgcagtggctcacgcctgtaatcccagcactgtgggaggccaaggcgggtggatcacctgaggtaaggagtttgagaccagcctggccaacatggtgaaaccctgtctctactaaaaatacaaaacattagccaggcgtggtggtgggcacctgtggtcacagctacttgggaggctgaagcgggagaatcacttgaacccgggaggcagaggttgcagtgagccgagattgcaccactgcactccagcctgggcaacatgagtgaaacttcatctcaaaaaaaaaaaaaaaagaaaagaaaaagaaaatatcttgacccaatgatgatgcaaatactacgtatcaaacttgtaggatgaacttccacttctggccatgacagaggagcctgtatcagactagccttcctatttatatatttatttttgagatggggtgtcgctctgttgcccaggctggagtgcggtggtgcaatctcagctcactgcaacctccacctcctgagttcaagtaattctcctgtcccagccttccaagtagctggaattacaggcgcccaccaccacacccagctagttttttatatttttagtagagacggggtttcaccatgttggccaggctggtctcgacacctgacctcaggtgatccacctgcccctgcctcccaaagtgccgggattacaggtgtgagccactgcgcctggccgtgagtgacctttttaatgtgttgttgaatttgatttgctggtattttgttgagaagttttgcatcaatatccatcagggatactggcctgtagttttctttttttatatgtctttgtctggttttggtgtcagggcaatactggcctcatagaatgagtttggaagttttctctcctctgtttttcataatagtttgagtagggttggtattagtttttgtttaaatgtttggtaaaattaagcagtgaagccactgggtcccaggcttttctttgctgggagacttttcattacagctttgatctcattacttgttattggtctatttaggttttggatttcttcacggttccatcttggtaggttgtgtatgcctaggaatttatccatttcttctagggttttcaatttattggcatataattgttcacagtaacctctaataatcctttgagtttctgtgatattggttgtaatatctcttttgtcatttctgatttttttgtttgggttttctctctttttttgttagtctagttaaagatttattgattttgtttatcttttcaaaaaactttattttgttgatcttttgtattgttttgtttcaatttcatttatttctgctatgatctttattatttcttttcttctactaattttgggtttggtttgctcttttctagttctttaagagacatcattagattattttgaagtttttctacttacttgatgtaggtgcttataggtacaactttcctcttagtacttctttccctgtatctcacaggttttgatatgttgtgtttccattatcatttgtttcaggatgtttttaaatttccttcttaatttcttcattgaccattcaagagcatattatttcatttccatgtgttcgtatggtgtgcaaaataccttgtttttgatttgtagttttatttcattgtgatcacagaagatacttgatatgatttcaaatttaaaaagtaatttggctgggagaagtggctcatgcttgtaatcccagcgctttgggaggccgaggcaggcagatcacgaggtcaggagatcgagaccatcctggctaacacagtgaaaccccgtctctactaaaaatacaaaaaattagccaggcatggtggcaggtgcctgtagtcccagctactcaggaggctgaggcaggagaatggtgtgaacccgggaggcagagctggtagtgagccgagatcgcgccgctgcactccagcctgggtgacagagcaagactctgtctcaaaaaaaaaataataacaataataataatttaagacttgttttgtggcctaccatatggtctatccttgagaatgatccatatgctgaggagaagaatgtgtattctgcagccgttggatgaaatgttctgtaaatatctaataggttcatctgatctatactgcagactaaggctggtgtttctttgttgattttctgtctggatgaactgtctaatgctgaaagtggagtattgaagtctccagctattattgtattgaggtctatctctctctttagctctaagaatacttcctttatatatctgggtgttccagtgttgagtgcatatgtatttaaaattgttacattatcttgctgaattgacccttttatataatgaccttctttgtctctttttatagtttttgtcttgaagtctgttttgcctcatagaatagcatagctattcctgctcttatttggtttccatttgcatggaatatctttctccatccctttagtttcagtctatgtgtgtctttacaggtaaagtgtgtttcatgtaggcaacagatcactgggtcttgtttttctatccgttctgccactctgtgtcttttgattggagagtttagtccatttatgttcaatgttattactgacaagtaaggacttactcctgccactttattaattattttcttgttgctttgtgatcttctttctttccttcctgttctccttttagtgaaggtgattttctctggtggtatgttttaatttcttgctttttatttttttgtgtgtatctgctgtatgttttttgatttgaggttaacatgaggcttgcaaataatatcttataacctaatattttaaactgatgacaccttaacactgattgcataaacagacaaacaagcaaagagaaaactaataaaaactctacattttaactttgtccccccactttttaacttattgtactgtttatgtctgaaaagttgtagttattatttttgattggttcctcttttagtctttctactcaagatatgagtggtctacatatgacagtgttataatattctatatgtttctgtgtacttgctattaccattaagttctgtactttcaagtgatttcttattgctcattaatgtccttttctttcagattgaaaaactccctttagcatttagcagtatgtgaactgcatttttcaagtccagaatttctgcttgattcttttttttttttttgagatggagtcttgctctgtcgcccaggctggagtgcagtggcgcgatttccgctcactgcaagctctgcctcccgggttcacaccattcttctgcctcagcctcccgagtagctgggattacaggcgcccgccaccacgcctggctaattttttgtatttttagtagagatgggatttcaccatgttagccaggatagtctcgatctcctgaccttgtgatccgcctgccttggccttccgaagtgctgggattacaggcgtgagccactgtgcccagcctgcttgattcttttaaattatttcaatctctttgctaagtttatctgttaggattctgaattccttctctgtgttagcttgaatttcactgagttccctcaaaacagctattttgaattctctgtctgaaaggtcacatatctctgtctctccagaattggccactggtaccttaattagttcatttggtgaggtcatgttttcctgtatggtcttgatgcttgtgatgttcgtcagtgtctgggcattgaagttaggtatttattgtagtctttgcagtctgggcttgtttgtatctgttcttcttaggaagactttccaggtaataaaagggacttgggtattgtgatctaagtttttggtcactgcagccatatctgcattagggggcaccccaagcctactaatactatggctcttgcagactcgtaaaggtaccacttgggtggtcttggataagatctggaagaattctctggattaccaggcagaggctcttgttctcttcccttactttctcccctaaaagtggagtctctctctctgtgctgggccgcctggagctaggagaggggtgacacaggcacctctgtggccactatcactaggactatgctggctcagacctgaagccagcacagcactgggtctcacccaaggcctacagtctccactgcctggctactgcctacgtttgcttaaggcactagggctctacagtcagcaggtggtgaagccagtgagattatgtccttcccttcaaggcagcaagttccccctacccccatcctgggaaggtccttagatgccatctgggaggcagggcctgcagtcagaaaccttagtaatctccccagtgctctattctattacagcctggctgatacccaagccataaggcaaagtccttcctgctcttccctcccctttccacaagcagagaagtctctctccatggccaccactgccccagccctgtggcagtgctgccaggccactgccaacgttcattcagggcctaagggctcttgaagcaactgaacactgccaggcctgggactctccctttagggtagtgggctcccctctgacccagggcaggtccagaactgccaccccacagccaacacttagaatctgggaccccaagagccctcttggtgctctgccacactgtagctgagctggtacctaggctgatttttgctttttatgaaggtacttttttgtgtgtatagttcaatttggttttcctccagggaggacaattggtggaggtttctatttgggcatcttttttttttttttttgagacggagttttgctctttcacccaggctggagtgcagtggcgcgatctcggctcactgcaacctctgcctcctgggttcaagcgattctccagcctcagcctccccagtagctgggattacaggtgcctgccaccatgcttggctactttttttttcaattaaaaagtaaactttaatgtcgaaaatgcaaacttggggaaggcagaaagatcacacacaaggctgtcgcttcacacttggaaggttgcacggcggccaggagaggcactcctcacttcccagacagggcgggggccgggcagaggcgctcctcacttgccagacggggcggcggccacatgcctggctaatttttgtatttttagtagggacggggattctccgtgttggccaggctggtctcaaactcctgacttcaggtgatccacgcacctcggcctcccaaagtgctgggattacaggcatgagccaccgcgcccagccctatttggccatcttgctttgcctccaccttcatttgataacagaacacccccatgtaaccaccaccacaatcaagatataagacatttctgttattctccaaatttccttcaccctcctttatagtccatggcacccaccccatccctgggcaacacctatgtgcttcctttttttttttccccgcaggaggacgtcttcctatacctatgtgcattccatcactgctgcttttaatcatatagcgtgtagtcttatgagtctgactttttcacttagcataatgcttttgcaatttgtgattgagcgttttcatatgattctgttttttctgtctcttagcttggaagttatacactttttagtagtaactgttgggagatcgttctccaagagtctctctcatatttccatacatcctgctagcagagacattgactacctgtttttgtctgtttagtgttgctataaaggaatacctaagtctgagtattatacatagaaaagaggttttatttgtctcatggctcctcaggccatacaagaaacatggtgccagcatcttaccagtgtcacatggcaagaaaggaagtgaggaagagaaaataagttgttaactggttgttaaaaagtgccaggcacgggccaggcacagtggctcgtgcctgtaatcccagcactttgggtggccaaggcgagtggatcacctgaggtcgggagttttgagaccagcctgaccaacatggagaaaccctgtctctactaaaaaaaatacaaaaaaattagctgggcatggtggtgcatgcctgtaatcctagctactcgggaggctgaggcaggagaatttcttgaatccaggaggtggaggttgcagtgagccaagatcacctgggcgacaagagcgaaactctgtctcaaagaaaaaaaaagtgccaggctctttttaacaaccagttcttacaggaactaatagagtgaaaactcactcacccccaccccacagggagggcattcattcatgagggatccacccctatgacccaaacacctcccattagccccccacctccaacattggaatcaaaatttaacatgaggtttggggggcagaaatccaaattatagcactacctttgttccaggctaccttcaaaggatgtttatacagcaaacagccttggaaaatagagttagggtctccttgtagagcacagggtaagtttgcttacttttcagcataatcaagattgtgtcttcttctggagcaaaactttgacaacaacaagcggggcaaagtctgaaaccttttgcacatcttgacagaaccttagagattacgagatttatctctgccttactcaaggtccattagtatcttccagaacaataagttggtcttagaatcctttagctatgtattcccttccaggcttcgatgctgtgtgctgttgttttatttagtttttattttaaacccaacaagacgctataccatcaatacttatttagatccccccacatatttaacttgccatggtgcttcattctttcatgcctctttaagcatccatctaggatcgtgttcattccacatgaagagaaagcttttggcccagcacgatggctcacacctgtaatcccagcactttgggaagcctaggcgggaggatcgcttgagcccaggatttccagaccagcctgggctacgtggcaaaaccctgtctctactgaaaatacaaaaaattagccaggtgtggtggttcacgtccctgctactcgggaggctgaggtgggaggattacttaaacctgggaggttgaggctgcagtgagcgttgattgcaccactgcactccagcgtgggtgacaggagtgagaccatgtctccaaaaaaaaaaaagaaggaaagaaaaagcttttgtatttcctttcgtgtaggtctgctaatgacaaagtctctgggttttttgtttgactagagaaatgttttaattttaaccttattcttgaaggttttgtttttgttttcattttgttttgtgtgctaagtacagaattctcattggcatttatttatttagagacagagtcttgctctgtggcccaggctagagtacagtggcacgatctccgcctcccaggttcaagcgattctcctccctcaacctcctgagtagctggggctacaggcatgcaccactacacctgactaatttttgtatttttagtagagacggggtttcaccgtgttgcccaggctgatctcaaactcctgagctcaagtgatttgcctgccttggcctcccaaagtgctgggattataggcatgagccgccgtgcctggccagcatttattttcttttcagctctttaaggaagtcattccattatctctgggttccattgttgagaagccagctgtcattctaatggttgccctttgaagataacttttttccctctgctattttaaatatttcctccttgtattttattttcaacaggtgtaatgtggcacatatatcagcaattgttatgttacatacaatacatattgtgcaacatatgtatcattatcagttattgctgtgtaacaaactactccagaacacagtggcttataaaaggaatcatttatttagtccttaaatctgcaatttgagcagagctcagtgggaaagcctcagctttactttatatggcaccatataaggtaactcgcaactggcaagttggtgctggctgttggctggtagttcattcagggctcagggcccaggaccaagagtcgtcaccatggcttgcttcagcctccttgaggcatgatggctgggtcccaagagaagagaaatagaaacttccagtctcttaaggcattggtctggaagctgggacggcatcacttttgccatattctgttggtaacgcagttacatcgccagattaaagggtaaagagatacaaattcccactgctcagtgcaaggaatatcagtgattttagggggccctgttttaaaacccctacaaggtgctaagcgtggatttctggggctttcttgttttttgtttttttctatgtgtttttttttttttttttggtggtggggtcagggagggcttatagggtatgttaaatcagcagaataattttatttatttatttggagatggagtttcactcttttgcctaagctggagtgaagtagcgtgatcagagatggagtttcactcttttgcctaagctggagtgaagtagcgtgatctcggctcactgcaacctccgccccgctggttcaagcaattcccctgccttagcctcccaagtagctgggattataggcacccaccgccacgcccggctaatttttatatttttagtagacatggggtttcgccatggctagtctggaattcctgacctcaggtgatccacccaccttggcctcccaaagtggtgggattacaggtatgagccactgtgcctgacctataatgttttttaaaaatcagttttggaaagtttgcagacattaacttttcaaatgtagcttccatttgattctttttctactctgcctctgatcctccacttatgtatgtatgctagatcttttattagatagtctgtgtctcttatgtactctactatattttgtattcttctgtctctccatgctttattctgtttactctttcctgattatattttttaattttgtaatttccatttgatgcttttttgatcattcaaaactcttcaccaaaattctaaatttccttttttaacctctcgaatgttatcacagttactttaaagtctattttggataacttaaatatttacagtcccctcacagatatgtttcttttgtatattgtttctgttggttttctttcatgtcttatctccacatatgcctggtgagttttgattatgtgttggtcattgtatttgcaagtatgctcgtagaaataatctggaatggccgggcgcagtggctcatgcctgtaatcccagcactttgggaggctgaggcaggtggatcacgagatcaggagatcaagaccatcctggctaacatggtgaaaccccatctctactaaaaatacaaaaaattagctgagcatggtggcacgttcctgtaatccctgctactcgggaggctgaggcaggagaatcacttgaaccaggaggcagaggttgcagtgagccgagatcacgccactgcactccagcctgggtgacagagcgagactccgtctcaaaaaaaaaaaaaaaaaaaaaaaaagaaataatctagagcctagtttgatgtttccttacaaagaatgaatttatttttgcttctcccattgcaactaggataacctcagtctagtttctggaactgaaatcacttgaggctgaactgtggtctctgtgagagcgtgtctgtgtatggctcacccttattcctaggctacgtagttctttaggaccctaacccaaagtaagagatgttcatcagggctctcctcttggcagacgcctgggctccagtccctgtgtcctgagccccatgaggctgttactggtgctgctcgtctgcccatcctctccagtaacagccacctgaacactgcaattcctgggtttccatcattccttccagcctggtgagtcatcagtgtcttttgaggtatccagtgcctgccagcagatgttttttaataatttgtccagcatttctggctgtcctcagtaggtggtctgtttcacattccctagtctgctgttaatggaaagtggaagttctgagagagaatcatcgttcccgtcagcattcaaatgcctgattacactttccccattcgctatcctttcctttatttgctcctcaccacagcaaaactcctcaaaaatatctatctttgcaatcttcagattctcacattgtgtccttaaacccactttaatcaggccttggttccctccattccactaaaagtaatgttgtcaaggtcgtgcatgcctccgtgatgctaattccagtgatgagttttcagttgtcattctctgacatatcggcaacacttgatgtggagtaccctgatgttgagaggctggtgagatgaaggaaaaacccagccaagggcaatgaggaatggcttccttccgcctcctccttccctatctttgttgtggtttttgttgtttctgtaacactgattacgttatagtttatttaatgtacttccttattctatgtttttactttagtcattttgttgatctcctccataataacataggctcgggccaagcacagtggctcacgcctgtaatcccagcactttgggagaccaagatgggtggatcacttgaggtgaggagttcgagaccagcctggccaacatggcgaaaccctgtgcctactaaaaatacaaaaattagctgggcgtggtagcaagcgcctgtaatcccagctactagggaggctgaagcaggagaattgcaggagaatcacttgaacccagggggcagaggttgcagtgagctgagatcgcgccactgcactccagcctgggtaacagagtgagactctgtctcaaaaaaaaaaaaaaaaaaaaggcttcaggagggcagagcattttatgcaattgttcattaattgacccctccatttggcacagatcacatgcccagtagttaactgttaatcaacgcactctctgtggaacaacaggctggtcccgttgagccaacactctctgggcactgccttcactagactctggctggctgctgcgcttgtagaggtatgcaagacaaaaccttttggtatgttaaaagccctggtcagaactttaagtaaccatcactgacatataatggttatggttttgaaagtgcttttatagtggtttttcatctgtcctcacagcacctctgggaggtaggtaggacaggtacagttagtctcatgtttcaaatggggctcagagagggaaaaggatttcccaagatcacacagcaccttagtagcaaaacttggactcaacctcaacacttaaaaatgaacaaagctggccgggcgcagtggctcatgcctgtaatcctagcactttgggaggcccaggcaggcaggtcacctgaggccaggagtttaagatcagcctggccaacatgacaaaactctgtctcttctaaaaatacaaaaaattagccgggcatggtggcgggtgcctgtaatcccagctactcaggaggctgaggcaggagaatcacttgaacctgggagatggaggctgcagtgagccgagatcgtgccattgtactccagcctgggcaacaagaatgaaactccatctcaaaaaaaaaaaaaagaaaagaaaagaaaaagaaaagtttccctttttttaaatatctcattttaatgactgcataatagtttattacatagttataccataatttatataatattttgttgctgtacatttaggttaaacaatacttacttagttcctactatgaagaggggccaagtactcgaggctggagctctcacatgtggcaatgaaattagaaagtggatatggcagggctgtggtaaaataaaatataaaaataataaatgatattaccaaagaaaaggaaagtttttcaaaataaaggaaaatctagacaagcatagtggctcacacctgtaatcccagtacttttggaggctgaggcaggaggaacacttgaggccaggagttcaagaccagcctgggcaacatagcaagaccccctgtcaacaaaaataaaaaaaaattaggccaggcacagtggctcacggtggctagtgcctgaaatcctagcactttgagaggctgaggggggtggattgcctgagctcaggagttcgagaccagcctgggcaacatggccaaaccccatctctactaaaaacacaaaaaattagccaggtgtggcagcacacgcctttaatcccagctactctggagactgaggtaggagaattgcttgaacccgggaggtgaaggtcgcagtgaggtgagattacaacactgcactccagcctgggtgacaaaatgagactctatctcaaaaaaaaaaaaaattagctgggcatggtggtgcatgcctgtaatcccagctactcaggaactaaggtaggaggatcccttcagcccaggaattcgaagatgcagtgagtcatgatcacaccaccgcaccccagcctgggttacagagcaagaccttgtctctaaaaaacaaagaaagtctaacctaaacgccattatgtcatttacatgtgtataggggtgtgtgtgtgtgtgtgtgtgtgtgtgtgtgtgtgtgtgtgtgtgtgtgtttgcttgggaggggagtcgggctggagctggccaggccgcagcctggggaccttctgattccagcagggatgtgggccgagggtcccgccttactcatttcgggtcttgctcctctgtcctggctctacagactcttccagctggagttggaggctgacgccctagtgaatttccatcagtattcttcccagc

SEQ ID NO: 15717 - DNA, 69675 bp, Homo sapiens
ggcccgaggcccgtttgtttgcggaagtaggaggaagtagaagtgctgagtaagccgaggtgagtgacctcgcgggtgggcggggcctgggggtccgttccccaacttcctcggcgctccggactcccaagtctccgccggaccctcctttggatattcctcgtgtctccgattctgaggcatgtcctccattaacccttatgtgactccctgagtgcccccaccttccatcttttcatccccctgcgtccccaattcccatcccgagaccgcccgtgtctcatctcgaacttgtggaccccagggaccccagcttcgaccctgagtttctcccctgaaccccagtctcctccgtgtgtctccctcagtatccctaacttcccgagtcaatccatctcttctctttccccgaccctcagtgcctctttaggccccattggccgtcctaattttccttcctgtgctcctctaagtgctcacttgattccccacttcacgtccgtctccacctttcgtggtgcctctactcatttctcactccctgcttctcctgcctttcctccctgctttttttccttgcctttcctctctcgcgtgcctccagacctgcccccgacatgctccctccttcccctcagcctggccaccccagagtctcccacccctaatcctgtgtccacctcctgctcccacagatgacttggaagctggtgacagggagcatgtgaccagggtgatcatgggactgggtcggggcaagcctgtgggtgtgggacagggagggcacagggcaaggggacctgtggccgtatttttaatgggctacccacatgaccccaacgaatacctccccctagcttctgggtctttccctcacctgcctcttacccgcccaacaggatgtcaggcaggttcggtttggcaacgttgaggctgcacccttgggctgaatgcattgtttttgaatgcattgtttttgttagagtttctgcctggagtttggaacctgttttctgtccaagtctcagtttcctcatctgtgacaggggaactgtacctcctgccctcgtaagtctgccatgaggttcaaaatttgaatgagaaaatgtagaaggtaaagctttataaccagtatggccctgtacaaatacatgattttactgttgggtcataggcagaattgaaaggagtggaaagggaaagggctagaatgagaagacaaggagagaaggatgagcaggaggtcccttgtctttcagtgtatcatttggcagtgtttgttcatcacctcttgtgagtcaggctcttctgtatatgttctcttcaccattcattcagtcatcgtttatctaacaaatatttacggactgtctgatgttctaggctacccttggtgtggccaatgatattctcacttcacatgagaaaaagagggcgcatgagttgcttgaggtcacaccgatgaggttgaagctggaatctgacaccagagcctgtgtgattgtcctgatgtgtaaggtttgctactgtttaggacacttcttgttccttccgtggattactttcttgttacatgagagactccccaaaagggagtttccctcttactcagcagaatgacatcactaagagatacagaaaggagaaatttaaatactctgtgtgtgtgtgtgtgtgtgtgtgtgtgtgtgtgtgtgtgtgtctgcagacatctattgggtgtgtgtgctgggggaagtaggtaggcaaggagtaaggggccgtagtgaagagtgtgttacaaacttcactttgtagagggtggctccctgggagaatatgttctgtgtctttcacagtggattttgatagggtcatgtcttaaatgcctcttctcgttttcggatggtgatctcatccagtcttatttctttaagtgccgtctctattctgtcagcccacaaatttatatccccagtccagtccagacctttccctggaatgacatactcaaatctagttgcttactcagcacctcaaacttaggcttttcaaacttgaagtatttatttattgatttatttattttttgagacagagtctcactctgtcacccaggctggaatgcaatggcacgatctcggctcactgcaacctccacctcctgattctcctgcctcagcctcccaagtagctgggattacaagcatgcgccatcatgcccaactaatttttgtatttttgtagaggcggggtttcaccgtgttggccaggctggtctcgaactcctgatctcaagtgatccacctgccttggcctcccaaagtggtgggattacaggtgtgagccaccgcgccaggcctcaaacttaagagtttagaattgagctcctgttagttctgccctccatccctgaccccactcttcaccaaaacatgtccctcccactctctttctcatcttaggacataggagtattgttcattcagttgctcaggtcaaagctgtgagattatctatgatgcctctctgtttcttaccccacacccagccagagtgatcttgttaaaatgttgtttctttgcagtggcctctcctctcatggcacatgcctggccccctgttgcctctctgatgtcactggcttccttgcttttcctggaactcgctaaacatgttccagccccatggcctttgcacacgctctctttgcctagctattcatatgactttcatctctctccatcaggtatttatttaagatcaatttcttggtgaagacttctctcctcacccaatctaaaatttcactctccacctcagcacttcctatccccattctctggtttttctcctcagtagttaattgtcatctaaaacctttgtaaatatttacctgtttatcttctttattattagtagctctgtctaaaatataagttccaggatgtcagggattttgtggggttttttttggttggttggttgttttggttttgagacagggtctcactctgttgcccaggctggagcgcagtggtgcgatctcagctcactgcagcctccgcctcctgggtttgagtgattctcccacctcagtctcccaggaagctggaattacaggtgcacgccaccacacccagctaatttttgtattttttggtagagatggggtttcactatgttggccaggccggtcttgaactcttgacctcaagtgatccacccgcctcggcctcccaaagttctgggattactggtgtgagccaccgcgcccggccttgttttgttttaagacagggtctcactgtcgctcaggctggattgcagtggcacaatcacagctcactgcagcctcgacctgctagacttaagcaatccccccacctcagccaccttagtagctgggacttacaggcatgagagataccatgcctgggtaattgttaagtttttgtagaggtgaggtctcactatattacccaggctggtctcaaagtcctgagcttaagtgatcctccttccttggcctcctaaagtgctgggattacaggagtgaactgccgtgcctgaccagtctgttttgtttacgattgtatcctcagcggttagaacaatgcctgccacaatccatctcagtaaatatttgtggagtgagtcataacatgggccacactgtaccgtgccaccagcccaaagatctcttaaagtcacccctgtctcatgtgcttgggagctccagtgacagtttcggggcagtttgcttccagctgtggtccagccaagcggagtgaatgaaagagatgctttttccttttgtgaaaggacgttttgctctggctcacgtgagcagcagtgcattttgagacgagggccttggcttttggaatctaagagcctgttgagcaagcctcgctcagccaccttctttcagctttctcctgaaggcagtttgaggattaagagcctgatgctctggattccacctaattgggttcagatcctggcaaactgtgtaacctgtgccccagtttcctgtgtaatgtggagagacctggaccttttcttacaggtgtttggagggttaaatgtggcaattcggccgggcgcagtggctcatgcctgtaaccccagcactttgggaggtggaggtgggcggatcaccggaggtcaggagttcaagaccagcctggttaacatggtgaaaccccgtttctactaaaaatacaaaaaattagccgagtgtggtggtgcgcgcctgtaatcccagctagtctggagactgaggcaggagaatcgcttgaacccgggaggcagaggttgcagtgagccaagatcacgccattgcactccagcttgggcaacaagagtgaaactctgtctcaaaaaaaaaaaaaaaaaaaaagtggcaatttacccgaaactgtggtgaagcgtctggcgccctgtgggtgctgggcagcagtgggtgctgatggggtgtgaggggatgggatcaagccctttcccactaacttaggaaagaggttggaatgagctggggtcagagggaacatttgcggggacattttgccgggaggctgccttggaggttcagaggctcagatgacccctgtgttcattcagtgttttctcacccacagattgagcacctgctgtgtggccagccctttgcctagtgctgttcaagagtcagaggacataggcaggcaatcccccaccacaacctgccaccccatttcctctcttggggccttgatttctccacatgccaaacagggagaatgattgcaccttccttgtttctttttttttttttttgagacagtctcactttgtcatccaagctttagtgcagtggcatgatctcggctcactgcagcctctgcctctcgggttcaaagattctcctgcttcagcctcccaagtagctgtgattataggcacccaccatcacgccaggctaattttttttgtagttttagtagagatggggtttttttctcacacgttggccaggctggtcttgaacttctgacctcaggtgatctgcccatctcaccctcccaaagtgctgggattacaggtgtgagccaccgcgcccggctgcgccttccctgtttctttgtgagcttggaggtggatcacaagtgtgaaaccctttgccaaccgtgaggcatggtggccttgtgagaggacggaggccggtgtgtggtggcatgctcccgtgctgtgtggcacagacggagctacaggaaggaagttggggcagcttggcactctgagtggaccctgagtttccagcctgctctgtcttgactgggtgggaggagggtgctcaggagggtgtcactgctgccaggttctgctgccaggaccatccaacagttgttccaatcatgggacatcctgtcgtcagcagctggggctcgtgaggcctgatttccacctcgggcagttctgtgtgtgctcctggaatcccccacgtggccaagcctgtgaggtctgcttcctggcctgctgcctgtgggttcctgtcacgcacctctcgggcagctgtccggctcctctgctctcggcttagtcaagaaggaagcagaaggcttggagtctttcctgcttggactaggagtgagctcagcctaagtgccctgactatatataaagctgaactttccagaccgaagcctggggatggatcagtccgatcacttagggccgctcctgaaggagtgcaggtgctagatacaggttctcccggtggaggagcgaaccccttgtgggccgttagctactggtgggatttgagcatggtatttccctatccgttgtggagaggagcatggcagctcagagtgggtgggaacagtgtgtggtccctgttatcaccttcaagggaataaagtgtgtctgggggcttcagaggtgctggccccatgggcttataggtggttcattcattcattctcattcattcattcaccaaacttattaaacacccactgtgagtcaggaacatcatgccaggtgcttagggaaacaaatcaaagcgggttgggtgagcagcccaagccaacagatgcacccccattctcacatggtgtgtgttcctgtgggctgggccctgggtggtgtggggtgctggggagaagaggaaggcacaccaggctgcagggcggaggtgcgggtatgaattttcagaggagatggcacctgagctgtatcttcatggataagaagagatttgttcatttgtcctttgtggagcacacattcaggttaagaaagtggggaggatgggctacgctgatggagcgtatgtgtggtatccccaagtgcactgagacacgagtttgacgtgttctgggaagatcgatggtgcggcgtggctggagtagaggtgagggatgagttggaggggtgagttgggccagctctcatggatgctggagtctgggctttccctgggaggtcatggggcgccactggccagggtcagcagggagacctgcagctggatttgcatcgtacagtgggcatggaggggtgtcaggctgggttgggaaccgtgcaggctggaagggcactctggtgctctgagcattcagagggggcagctgggccttgaaggatgagcaggggctccagcaggaactggagagcgcattccagggaggacgcaagtgcaggcccctttcactacagaaaagcagttttcacacagaccttccaaaggggaggagaggggactgcctgggcctggcagctgcggcaggtagcagcaatcagagggcagggaccgctcctcccgtgcctgagacctgcccagggtccttcagggaattcgtagctgaggaggaaccagatttttgggactgagttctccctcaccacccgctctgagccaccctcttggtcccttgtcctctactgcacttcttccggggcttggctcctcgtcatgagaggagcttccctgggcatggcgaggggcgtgactgacatagcagccctggacaagtggctccaggtgacctgtgttcacgttgatcacagcactaaccacggcccctcctctcagcaccttcccctctcgagccgtccagtcccagtgaaaatgctcaccgttcatgggtgggctgagcaagcccctgatctctgccttcctccgtgttctgatctgcttcatctgctgtgaaggcctctcgccatttcccccgctggcaaactcctgttcttcctggaaagttcagctaaaaagtcatcccctttaggggtccttccctcaggggaccgtgcacttggcgagacagggactggtcttgggtctctctgttgactgttttatgaacccaggtagtcacttccagggaactcatcagagatgctaccattggctccaatctccctctgttcccactcgaggttttttgtttcttcgtttgtttttctttctttctttttttttgagacagagtctcgctctcgcccaggctggagtgcagtgacatgatctcggctcactgcaagctccgcctcccgggttcacgccattctcctgcctcagcctcccgaatagctgggactacaggcacccgccaccacgcccagctaattttttttgtatttttagtagagacggggtttcaccatgttagccaggatggtctcaatctcctgatttcgtgatccgcccgccttaacctcccaaagtgctgggattacaggcgtgagccactgcgcccagcccgtttgtttttgttttttggtggacatcaactttaatttgccctttgttttgttttgtttttgaggcagggtcttgctctgtctcccaggctggagtgcagtagtgcaatcttggctcactgcagtctcgacctcaagaggatcaagcaatcctcttgccttagcctcccgagtagctgggaccacaggcgcacaccaccatgcccagctaattttattttatattttgtagagacagggttttgccatgttccccaggctggtctcaaattcctgggctcaagcaatccgtctgcctcagcctcccaaaatgctggaattacaggcacgagccactgtgcccggccttaatttgccctttgaacatgtacaattcagggcctctctgggcctcagtttcttgatctctgagatgggaagatgggataataatacttgttcctcccgtccttcagctcctccaggggaccctcacaccagcacactctctgtcagtcttccctcaatgaacccagcaggcaagcttggttttgacagaggatgggtgagcagagataaggaaaacggccagaaatatctggcttccctcagcaggggcaccaaaattggtacctggaaattgcctggcttggacaggcagaattgtcactgtcaacccccaccaccaaaggtcttgggtctttgtctttctgcttgtggtgtttgagagagctgcttgacacagccgaggtgcggtctgtgtcaggtgacctgggcatcctgggggtgcagggagaagcccaggtaaggaggaggaggggccggtcatcagtggggaaaagtgattgtctaccccacgggaaggtcaagggtaggacgctgtgagaagccagggggagagatgaagtgaggcatgatgcggggggccctcatccaccatccccctcttgcagctgtgctgggaagagcctaggctccagggtccaaggtggcagggacagaaggaagcacgtgtgagcactttctccctgctggcccgccttcctggttggcaatgccgtgagtgttccaggatgtggccccgtggctgtcatttcctttcttccacctagtgataacaatggccactgtttgtgtgcccacagtcggcctgtgtcccagacaccttccctccattgcgtcatctcgtcctcctgcctaccctgaaggctggatgccagccaagcctgtcgtttctgtggccatgctgtcgtgggtgtgtggggggcatcccctagccccaggctctggtggggggtacacaggctgggccattgacgaaggggtgtgtggaatctttctttgatttcactgcacccctggtgactttctccctcaatctgaggctcatgggtgctggatgctcttgactctctgcccttcctgggcgcacccctccgcgtccctgtgggcccgtcctcggggtagcctctctgcgctcttccaggccaggcctgagtcccacaggtccccatcttcccggctgcagcccccagaggctcagcctatactgctacttcctttgaaaactataatcgctttacatagcatctggaaaatagggaaaaggaaaaaacaaaagcccataaacccagcaccctcatctactcaatggcatgttttctgtcagtctatcttggtttgttttctatcaggctttgttttttctatgcataatatttactcagttaaatttttgttttgacaaactttctgtgagccaagcttgtggacggagatgaaaagacgagcagctgcctttgagaaactcagactctgggccagcccatctgggtgccagctttcactgctccacccactagctgggtgaccctgggcccgtgactttacccctctgttctttggtgttctcatatgtaaaatgaggataataatagtaaccagttcatagagtggttgtcagacagaatgattaatgtacgtaaagctttcaggatggtgccagcaagatgcacaggagtgtttggtaggaggatgacgaagcttaccgtctggcaggaggggcagttgtaacatgctgggctgtgatagtacagatgtgtttaaagtgagggagagcccagagcaaggagagagaacctggcatctggtgatggtgtatcaagaacattttaggccagacacggtgactcacacctgtaatcccagcactttgagaggctgaggcaggcagatcgcttgaacccgggcgttcgagaccagcctgagcaacgtggtaagaccctgtctttataatttttttttttttttttctgagacggagtcttcactctgtcacctaggctggagtgcggtggtgctatcttggctcactgcaacctccacctcccgggctcaagtgattctcctgcctcagtctcccaagtagctgggattataggtgcccaccaccatgcccagctaatttttttatatttttagtagagacggagtttcaccatgttggtcaggctggtctcaaattcctgacctcaagtgatctgccctcctcagcctcccagagtgctgggattacgggcatgagccaccatgcctggcctctataaaaattgtttggaagaaattacctaggcctggtgatacacacctgtagtcctagctactcaggaggctgaggtggaaggaggtagaggctgcagtgagccatgattgagccactgtactccagcctgggcaacagagccagaccctgtttcaaaacaacaacaacaaaaacatttttaaggaggaggctgagaaccacgagaaccaagcttggatttgaagaaggatcagggctttctcagacagaaaaggagaggaagaacattccagatagacatcattgagagatggcactgagccttgtaatgggacactgcgaacttttcttcagttgttatgatctttttttttttttttttgagacggagtttcgctcttgttgcccaggctggagtgcaatggcgccatctcagctcaccgcaacctccgcctcccaggttcaagcgattcttctgcctcagcctcccaagtagctgggattacaggcatgcgccaccatgcctggctaattttttgtatttttagtagagacggggtttctccatgttggtcaggctggtctcaaactcctgacctcaggtgatccgcccgagtcggcctcccaaagtgctgggattacaggcgtgaaccaccgtgccttgttggtataattattagtattgatcttttttccttttcatgtgcctcttagtgggccccttgcttttgtcttccttctgtccccagggttgatcctgtgctcagcacataggccagggaagaatgtggctgtgacccagtgtccactcagatgtcctctctcccccagggcacccatactctgtccttagtgtcttttgtctggtgacatcttggcacagaggcagagggcggcctccgtctgattggcgcctggctttggtgacagtaccttaggaaggcagtgtattttctgggaacctaggaaataacaaggtatctaattccatcatcaacactggggacaatttccatggcagaaactatgactctgaatatgcagcgtaaagttaccacccagacactgctgctcctgagtctcgaatggcatcttctgcaggggctcccccacctgcccctgcagaaggtgcagttcgttcatttccaaggagcttgcttttgtgtgctgtctctcggagctctttgggaaacctgtggtagcaggaaacaaaggatttagaccaatgccgatgatccccttgctccgatagagtgtgacatgatgctggtcaccttttggtatctaggaggggggacattgattttgtttgcggaagtgaaatgatccatgctggcctctttttttttttttttttttgagacagagtcaccctatcgcccaggctggagtgcagtggcgcgatctcagctcactgcaacctctgcctcccgggttcaagtgattctcctgcctcagcttcccgggcagctgggactacaggcgcctgccaccacatctggctaatttttgtatttttagtagaggcagggtttcgccatgttggccaggctggtctcgaatttctgacctcaaatgatccgcccgcctcagcctctcgaagtgctgggattacatgcctgagccactgtgtctggtccatactagcctctttgagtgctgaaaggttatctctgtaacttatttagtgagaaccctccatttgcccagggcattactgcctataatgtatgttcacatgtgctatctcctttggtcaataccacacactacaggtgaggaaactgagtctctgctgggacactgggtcaggaagcaggcagttaaggtcacctgtgcacagtggcagcacagggggacagccttctaggtagccagcctggcctgagggttctgtcacttttacctcccactcagtgttgtttctctttctttcccctccttttaagatccctccaggcccaggatctggggacaacgctggtggggagtgatctgggtgtctgtgcaggaaaccgctgcactgggtgagatgggcatgggagactgtgcctggctgaccagagacctcgttttcttccagacagagggggaagacggtggggcctccccacctgccccgcagaagatgcagttctttggccgcctggtcaataccttcagtggcgtcaccaacttgttctctaacccattccgggtgaaggaggtggctgtggccgactacacctcgagtgaccgagttcgggaggaagggcagctgattctgttccagaacactcccaaccgcacctgggactgcgtcctggtcaaccccaggaactcacagagtggattccggtgggtgatgctcagcgggaacatacttctctcctttcactcccccacgtctcggattggaggtcttattggccgagaagcagtttctttgagtctctgtctgaggggtctggagaggggtgggagagaggggagactgtactcttggaccagagggaagggcttccgagactccacacttctggcccatcagtgtcccagcacgaggctgaggatggaagcctgggttgtttctggcctggaggctcgacctatatggacaaagggaagaaggaaggacagggagactgagagtgtccacatcagataaggcccatggggagaacctttagccctggctctttatttttggttttggtttttgttttttgagacagtcttgctctgttgcccaggctggagtgcagtggcgcaatctcggctcactgcaacctctgcctcccaggttcaagcgattctcctgcctcagcctcctgagtagctgggattacaggcacccaccaccacgcccagctgatttttgtatttttagcagagacggggtttcatcatattggccaggctggtctcaaactcctgacctcaggtgatctgcccaccttggcctcccaaagtgctgggattgcaggcgtgagccactgcacctggcctagccctggctctttaagggcatggccgttctcataggggctgcccagggtttgcttaggaaggctggacagagctgttgcctcttggggcatgctgggactcccctgggcctgaagagaaggctcaaaagccaggacaggcctgagggaaccgggccaacggcagagctggttgggaaaaggggagaagcagccaaggttccaaatgcaggccccagcagtgcttggcagactggcatctagttgggctcagacagatatccctgtttccgctcacctatccatctggctgtcctgtcagccatccattcaacatgcaccaagcacctccagtgtctccagagtcctgggcttcgggccagtcctggctggcctgtgagatgacaaacatgtcctgtgtctttaaggaacgtacagtctggtgggggaggtccggtgcaaacaggcgtcatagcaccccttgaggagtgctgtgacagagggagagcctaggaaacagtgtggatcacaaggaggtgattgagagctactctgcgtctggaagagtgaggaggagcctgtgtggcagaacaaaatggataaggtcgttccagccgtgcagaagtgtggaggtgtgagcctgcaggcaggtggctctggttggatcccaggtgcatgcagggctttggtgagagtgaggctgaaggaagcagctggggactcattctgactaaagaggcatggcaggaggggtctctgaaagtgtcaggctgggggccaggggctgccaccaacagaagagcaaggcaggtatcagggccccatccaatcaggtgagaattcagagcctggctccacaaggaacctgaggcagaggcacccacagcaggtgcttgggctaaatgcagctcagtggccagtgcaggcaccagttttaatacagtggggccattccagattctgagtgcagatggggctgagcagaccgccttccagctggactcgatcaggactgaccctggacggggcaggcttgcacttgtagcttcagagctccactgcaggcacagctgaccagggcagcgggtccactccttggagagctggacagccccacttttgaggtacacggccctggggataccactaatctccacgtaccaataatcaccaagttctgtcagttgtaaaatcccttgacaggattccagatttgtctcagccagcttaagccccagtgtgggcagacctccatcccaggaggatttagtcctttgtcagcagcttcttagctacacgtaagctattctgtggtactttatagtttacaggattttttgttttcttttttttttttttttgagacagagtctcgctctgtcacccaggctggagtacagtgacgcgatctcggcttactgcaagctccgcctcccaggttcacgccattctcctgcctcagcctcccaagtagctgggactacaggcacccgccaccacgcctggctaatattttgtatttttagtagagatggggtttcaccatgttagccaggatggtctcaatctcctgacctcgtgatccgcctgcctcggcctcccaaagtgctgggattacaattttacaggatgtttttaagtatgttgggttagcacattctctgccaatccgtggaggtgggcaaggaaggcagtattccattttatgcatgagaaaatagccttgggatgataagtgattcatcccacttatacacaggaagcagtgaagaaacagaatcagtgtcttctggttcccaattcatttctctgtgctgctgtgttgtttccatgtatgtatgtatgtatttatttttttgagacgttaagtcttgctctgttgcccaggctggagtgcagtggcatgatcttggcttacagcaacctctgcctcctgggttcaagctattcttctgcctcagcctcccgagtagctgagactacaggtgcgtgccaccatacctggctaatttttgtgttttttagtagagacagggtttcactgtgttagccaggatggtcttgaactcctgacctcgtgatctgcctgccttggcctcccaaagtgctgggattacaggcatgagtcaccatgcccggctttgtttgtcttatttctaaattttattgatttatttattttcacagtcatagctctggagtcttttttatcttctcccctctaacctgctcccacccgaacctttccatttcagcagatagcatcattgcaacgggctgtgccagatccagccatcacatccacctttccagccaaagggagggtggaagggcaggatgcagaaggtcaatctccccctcctcagggacatttcatggaagttgcacgcattggccagaacccggtcacatggccacagctaactgcaaaggatgctgggaagtgttgcctgtgttgcagacagccacgtgccagtcgaaaatcagaggttctttctccctccgtcttgctgctggctcgcttctccagaccacagtcattgtgcacgtgtctcctgctgctccggctgtggcctgcactcctctcatcctcttccaagctgctgtcacagcgctgtttccagagggcaaatctgattggtcactcccctgctttactccccaagggcttcctgttttcttttatttttatttttattttcattttttgagatggagtctcgctctgtcgctcaggctggagtgcagtggcacaatgtcagctcactgcaagatctgcctcctgggttcatgccattctcctgcctcagcctcccaagtagctgggactacaggcgcccgccaccacgcccagttaattttttttgtatttttagtagagacggggtttcaccatctactcttagccaggatggtctcgatctcctgaccttgtgatctgcccgcctcagcctcccaaagtgctgggattacaggagtgagccaccgcgcccggccagcttcctgttttcttaacacatcaggtgcttaatgacttaaaagggcccagtgtgatcaagtttctgcctctgtgttctcagctcatgccgccttgtgctcctggcctttgcccaggctcttgctgtggcctggaatactcccctttctttgcctgccttccttcctcttgccctcccctgacctgcaggctggattaggagtttctgctgggcatcccatggcacccgtccctgcactggggatcctgctttcctggtaggccacagaccttgtgaggggagggactgtgtctgttgggttcatgacagtgtgcccagcccccagcaggtgcctggcgtagatcaggtttgtggaacaaatgaatgtgatatattaatttagctttagagtattcattgagggctgctgtgtgccaggccctctgtgccacctgggtggagggtggaggactgttgcattgagggcagttgaaggagtgagctgggaagtgggaggtggaggatggggactgggatgcagggtttgaggttatcaggggtcccagaagcagtaatgccaaggcctaggctgtgacctggagtgagggctgcgatggggtggggtggggtcgaggctgtggaggagggtcatcagggcactgctggagccctggggttctccagggccgggggtggtcattgcagtgttctcccagctcctctcaacaccctgcggtctgtggagagcaggcctggtgcactggacttgcctctggccagggctgagtttctgccttctaaacgatcttcctcctgtgttgccctagaggcctctggactgtcctgagtacttgacgcgtgttagagtgagcatgggctgctagccttccgctccaggtggaggagtttctgttgttcttttgctgctgttgctgcagtgagctgccaggctgagcttctggatggacctgggggatggaattaggagcttctgaattcttgggttgtataacctaaggccggagagtcccacagcactgctgctgggcggagagactggaccctgctgatacagacagcgacagcagcaggagcatctgcagtttcccagcaggtcctgcatgcctgggcttggcactagtctaagtagtaactcatgttatcctcacgacagtcccacgaggtggggtcattactgacctcctattacagatgaggaaacagaggcttgcagaatttgagatcacacagctggtcagcgtagcgattattcagaccctgtcacctggctccagaacccactcgtttacctttcttacatcagggctgctttgtagtgtggcgagctgagtggagctccacccgcctgggctgatcctggcccttcctgcctgacctatggtgcgggggccctggctctccccgtgtgagcccccaggggtcacttgtaatatgcctgtgtacactatgatagcatagatacttctgttcctggtacagattaatcatttacggctggcattgacttgtaacagatgacatttgatgaaatcaaccagcctctcactggtatctcagcagaaacagggctgtacctcccaggcatcctgggaaggatgatagaagtgtgtgatctgtgcttccctaccgggagctgacttttgaggctctctggactgggactttgccataaaactgcttatcagaaacctcagataagtggagtgccctgtgtcctggccacgtactctggggccagctcctccatccattcagtcctcccacatcccatcttcaccaagcagagtggaaagcggcaggtctctgcgagaaaaggaggctctgtacccagccttcagtgagataactttagagtggggccttgtattccctacacaggccttgtccccgacacggcctctttgcccttgcttctccttctgctaagaatgctccttcccaactccttggctggacacacggctcctgctctgtgggcctgtcctgttcccactcagagcctcagcaccccccatgtggccaagacacagcccctcttgccttaggttgccgtgggtctgtttccacatctgtttcccctccagactgcagggctcctgagggacagggcctggggccaagtctcctctgcgttcctgatgcctggtggtgtgccacgctctccgtgggtgcacggtaaatatctgccgagtggctagatgtatccatggttgctgaaggccaagtgtgttgaccagagggcgtgggaaaggctccactggggtggctggggtagagatagaccttaaggggtccagaagactccaccagctggagggaaaggccctacagagacaaggtactaggaaaggcccagaggacagaggaggggccctgtggggagcctgtgggcaggaagggcctgtgctgggctttgaaactggggactcaggtactgctctagcgtgagggtccttggcattttttttggtccaggaccccctgaggtccctggggaatgagaacaggctcacacagccactttcaagaggtttgcaggtcccctgaggcttagccacagacccctcccaccccagcagagacacagcagaggcttctgagtggaggccaggtggcttcagcctggggttctagaagggagggaagagacacacccccgtgtgtcctccagagcctcagccttctccctgaatctcccctttgcctcctcactgtaacccacacctggctctccttgaaggacccgcttgccccgcagcctcctgagagttttctctcccagtccctctcccactgggcctggaggtggggtagggtcctccttgcccccagccttgaatcttctgtcaccctacaataccacttgctgtcaccccggtgataggtatctacgagcctggggtgctcccccacatcctcaaagatgtgagcccctgactcagcgttgcctctggttcctgaccctccacattcacatgaccacgcgctggcctttatcatcgccagtgacagcagctctcccgtaaatacaagtttcaagcaccccactttccagtctctgccttctgtctttccagttcattccctctagtcctccacccacacagtgcttttccccattgacagggaattgctcctggccgcttttcccagccccatcccgttcatgtgccttgctttgtacccagcatggactccatggcctgtcattgtcactccttcacctatacttcctgcctccttgcttctctctctcttcgtcatcctggcatcaccaccccagaactgcttggtttcagttctccaccatggctaggggaacatacctttttgctgactgctctcactttctttttttttttttttcttttttttttttttgacacagagtctcgctctgttgcccaggctggagtgcagtggcacactctcagctcactgcaacctccacctccggggttcaagcagttctctctgcctcagcctcctgagtagctggtattataggcacccgccaccacacccggctaatttttgtattttttttagtacagacagggttttgccatggtggccaggctggtcttgaactcctgacctcaggtgatatgcctgccttggcctcccaaagtgctgggattacaggcatgaaccaccctgcccggccctattgctctcactttgaaatcacgacatgagccacagtgagcctatgatgtggtttgacgtctttctgcatttctctgttcacccctctcccagaaggcatgcctccttccctcccctcagcctgcagccccttcccctccacgcttactctcagctgatagccctgctgctgtctcgctgagaaaatagaaatagccagaggagaattccctctaccccatgcacacacctctgtccccgcctactccacattccctgttgtcagcaccgatgtgtttagctgagggtggtccccccattcaaggccatcatctcctgtcatctacttcttgacaccatttgaacaattatctcccctctttcctacataacactttccccttttctactatatattttttgctatggattgaaagtatccccccgaaatcatatgttgaagccccaatccctcgtgtgatggtattaggaggtagagcactatgggggtgattaggtcatgaggatggagccctcatgaatgggattagtgcccttagacgaagaggcaagaaagagatgatctgtctctgccatgtgagggcacaacgagaagatagccatctgcaaaccaggaagtgaaccctcatcaggaactctatcagccagcaccttgatcatagacttcctagcctctagaactgtgagaaataaaggttgtttaagcctcccagtctgtagttttctgttataatgtcctgacctaagttattttccatcgctatacaatgggttatttttttctttaaaaaaaaattatttcttgactctactttttcctccagagactgcttatattccactgtcttcattcttctcctcctgttttctctctttaaacttttcaaaaatagcaaaatataacacatatagagaaaatgatatacagctcagtgatttatcacaaacacctgtgtaaccaccactcgaatctagagataggacattacagcaccccagaagccctccttttgtcccctcttcccaaagaagggtaaccaataacttgccttttatgataaaggctttttttttttgagatggagtctcactgtgttgcccaggttggagtgcggtggcgcaatctctgcttactgcaagctctgcctcctgggttcacgccattctcctgcctcagcctcctgagtagctgggactacaggtgcccgccaccacgcccggctaattttttgtattttagtagagacgaggtttcaccgtgttagccaggatggtcttgatctcctgacctcgtgatccacctgcctcagcctcccaaagtgctgggattacaggcgtgagccaccgcccccggccaagataaaggcttttctatctggcttctttgttagcattttgttggcgagattgatacgttttgtgtgcagctgtctgtcattttcattgcaatagaattccattgtctactatatcacagttactcattctactactgatgaaaatttgggttatttctagtttttttggtgcatacatgcatacatttctggtagacatacctagaagtgaactggctgcattatgggccataacttgtcttcaacgttagtaaataataccgcccgtctgttttccaagcagcagtaaatggcactttctgttacttcatatcttctgttacttggtactgtcaggttttaaaattttagtcattctgtcgggtgtctagtagtatgttattgtggttttattttgcatttgcctgattgcaaatgaagttgagcactttttgatacagtgattaaccatttggatatcctcttcagtgaagtatcagctcaattctcttgactatttaaaaaataaagttgtttatctttttcttacagagttttaggaggagttttttggtacatgtgcagtccaaatacacaccttttgtcagtgatacgtgttcagctgcacacacggtgttttgcctttttattcttttaatggtatctattgataaacatgagttcttagttttaatgaagtcaaatttgttcatcttctttacggtgtactttttgtgtcttgtttaaggaagtccttctctatcttaaagctttgagaagcattccttctttctcctattttctaaaaattgttgaagatctccttccttccttccttccttccttccttccttcctttcatctatctctctctcacccaggccaaacttcagtggcatgatcatggctcactgcagcctcaacttcccaggctcaagtgatcctcctgcctcagcctcctgagtagccaggactacaggcacgcaccaccatacctggctaattttaaaaattttttgtagagacacggtctcatcaagttacccaggctggtcttgaactcctgggctcaaacaatcctcccacctcagcctcccaaagtgctgggattacaggcatgagtcacatgtctagcctgtattctttctttcttaaatgtttggaagaattcatgggtaaaaccatgtgaccctggagtttatttgtgggaagcttttaaaacatggattcgatttctttaacaaatataggactatgagattttcatctcatgtcggtttgggtatgttgtgttttcaaggaatttttctattttatcgaagttgtcaaatttgtctgcaggtccccttatttcctttttaatgtatggaggatctgaagggatggtactttgtgttgtctctatttcttgtttggttttgctagtgatttgccaatttaaaaaatctttccaaagaaccaacttttggctttgtttattttttgaaaacctgagtagctgggattacaggcgcccaccaccacacccggctaatttttttatttttagtagaggtggggtttcaccatattggccaggctggtctcgaactcctgacctcagatgatccacccgcctcggcctcccaaagtgctgggattacaagtgtgagccagtgtgcctggcaagccgctttttaaatggcaccaatcccattcatgagggcagagccctgatgatcgaattacctcctaatggccccatttcttaatactatcacactgagaattaagttttaacataagaattttaggaagacacaaacattcagaccatggaacatatataaaacagttgtcctaccaactaacagaatacacattcttttcaagaacacctatataaaaattatagacactgacctatgctggccataaagcaaatatgaacaaatttcagatacctgaagagatttagactatgttctccaactacagtgcaattaagctagaaatcaatagcaaaaatgtaactataaatgagcccgtatgtttgaattttaagcaagatatatgtaaattatctatggttcaaaaaagaagtcacagtgaaatttagaaaatatcttgacgtggcgggttgcagtggctcacgcctgtaatcccagcactgtgggaggccaaggcgggtggatcacctgaggtaaggagtttgagaccagcctggccaacatggtgaaaccctgtctctactaaaaatacaaaacattagccaggcgtggtggtgggcacctgtggtcacagctacttgggaggctgaagcgggagaatcacttgaacccgggaggcagaggttgcagtgagccgagattgcaccactgcactccagcctgggcaacatgagtgaaacttcatctcaaaaaaaaaaaaaaaagaaaagaaaaagaaaatatcttgacccaatgatgatgcaaatactacgtatcaaacttgtaggatgaacttccacttctggccatgacagaggagcctgtatcagactagccttcctatttatatatttatttttgagatggggtgtcgctctgttgcccaggctggagtgcggtggtgcaatctcagctcactgcaacctccacctcctgagttcaagtaattctcctgtcccagccttccaagtagctggaattacaggcgcccaccaccacacccagctagttttttatatttttagtagagacggggtttcaccatgttggccaggctggtctcgacacctgacctcaggtgatccacctgcccctgcctcccaaagtgccgggattacaggtgtgagccactgcgcctggccgtgagtgacctttttaatgtgttgttgaatttgatttgctggtattttgttgagaagttttgcatcaatatccatcagggatactggcctgtagttttctttttttatatgtctttgtctggttttggtgtcagggcaatactggcctcatagaatgagtttggaagttttctctcctctgtttttcataatagtttgagtagggttggtattagtttttgtttaaatgtttggtaaaattaagcagtgaagccactgggtcccaggcttttctttgctgggagacttttcattacagctttgatctcattacttgttattggtctatttaggttttggatttcttcacggttccatcttggtaggttgtgtatgcctaggaatttatccatttcttctagggttttcaatttattggcatataattgttcacagtaacctctaataatcctttgagtttctgtgatattggttgtaatatctcttttgtcatttctgatttttttgtttgggttttctctctttttttgttagtctagttaaagatttattgattttgtttatcttttcaaaaaactttattttgttgatcttttgtattgttttgtttcaatttcatttatttctgctatgatctttattatttcttttcttctactaattttgggtttggtttgctcttttctagttctttaagagacatcattagattattttgaagtttttctacttacttgatgtaggtgcttataggtacaactttcctcttagtacttctttccctgtatctcacaggttttgatatgttgtgtttccattatcatttgtttcaggatgtttttaaatttccttcttaatttcttcattgaccattcaagagcatattatttcatttccatgtgttcgtatggtgtgcaaaataccttgtttttgatttgtagttttatttcattgtgatcacagaagatacttgatatgatttcaaatttaaaaagtaatttggctgggagaagtggctcatgcttgtaatcccagcgctttgggaggccgaggcaggcagatcacgaggtcaggagatcgagaccatcctggctaacacagtgaaaccccgtctctactaaaaatacaaaaaattagccaggcatggtggcaggtgcctgtagtcccagctactcaggaggctgaggcaggagaatggtgtgaacccgggaggcagagctggtagtgagccgagatcgcgccgctgcactccagcctgggtgacagagcaagactctgtctcaaaaaaaaaataataacaataataataatttaagacttgttttgtggcctaccatatggtctatccttgagaatgatccatatgctgaggagaagaatgtgtattctgcagccgttggatgaaatgttctgtaaatatctaataggttcatctgatctatactgcagactaaggctggtgtttctttgttgattttctgtctggatgaactgtctaatgctgaaagtggagtattgaagtctccagctattattgtattgaggtctatctctctctttagctctaagaatacttcctttatatatctgggtgttccagtgttgagtgcatatgtatttaaaattgttacattatcttgctgaattgacccttttatataatgaccttctttgtctctttttatagtttttgtcttgaagtctgttttgcctcatagaatagcatagctattcctgctcttatttggtttccatttgcatggaatatctttctccatccctttagtttcagtctatgtgtgtctttacaggtaaagtgtgtttcatgtaggcaacagatcactgggtcttgtttttctatccgttctgccactctgtgtcttttgattggagagtttagtccatttatgttcaatgttattactgacaagtaaggacttactcctgccactttattaattattttcttgttgctttgtgatcttctttctttccttcctgttctccttttagtgaaggtgattttctctggtggtatgttttaatttcttgctttttatttttttgtgtgtatctgctgtatgttttttgatttgaggttaacatgaggcttgcaaataatatcttataacctaatattttaaactgatgacaccttaacactgattgcataaacagacaaacaagcaaagagaaaactaataaaaactctacattttaactttgtccccccactttttaacttattgtactgtttatgtctgaaaagttgtagttattatttttgattggttcctcttttagtctttctactcaagatatgagtggtctacatatgacagtgttataatattctatatgtttctgtgtacttgctattaccattaagttctgtactttcaagtgatttcttattgctcattaatgtccttttctttcagattgaaaaactccctttagcatttagcagtatgtgaactgcatttttcaagtccagaatttctgcttgattcttttttttttttttgagatggagtcttgctctgtcgcccaggctggagtgcagtggcgcgatttccgctcactgcaagctctgcctcccgggttcacaccattcttctgcctcagcctcccgagtagctgggattacaggcgcccgccaccacgcctggctaattttttgtatttttagtagagatgggatttcaccatgttagccaggatagtctcgatctcctgaccttgtgatccgcctgccttggccttccgaagtgctgggattacaggcgtgagccactgtgcccagcctgcttgattcttttaaattatttcaatctctttgctaagtttatctgttaggattctgaattccttctctgtgttagcttgaatttcactgagttccctcaaaacagctattttgaattctctgtctgaaaggtcacatatctctgtctctccagaattggccactggtaccttaattagttcatttggtgaggtcatgttttcctgtatggtcttgatgcttgtgatgttcgtcagtgtctgggcattgaagttaggtatttattgtagtctttgcagtctgggcttgtttgtatctgttcttcttaggaagactttccaggtaataaaagggacttgggtattgtgatctaagtttttggtcactgcagccatatctgcattagggggcaccccaagcctactaatactatggctcttgcagactcgtaaaggtaccacttgggtggtcttggataagatctggaagaattctctggattaccaggcagaggctcttgttctcttcccttactttctcccctaaaagtggagtctctctctctgtgctgggccgcctggagctaggagaggggtgacacaggcacctctgtggccactatcactaggactatgctggctcagacctgaagccagcacagcactgggtctcacccaaggcctacagtctccactgcctggctactgcctacgtttgcttaaggcactagggctctacagtcagcaggtggtgaagccagtgagattatgtccttcccttcaaggcagcaagttccccctacccccatcctgggaaggtccttagatgccatctgggaggcagggcctgcagtcagaaaccttagtaatctccccagtgctctattctattacagcctggctgatacccaagccataaggcaaagtccttcctgctcttccctcccctttccacaagcagagaagtctctctccatggccaccactgccccagccctgtggcagtgctgccaggccactgccaacgttcattcagggcctaagggctcttgaagcaactgaacactgccaggcctgggactctccctttagggtagtgggctcccctctgacccagggcaggtccagaactgccaccccacagccaacacttagaatctgggaccccaagagccctcttggtgctctgccacactgtagctgagctggtacctaggctgatttttgctttttatgaaggtacttttttgtgtgtatagttcaatttggttttcctccagggaggacaattggtggaggtttctatttgggcatcttttttttttttttttgagacggagttttgctctttcacccaggctggagtgcagtggcgcgatctcggctcactgcaacctctgcctcctgggttcaagcgattctccagcctcagcctccccagtagctgggattacaggtgcctgccaccatgcttggctactttttttttcaattaaaaagtaaactttaatgtcgaaaatgcaaacttggggaaggcagaaagatcacacacaaggctgtcgcttcacacttggaaggttgcacggcggccaggagaggcactcctcacttcccagacagggcgggggccgggcagaggcgctcctcacttgccagacggggcggcggccacatgcctggctaatttttgtatttttagtagggacggggattctccgtgttggccaggctggtctcaaactcctgacttcaggtgatccacgcacctcggcctcccaaagtgctgggattacaggcatgagccaccgcgcccagccctatttggccatcttgctttgcctccaccttcatttgataacagaacacccccatgtaaccaccaccacaatcaagatataagacatttctgttattctccaaatttccttcaccctcctttatagtccatggcacccaccccatccctgggcaacacctatgtgcttcctttttttttttccccgcaggaggacgtcttcctatacctatgtgcattccatcactgctgcttttaatcatatagcgtgtagtcttatgagtctgactttttcacttagcataatgcttttgcaatttgtgattgagcgttttcatatgattctgttttttctgtctcttagcttggaagttatacactttttagtagtaactgttgggagatcgttctccaagagtctctctcatatttccatacatcctgctagcagagacattgactacctgtttttgtctgtttagtgttgctataaaggaatacctaagtctgagtattatacatagaaaagaggttttatttgtctcatggctcctcaggccatacaagaaacatggtgccagcatcttaccagtgtcacatggcaagaaaggaagtgaggaagagaaaataagttgttaactggttgttaaaaagtgccaggcacgggccaggcacagtggctcgtgcctgtaatcccagcactttgggtggccaaggcgagtggatcacctgaggtcgggagttttgagaccagcctgaccaacatggagaaaccctgtctctactaaaaaaaatacaaaaaaattagctgggcatggtggtgcatgcctgtaatcctagctactcgggaggctgaggcaggagaatttcttgaatccaggaggtggaggttgcagtgagccaagatcacctgggcgacaagagcgaaactctgtctcaaagaaaaaaaaagtgccaggctctttttaacaaccagttcttacaggaactaatagagtgaaaactcactcacccccaccccacagggagggcattcattcatgagggatccacccctatgacccaaacacctcccattagccccccacctccaacattggaatcaaaatttaacatgaggtttggggggcagaaatccaaattatagcactacctttgttccaggctaccttcaaaggatgtttatacagcaaacagccttggaaaatagagttagggtctccttgtagagcacagggtaagtttgcttacttttcagcataatcaagattgtgtcttcttctggagcaaaactttgacaacaacaagcggggcaaagtctgaaaccttttgcacatcttgacagaaccttagagattacgagatttatctctgccttactcaaggtccattagtatcttccagaacaataagttggtcttagaatcctttagctatgtattcccttccaggcttcgatgctgtgtgctgttgttttatttagtttttattttaaacccaacaagacgctataccatcaatacttatttagatccccccacatatttaacttgccatggtgcttcattctttcatgcctctttaagcatccatctaggatcgtgttcattccacatgaagagaaagcttttggcccagcacgatggctcacacctgtaatcccagcactttgggaagcctaggcgggaggatcgcttgagcccaggatttccagaccagcctgggctacgtggcaaaaccctgtctctactgaaaatacaaaaaattagccaggtgtggtggttcacgtccctgctactcgggaggctgaggtgggaggattacttaaacctgggaggttgaggctgcagtgagcgttgattgcaccactgcactccagcgtgggtgacaggagtgagaccatgtctccaaaaaaaaaaaagaaggaaagaaaaagcttttgtatttcctttcgtgtaggtctgctaatgacaaagtctctgggttttttgtttgactagagaaatgttttaattttaaccttattcttgaaggttttgtttttgttttcattttgttttgtgtgctaagtacagaattctcattggcatttatttatttagagacagagtcttgctctgtggcccaggctagagtacagtggcacgatctccgcctcccaggttcaagcgattctcctccctcaacctcctgagtagctggggctacaggcatgcaccactacacctgactaatttttgtatttttagtagagacggggtttcaccgtgttgcccaggctgatctcaaactcctgagctcaagtgatttgcctgccttggcctcccaaagtgctgggattataggcatgagccgccgtgcctggccagcatttattttcttttcagctctttaaggaagtcattccattatctctgggttccattgttgagaagccagctgtcattctaatggttgccctttgaagataacttttttccctctgctattttaaatatttcctccttgtattttattttcaacaggtgtaatgtggcacatatatcagcaattgttatgttacatacaatacatattgtgcaacatatgtatcattatcagttattgctgtgtaacaaactactccagaacacagtggcttataaaaggaatcatttatttagtccttaaatctgcaatttgagcagagctcagtgggaaagcctcagctttactttatatggcaccatataaggtaactcgcaactggcaagttggtgctggctgttggctggtagttcattcagggctcagggcccaggaccaagagtcgtcaccatggcttgcttcagcctccttgaggcatgatggctgggtcccaagagaagagaaatagaaacttccagtctcttaaggcattggtctggaagctgggacggcatcacttttgccatattctgttggtaacgcagttacatcgccagattaaagggtaaagagatacaaattcccactgctcagtgcaaggaatatcagtgattttagggggccctgttttaaaacccctacaaggtgctaagcgtggatttctggggctttcttgttttttgtttttttctatgtgtttttttttttttttttggtggtggggtcagggagggcttatagggtatgttaaatcagcagaataattttatttatttatttggagatggagtttcactcttttgcctaagctggagtgaagtagcgtgatcagagatggagtttcactcttttgcctaagctggagtgaagtagcgtgatctcggctcactgcaacctccgccccgctggttcaagcaattcccctgccttagcctcccaagtagctgggattataggcacccaccgccacgcccggctaatttttatatttttagtagacatggggtttcgccatggctagtctggaattcctgacctcaggtgatccacccaccttggcctcccaaagtggtgggattacaggtatgagccactgtgcctgacctataatgttttttaaaaatcagttttggaaagtttgcagacattaacttttcaaatgtagcttccatttgattctttttctactctgcctctgatcctccacttatgtatgtatgctagatcttttattagatagtctgtgtctcttatgtactctactatattttgtattcttctgtctctccatgctttattctgtttactctttcctgattatattttttaattttgtaatttccatttgatgcttttttgatcattcaaaactcttcaccaaaattctaaatttccttttttaacctctcgaatgttatcacagttactttaaagtctattttggataacttaaatatttacagtcccctcacagatatgtttcttttgtatattgtttctgttggttttctttcatgtcttatctccacatatgcctggtgagttttgattatgtgttggtcattgtatttgcaagtatgctcgtagaaataatctggaatggccgggcgcagtggctcatgcctgtaatcccagcactttgggaggctgaggcaggtggatcacgagatcaggagatcaagaccatcctggctaacatggtgaaaccccatctctactaaaaatacaaaaaattagctgagcatggtggcacgttcctgtaatccctgctactcgggaggctgaggcaggagaatcacttgaaccaggaggcagaggttgcagtgagccgagatcacgccactgcactccagcctgggtgacagagcgagactccgtctcaaaaaaaaaaaaaaaaaaaaaaaaagaaataatctagagcctagtttgatgtttccttacaaagaatgaatttatttttgcttctcccattgcaactaggataacctcagtctagtttctggaactgaaatcacttgaggctgaactgtggtctctgtgagagcgtgtctgtgtatggctcacccttattcctaggctacgtagttctttaggaccctaacccaaagtaagagatgttcatcagggctctcctcttggcagacgcctgggctccagtccctgtgtcctgagccccatgaggctgttactggtgctgctcgtctgcccatcctctccagtaacagccacctgaacactgcaattcctgggtttccatcattccttccagcctggtgagtcatcagtgtcttttgaggtatccagtgcctgccagcagatgttttttaataatttgtccagcatttctggctgtcctcagtaggtggtctgtttcacattccctagtctgctgttaatggaaagtggaagttctgagagagaatcatcgttcccgtcagcattcaaatgcctgattacactttccccattcgctatcctttcctttatttgctcctcaccacagcaaaactcctcaaaaatatctatctttgcaatcttcagattctcacattgtgtccttaaacccactttaatcaggccttggttccctccattccactaaaagtaatgttgtcaaggtcgtgcatgcctccgtgatgctaattccagtgatgagttttcagttgtcattctctgacatatcggcaacacttgatgtggagtaccctgatgttgagaggctggtgagatgaaggaaaaacccagccaagggcaatgaggaatggcttccttccgcctcctccttccctatctttgttgtggtttttgttgtttctgtaacactgattacgttatagtttatttaatgtacttccttattctatgtttttactttagtcattttgttgatctcctccataataacataggctcgggccaagcacagtggctcacgcctgtaatcccagcactttgggagaccaagatgggtggatcacttgaggtgaggagttcgagaccagcctggccaacatggcgaaaccctgtgcctactaaaaatacaaaaattagctgggcgtggtagcaagcgcctgtaatcccagctactagggaggctgaagcaggagaattgcaggagaatcacttgaacccagggggcagaggttgcagtgagctgagatcgcgccactgcactccagcctgggtaacagagtgagactctgtctcaaaaaaaaaaaaaaaaaaaaggcttcaggagggcagagcattttatgcaattgttcattaattgacccctccatttggcacagatcacatgcccagtagttaactgttaatcaacgcactctctgtggaacaacaggctggtcccgttgagccaacactctctgggcactgccttcactagactctggctggctgctgcgcttgtagaggtatgcaagacaaaaccttttggtatgttaaaagccctggtcagaactttaagtaaccatcactgacatataatggttatggttttgaaagtgcttttatagtggtttttcatctgtcctcacagcacctctgggaggtaggtaggacaggtacagttagtctcatgtttcaaatggggctcagagagggaaaaggatttcccaagatcacacagcaccttagtagcaaaacttggactcaacctcaacacttaaaaatgaacaaagctggccgggcgcagtggctcatgcctgtaatcctagcactttgggaggcccaggcaggcaggtcacctgaggccaggagtttaagatcagcctggccaacatgacaaaactctgtctcttctaaaaatacaaaaaattagccgggcatggtggcgggtgcctgtaatcccagctactcaggaggctgaggcaggagaatcacttgaacctgggagatggaggctgcagtgagccgagatcgtgccattgtactccagcctgggcaacaagaatgaaactccatctcaaaaaaaaaaaaaagaaaagaaaagaaaaagaaaagtttccctttttttaaatatctcattttaatgactgcataatagtttattacatagttataccataatttatataatattttgttgctgtacatttaggttaaacaatacttacttagttcctactatgaagaggggccaagtactcgaggctggagctctcacatgtggcaatgaaattagaaagtggatatggcagggctgtggtaaaataaaatataaaaataataaatgatattaccaaagaaaaggaaagtttttcaaaataaaggaaaatctagacaagcatagtggctcacacctgtaatcccagtacttttggaggctgaggcaggaggaacacttgaggccaggagttcaagaccagcctgggcaacatagcaagaccccctgtcaacaaaaataaaaaaaaattaggccaggcacagtggctcacggtggctagtgcctgaaatcctagcactttgagaggctgaggggggtggattgcctgagctcaggagttcgagaccagcctgggcaacatggccaaaccccatctctactaaaaacacaaaaaattagccaggtgtggcagcacacgcctttaatcccagctactctggagactgaggtaggagaattgcttgaacccgggaggtgaaggtcgcagtgaggtgagattacaacactgcactccagcctgggtgacaaaatgagactctatctcaaaaaaaaaaaaaattagctgggcatggtggtgcatgcctgtaatcccagctactcaggaactaaggtaggaggatcccttcagcccaggaattcgaagatgcagtgagtcatgatcacaccaccgcaccccagcctgggttacagagcaagaccttgtctctaaaaaacaaagaaagtctaacctaaacgccattatgtcatttacatgtgtataggggtgtgtgtgtgtgtgtgtgtgtgtgtgtgtgtgtgtgtgtgtgtgtgtgtttgcttgggaggggagtcgggctggagctggccaggccgcagcctggggaccttctgattccagcagggatgtgggccgagggtcccgccttactcatttcgggtcttgctcctctgtcctggctctacagactcttccagctggagttggaggctgacgccctagtgaatttccatcagtattcttcccagctgctacccttctatgagagctcccctcaggtcctgcacactgaggtcctgcagcacctgaccgacctcatccgtaaccaccccagctggtcagtggcccacctggctgtggagctagggatccgcgagtgcttccatcacagccgtatcatcaggtgagcaagggaacaagaccatttggacaacgtgtgtgtacctgcttgtgtgggcagtgggggccgcaggcctcggttcccctccatagtttgacttaaaaaggagcagggcctggcatggtcgctcactaacgcagtcccagcactttgggaggctgaggagggaggatcacttgagactaggagttcaagaccagcctggcaaaatagcaagaccttgtctctacgaaaaaattaaaaaattagcatgtgtctatactcctagctacttgggatgctgaggcaggaggattgcttgagcccaggagttagagtttacagtgagctatgattgcaccactgcacttcagcctgggtgacagaatgagaccttgtctctaggaaaaaaaaaaaaaaaaaaaaaaaggtgctgcgttgctaccagattaaaatgtaagaaggacaatgtaatgtttccagagtccggagtgctcaccaggtgccaggtctgtgggagctgatttctacccaccatgaaattgaattttcccaacccccacaaggtatcgtcattttattttactttattttattttattttattttattttattttattttattttatgttacgttatgttattttattttgagacggagtcttattctgtcacccaggctggagtgcagtggcgcgatcttggctcactgcaccctctgcctcctgggttcaggtgattctcctgcctcagcctccggaatagctgggattacagtaatgtgccatcatgcccgggtaattttttttttttttttttttttttttgagacggagtctcgctctgtcgcccaggctggagtgcagtggcgcgatctcggctcactgcaagctccgcctcccgggttcacgccattctcctgcctcagcctcccgcgtagctgggactacaggcgcccgccaccacgcccggctaatttttttgtgttttttagtagagacggggtttcaccatgttggccaggttggtctcgaactcctaacctcaggtgatctgccctccttggcctcccaaagtgccgggattacaggcgtgagccaccatgcccggcccaggtatcatcattctagagagagctaacaggacttgtgcaggtcactcagccagagagggtgaaagaggggcttggatccttggtgtctgcccaggctgctcttctggaagctgaaggcctccttttgtgaatccattcagccagcagatggagcagctgttgcccctggtgagggcactgtccccacccttgcacagggcaccagttggccatcttgtgcagaggtagccacacctcctctgagtctctatcctagatagctcagttaagctcccaggcccagaactcaaaacctcactgctggccgggcgtggtggctcacacctgtaatcccagcactttgtgaggccgaggcgggtgtatcacttgaggtcaggagtttgagaccagcctggccaacgtggtgaaaccccgtctctactaaaaatacaaaaaattagcaaggcgtggtggcgcacgcctgtaatcccagctactcgggaggctgaggcaggagaattgcttgaacccagaggcggaggttgcagtgagccgagattgtgtcactgcattacagcctgggcaacaagagtgaaactccacctcaaaaaaacaaaacaaaacaaaaaccctcactgcactttagtttccaggcgtgcttttggacagcactgtctcatctcaccatcactctgtccatttcctggggcaggcacagcagcttgtgtcgataaggatattgacgcccagaaaggttaagtgaattgcctgaggctagtgagatatccgtgttctgtgaccctttcctgtgccaccaccctgcccacttcctgctggtgtggccctggggcccatctcttgtacgagtgagcaaactgaacagaaacctgatacaggtcacatcagatataattacattcaaatcagcccaactagctgagtggcgggaatgctcttgagctcaaataaaccagaaagtccgagtttccgagtgcacttccctgcatgtgcacttaggtccccctgccaccttgtaccacacctgctcacctctgctcaccctggccctctcctgcagctgtgccaattgcgcggagaacgaggagggctgcacacccctgcacctggcctgccgcaagggtgatggggagatcctggtggagctggtgcagtactgccacactcagatggatgtcaccgactacaagggagagaccgtcttccattatgctgtccagggtgacaattctcaggtgctgcaggtgagcagggggaggggcagggtgactggtactgatacctcccggtgtccacggttccctttgggcccctaggctcaggtgtcactctcaggcctctcactgtcccccattggtccttgaggcctgagctccttcatggagggtgcagacccctccctggctcttccctcccagcccttttccaggagccacgtcctcagtctctttgcttgataaacctggggacggcctccaacccagcaaaataaaccccaaaaaaggcccagctccagtcagttagttcagttccacttttcctgagcacaaactgtgagccagatgcctgcctggaggggctcgtgggccagcgggacctgggcttaaccttttgcaagcttgtccaatctgtggccctgcaggctgcatgcagcccaggacggctttgaatgtggcccaacacaaattcacaaactttcttaaaacattatgagatccatgcatggaccttttttttagatcagctgttgttagcgttcatgtattttatgtgtgacccaagacaattcttctgatgtggcccagggaggccaaaatattggacaaccctattttacaggaattcaaaccaagcaaaccaaactgtctccagttcctgtaggcatttgtgccagaggccctcctgttaacgtttttgattacctgggcaaaagatgtgattttttaattgtgggcaagcagatggggtgatactattaaatagctatttcatatattagattgaacagaaaaggcaggatgttggattatgttttattgtctagaattagaaaattcttctaaagatcatgttctctctgccttggcatcagaatgcaactacgttataccagaaaatgtggattcctttttttttttttttttttttttttttgagacagagtttccctatgtctcccaggctagagtgcagtggtgcgatctcggctcactgcaacctccacctcctgggttgaagtgatgctcgtgcctcagcttcctgagtagctgggattacaggcatgtgccaccatgcctgggtagtttccgtatttttagtagggatggggttttgccatgttgcccaggctggtctccaactcctggccttaagtgatccacctgcctcagcctcccaaaatgccgggattacaggtgtgagccactgtgcccggcccagaaaatgtggattcatatcttatgcttcttgctctcagggaagggaattctccacccactgttgaactccactttcaccgagaatcctctgcgcacccagcatggtgccgcgcagaccctgcctccatgcgggggtgtgcacacccgcttctcgatagtcatgcacgactgcagctgtcctttatccggtgctgattggtgcctgaccttgaactgagtgttgtatgtgttccagttaattcttagaatacactcatggggtggaggtcattattcccctttcctctccgaagaaactgaggttcagtgttgttaattaagaagcgtgcccagggagggccacaaagctgagagagtggggcttgaccttacattggcctcgatgccagccctttgctcttcctgctgtgtctctggcctgccttcaggtccagtgggactgctgtgaggtgaccctggtgtcacatgggtacactgtggttgtaatgaacctcatggggacagcactgagccaaaagtgagacagtaaaaccctcctagcactttcttttttttgagacagcatctagctctgtcgcccaggctggagtgcagtggtgtgattgtggctcactgcagcctcaacctcctggactcaggtgatcctcccacctcagcctcctgagcagctgggactacaggctcgtgccaccacatgggctaattttttttttttttgagacggagtcttgctctgtcgcccaggctggagtgcagtggcgcgatcttggctcactgcaagctctgcctcccgggttcatgccatcctcctgcctcagcctccagagtagctgggactacaggcgcccgccaccacacccggctaattttttttgtatttttagtagagacagggtttcaccgtgttcgccaggatggtcttggtctcctgaccttgtgatccgcctgcctcggcctcccaaagtgctgggattacaggcgtgagccaccacacccaggccacgccagctaatttttaaaatttttttggtaaagatggggtctccctatgttgccgaggctggtatcacactcttggtctcaagtgatcctctcacctcccagtgtgttggaattacaagcatgagccactgcgcctggcccctggctctctttttaatactgctgttctttcattgaaaacatagtacctgcatgtagaaaaaaatcagtcaggacagaatgaaaagcaagaatcattcccacctggacccccagtgcccatcctgagatacagctaccttttaagttccttgactcagaaatgtttcatgtgagccacagtcatgccaggtcgaccccttccctcccatccacactggcacttggctttcctggtgcttctctttacgttctttttttttagacagagtttttgctctattgcccaggctagagtgcaatgatgcaatctcagctcactgcaacctctgcctcctgggttcaagcgattctctttcctcaggttcctgagtagctgggattacaggtgcctgccaccatgcccggctaatttttgtatcgttagaagagacgacatttcaccatgttggccaggctggtctcaaactcttgacctcaggtgatccacccaccttggcctcccaaagtgctaggattacaggcatgagccactgcgcccggcctctttacgttcttatcagcatcctatggagtcaaacttcccttcctctttcatcagctccttggaaggaacgcagtggctggcctgaaccaggtgaataaccaagggctgaccccgctgcacctggcctgccagctggggaagcaggagatggtccgcgtgctgctgctgtgcaatgctcggtgcaacatcatgggccccaacggctaccccatccactcggccatgaagttctctcagaaggggtaagacctcctcccctccccatctgctggcctgctgggctccagctctcctgtcacctgtcccgtgcctgaggcaagcagtatccaccatagatcttagcatctccagcctcagagcagaggccccgggttcacaagcctcattaggccccgcctggcccaaagaaggtgctccatcattgtatcatgggtaggaatctcggttcacaagttcagctgtgcaaggaggagactttaaaatttttctggctgggcgcggtgtctcacgcctgtaatcccaacactttgggaggctgaggtgggcagatcacctgaggtcgggagttcgagaccagcctgaccaacatgaagaaaccccatctctactaaaaaatacaaaattagctgggcgtggtgacacatgcctgtaatcccagctacttggaaggctgaggcaggagaatcggttgaacccgggaggcggaggttgcagtgagccgagatcgcaccgttgcactccagcctgggcaataagagcgaaactgtctcaaaaaataaataaataaataaataaataaataaataaaaataaatttatttaatgtaccttaattcctaggagtgaatctccctctataaaactggagacaaccaatcttagccctctttggggtctcctctttccagctcccctccaggtggtgctccagttctggagtctgatgcaaccccaaggcccacctggcccctcctctaacccagcccagcctgatctgaacagccccccgatggcttcagtgctccttggtttcttgtgtgcccagctcaaagcctgggaaatgcttggtaaggtggccgagtgcccgtccacctagatgcctctttcctttctggctggtggcacgttgggaggcaggtacaggctcatgttttgggagcctgggaacccctggtgtcaggaaaattgtcttcaaaggggtaggggatgagataaaaagataaatgaatatctcaaatctcaaaatactatctaggccaggcgcggtggctcacacctgtaatcccagcagtttgggaggccaaggtgggtggatcacctgaagtcaggagttcgagaccagcctgaccaatatggtgaaaccctgtctctactaaaaatacaaaaattagccaggtgtggtggtgtgtgcctgtagtcccagctactcaggaggctgagacaggagaattgtttgaaactgggaggcagaggttgcagtgatttgagattgtgccacagcactccagccagggcgacagaacaagactccatctcaagaaaaaaaatactatctaacaggaacaacatctagaatgaatgaatgagccaatgagtccttcgatcctggcactgtgctaaagcaccagcctcaccgaaatgaataagccactccaggacaggagacaccccagccacccagaatctcatagcgcagtgccagacaagcagtgagaaggcatggacgggcagcactcaggcagggaggctggcacttgtgcctgtcctcaggttgttccttcctctgggagctgcatccaccttgctagccccatggggcattgctagcccttctaagggctggaccaagcctggacaaaccctcctttccttgaatctcccaagcacagccagaatgagctagagctttcagaaatacttgaccaaacagagaagataccaacacccccagccccgcagtcaggttccccatttgcaggttgtgacctgagtggacaccaggtgatgctcttctctacccagagggctggcacatggccccactcttgcttgtctccagccaccctgagctgtactgggcaggagctgtaattgaccagttttctctctcttcaaacaacctcagccctcaccggtccctctgtccccacacaggccatcctgggtgggtccagcgtcccatcacataagaggatctttgcacagaagacaaaggaagaggctcctaccttgagtggagcagggagatcccttatcgacttggcagccagcacagccctactccaagaatcccacggcctcagtgttactgacaagtggttccctcacagctcagactaggagctccctcgctgtttttctttttcttttcttttctttgttttgtttttgagacagagtttcactctgtcacccaggctggagtgcaatggcatgatcttggctcactgcaacctctgcctcccaggttcaactgattctcctgcctcagcctcccaaggagctgggattacaggtgtgcgccactatgcccagctaatttttgtatttttagtagagatggggtttcatcatgttgaccaggctagtcttgaactcctgacctcaggtgatctacttgcctcgccctcccaacatgctgggattacaggcgtgagccaccgcgcctggccacctctgctgtttttcaatgcagctgacctttcccacaaagctcggtttgtgcctgcggttctcagatggttaagcccctgctgaggaagggaaacagataatcccagacagtgagatggaggctgagactgaggatgcctgggggctgcactaggagctcagagacggcatcaggcagctggagttcagggaaggtttgggggcagcagagcccgagccaagccatggacactagccggagctggccactcgggtgaagacttggggggctccagagggcccagggaaagaagctgggcctgactccatgtgcctagtgctgagcaccaagcgctggcataagggctgtagggagctgggcagcataaatcctgggcctgtgctgggcacccctaataatagagaacagcagctgaacactaacgctgtcccagccaccggcttagccttcatgtgggctatttcactatagcccagagagctgatgtattttattccccctctaaagctgagggccaagtgtggtggctcatgcctctaatcccagcactttgggaggctgaggcaggaggatcgcttgagcctaggagtttgaggctacagtgagctatgatcatgccattgccctccagcctgggtgacaaagggaaatcctgtctcaaacaaacaaacaaaaaacagatgaggaaaccagggcttagagagattaagtaatttgctcaaagtcaggcagtcagtaagtgccagacctgggaattaaacccatgtgggctgtcctagtaattgcactaaaaaaaaaaaaaaaaaaaagctttattgagatatagttcctattccatacaatccacctattgaaagtatacaatgattctgatatattatgtttattttttccaactgtgatagattatatataacataaaatttgccattttaaccacttttgttttttgtttttgagacagagtttcgctctcgttgctcaggctggagtgcaatggtgtgatctcggcttaccgttacctccacctcccgggttcaagtgattctcctgcctcagcctcccgagtagtagctgggattacaggcatgcaccaccatgcccagttaattttgtattttttagtagagacagggtttctccatgttggtcaggctggtctcgaactcccgacctcaggtgatccacccaccttggcctcccaaagtgctgggattacaggcgtgagccaccacacccggcccattttaaccacttttaagtgtacaattcggtggttttaatcacatttacaatgttgtccaaccattacccctttctaaaacttttcttatcacctcaaacagaaactgtaaccattaataactcccgattctcccctccccacagcccccgataagtcccatatcctctctgtctctcagaacttgcctgttctagaacctcgtatcagtgaaatcatacagcgtttgtccttttgtgcctggcttatttcacttagcatgatgtcttcaaggctcatccatgttgcagcacgtatcagaatttcctttctttttaaggcagaatactattttgtttatccattcagtccttcactgatagacgcctgggttgtttccaccttttgtctgttgtgaagaatgctgctgtgtacatgggtctgcaaatgtccattcaagtccctgcattccgtcctttgatacttccgacctcaggtgatccgcctgcctcagcctcccaaagtgttgggattacaggcgtgagacaccgcgcccagccagaaaaattttaaagtcttctccttgcacagctgaacttgtgaaccgagattcctacccatgatacaatgatggagcactttctttgggccaggcggggcctaatgaggcttgtgaacccggggcctctgctctgaggctggagatgctaagatctctggtggacactgcttgcctcaggcaccgagtagaaagcaattgtgctctttcccactctgtcatactgcttcctatagcatgcaggtcactgtgtgactcactgacagtgtggtaaggaggtggagggtggctgtgtgccaggcacagaactgggctctgaaatgcctggtcttccttacaccccagccactcctctcagcactctctccatgttgctcagcttctggaggccaccagtgaggaagctggggcttgacttcaagcccatctgactctaaagccagtaccagggagggtgatcattgctggtggcagcatcaggaaggcttcctggaggagggggttagttgtgccttgaggggctcagtacagccttaaccatggtgagtgtgctggttgggtttgctgaactttgtttgcagtgatgctctctgtaagcagtagatgaagctccaagtcctggcttcatcccacgccacgcagaccctagcttctgctcaccaaccggggcccctctctcaccaggtgtgcggagatgatcatcagcatggacagcagccagatccacagcaaagacccccgttacggagccagccccctccactgggccaagaacgcagaggtgagtggatcctgaggtgggtgggtggggcagggggccgggccccgcaggtcctcagggccctcaggaagcaggttcccgagaggaccctgaggctagcacttgggggctgaccttgcagtgggtgtgcaggcagagaagtccatgaagagctgggatcctggcagggctctgctgctctctggctgggcggggggatccgccctgtgcctcagtttcctcatccatgaattctgctttggcgatgtgatgaagtcagcaaggcagtgtgtgacaaaactcggcacaaattgtaaagtgcttcccaaatagaaggtggcgtgatgatgattgtattattagtcaggattctctagagggccagaactaacaggagatatatatatagagagagaggggggtttatttttttattttattttttttgagacggagtctcgctctgtcgcccaggctggagtgcagtggcacaatcttggctcactgcaagctctgcctcccaggttcatgccattctcctgcctcagcctcctgagtagctgggactacaggcgcccgccaccacacccggctaatttttttgtatttttagtagagacgaggtttcaccgtgttagccaggatggtctcgatctcctgacctcgtgatctgcctgccttggcctcccaaagtgctgggattataggcgtgagccaccgtgcctggcctaaagggggatttattaaggagcattaactcacacgatcacaaggtcccacaataggccatcgcaagctgaggagcaaggaagccagtccaagtcccagagctgaaggacttggagtctgatgtttgagggcaggaagcatccagcacgggagaaagatgtaggctgggaggctaagccagtctagccttttcacatttttttctgcctgctttatattctggccgtgctggcagctgattagatggtgcccacccagattaagggtaggtctgccttcccctactgactcaaatgttaatctccgttagcagcaccctctcagacacacccagggtcaatactttacatccttcaatccaatcaagttgacactcattattaaccatcaagatgatgatgatgatgatggatgatgatggtggtggtggtggtgctgggcctagctgcacacacagggagcctggctgggcatctcctctgagttcttcccctaagctaagctctgtcctcctgggaggatggaggcctctggtctcatcaccaggaagcacagcttgacagagaatgggatgccccagagttcatggcctacttctcaatgtgatgggccaggagggagggcactgccagcctcagggtacctctgcattccaggagccggacaccgagtcaggcccttccgtgtaggtttggtcactcattgtcatcacatgctgtgaggtggggacttgcattcccatcttcacagaagccctgaagtgcacatggctacagtgacccatccaagcgcaggcagctgggatgagtgaagctgggctttgggctcaggtctgtgactccaaagccaggctcccctccctgttcccaaggctctgccagggatgtgcattgccaaggcccagtgagaggtgatacctttgcagggttccagggagggatgcagggagcggggtgcttcaggacaggccccagaggagcctttgcaaggagagtgggttctgttggcactaggaaaggaccagaagcctcttaaaacagtcagcacatctttggctttttgtccctagtcttgggatgctgatgggatgggaggcagtctaggcccccctagaactggggcctgcccctggaatcctcttgctagcgctttccaacatcccagtacctgtaggcctctcagagcagaagtggcagtgcccacgtgtcccggggtgcggcagctccccgagtgcctgtgctaactcagcctgaccgtctcccgcagatggcccgcatgctgctgaaacggggctgcaacgtgaacagcaccagctccgcggggaacacggccctgcacgtggcggtgatgcgcaaccgcttcgactgtgccatagtgctgctgacccacggggccaacgcggatgcccgcggagagcacggcaacaccccgctgcacctggccatgtcggtgagcccaggaccgcgtgtcctgccctgtggggccccggtgggaatgcaggagggctgtccggactggagccctcctccccactgtctccctcctatcgtcagctgctccaaatcatcttcccacccaaagctcagttcagaccctgactcctccctcaggaagccttccaagtccccctctcagcccaaaataacaccacctcctgtgtgctgtggtaccttttccacctgtgcccccatttggcacttgcatggcacgagagggaaaaatgacagctctggccatagactggccctgagcaagccatgtcacctgtcagcctcgatttcctcatctggaaaatggtggtgtcaatacttatctggaagagttgtggaaaagttatggtggacacttggtcaccctctacagaatgtctaagtgacacacgcagtacctggcccgagtgagcatcctgcttcccttcactggtccgcgtgttgctctcatcttccctgggaggctgtaagatcctggcaggcaaagcctgagtgtgcagcccagcagcctgtggcaggtgccaggcatattcgttggtttattatagaacacagttcctgccctcaaagcccttactgtctggttacacatctagagtatgaacatattaaacctagcagaggaggacgttactgtgttacagacatatgtgtgtgcatgtattcttttttttcgagatggagtctcgcactgtcgcccaggctggagtgcagtggcgcgatctcggctcaccacaacctccgcctcccaggttcaagcgattctcctgcctcagcctcccaagtagctgggactgcaggcacgtgccaccatgcccagctaatttttgtatttttagtagagacggggtttcaccacgttggccaggctggtctcgaactcctgtgttggccaggctggtctcaaactcctgacctcatgatccacccgccttggcaccccaaagtgctgggattacaggcgtgagccaccgcgccccaccgtgtgcacgttttctatagcaataccgtatgtacagaagtctgtttactgagtctcagtgacagaacatgagagacccccgggactctaaaagctgattcaggacacattcagagacatcctgttttataccaaaggtcaaaacttggaagagatgttgttgcccaaaaggctgaaactataaatagtttcatttttgaaactgtggacatttttagcactgggtgggcccttggaatgatctaactcagcagttctcaagttttttggcctatttgatccctttatactctgaaaaattattgaggatcacaaagattttttaatcatctggattttctttatctatatttaccattttagaaatttaaagtgtgaaaatttcaaaatattaattcatttaaaaataacaataataaatatatatgcctactatgtacccacaaaaattaaaattaaaaattttttaaaaaacttaaaaaataactggccagctgcagtggctcgtgtacaccagcactttgggaggccaagatggtcagatcacctgaggccaggagttcgagaccagcctggccaacatggcgaaagcccatctctactaaaaatgcaaaattagctgggtgtgagacctctgaaagggtatcacgtgttcacaggggtccccaggtcttactttaagaactgctgatagactttggtcatcttcatcccatcttcacagtttttggcatattcatcaaccacctttacaattatgtacttaatcacctcttcaaattggcttacttttatttatttattttgagacagagtttcgcttttgttgcccaggctggagtgcaatggcacgatcttggctcaccgcaacctctgcctcctgggttcaagcgattctcctgcctcagcttcccgagtagctgggattacgttcatgcgccaccacacctggctaattttgtatttttagtagagacggggtttctccatgttggtcaggctggtcttgaactcctgacctcaggtgttccacctgcctcagcctcccaaactgctgggattacaagcgtgagccaccgtgcccggcctggcttacttttaaactgacttaaatttattttgagagaaatgttgcatcactaccataaatggccatccatccatccagtgccaaccataaaaggtaaccaatgcagggcgcggtggctcacgcctgtaatcccagcattttgggaggccgaggtgggcgaatcacgaggtcaggagttcaagaccagcctggccaacatggtgaaaccctgtctctactaaaaatacaaaaaattagctgggcgtagtggtgggcacctgtaataccagctactctggaggctgaggcaggagaattgcttgaactcggtaggtagaggttgcagtgagctgagatcacgccactgcactccagcctgggtgacagagtgagactccgtctcaaaaaaaacaaaacaaaacagtaacaacaacaaaaaatcacagttaatgctgaaaacacacacatatctgtagccatagaagtcctaatagaatgtgaagaactgtttggaaaaccccattctagacccacagcttcattctctaggcagggaaatcgggtcccaagaagaggaaggtgacaaggccagagcccacagttccaggtggccagtgtgtcctctgaaaccatgccatgctctgcgcccctgcccggcctccaggtgtggaaatgtgtgacgttcttcgtggggacactcccccgaaggctgccattaggggcacgtgtgttcggttacccctcagggatgacaccctggactgggtgggcaagatggccttccctgccctcacccaccctctccttgctactcctgaaagccatcagcagctgacctactgtgtccccatggctcctgggtcggggtcacagatgcactgcatctttggaggcggagctggcagagcaggggcgagtcacttctagtttctgcctgggttcttacaccctcccctgtgggtgcttttaagcctgtttgtcaggtccccagccatcaaatggcagactttggactaccagattgacttgggtgggggtgaggagggttccagtgtctccccgtgctgaggagaggcccgctgggtgagttgacaggttggggctggcagccaggggcccctttgttcttcacttccccggcagttgcacgtcttatcctctctccatctccaacagaaagacaacgtggagatgatcaaggccctcatcgtgttcggagcagaagtggacaccccgaatgactttggggagactcctacattcctagcctccaaaatcggcagacgtatgtgctctgcactctggggctggagtggggtgagggttgggtggatacagggaccgaggaggagggaagtcccaggcatcaggtgccagcatcctgtgctgacccgccctgctcagagctgccaggagcacctcgtactcagagagggggcttccttacccaagcacaagggccctgagcagtagatgcaggcccaccacggggcttgctataccagcatcctctcccgtgcagcgccccccacctcagggagctaagattcccagcaggggtggggacaggagagccagcagcagccttctttccccaccgttggggaattcactgatggaaccactggctagaatgaccaagggtgcatgcactacactgcacgagctctgggcatgcctgtgtgggcagagtgcatggccatgtgctgcacgctcgcacagtgagccttagcttcagagctggacagagcagatcctcctcaccagaggcctggagcccgctctggagggtttcagcagctgtgggggtcactgtgggcaggtacctgatggcagcagtgtgtgtgtgccagtgcacacgtgtgtgtctgcatgcaccgcatctatgacctccttttcagcaatcccatccatcaaatggagtaggtgccccctggctggctcattagtccctttggaaccctgaactatcacttagcatttttgagaatcactgaatgtggccatgggattcctgctttcttggctggagtagaaggaaagaaggggttcccacaggcatcgggcagggtgacactgacctcctcctcccatatcctccttccctggccttaggaagctgcttgggatgtaccagcctgggggcagcactccctgtcagggtgggctgaggcctctggagcagcccacgtgcccagggcctgggagctgggacaggggacggagtgtggaaaggaggggcctctcctttgcatgttgacatcatttctgatcctgtgccatctccccttccccaaaccatgacaagttgtcaccaggaaggcgatcttgactctgctgagaaccgtgggggccgaatactgcttcccacccatccacggggtccccgcggagcagggctctgcagcgccacatcatcccttctccctggaaagagctcagcccccaccgatcagcctaaacaacctaggtaggcctcgcctcccgactccctcttctccagctggttcccaggcccctggatcacagcaggccccaccaaagcaacaggatccctaggacggaagtcactaaaggaagccggggaggatggggccggagttgtcagcctctaggcagccagcaacccacagatcccagaggcctagggtgtccctggctgatgtcccatgctccgttgcccctgagaggatgtgtcctgcacacagtctcaggcctgggcatttccagtggcacccatgaggtggctgctgttactgccctcctgtccccagggcgttcagggtgggcagtgaggagtgctgtcgggggactgggggcccgggccctctggcttcacctgtccctctggcttcacctctatcacactgtttgaatctcggttgggcctgagacctgtgtgcccccttcctggccccgtggtgactttcagacgttgaatgtggccaggcagccagcatctgccccggtgcattccttggtgcccagggagacatccccagactagacaggacccttctctggactttctgtgggctggcccactcagggacctccattgtttgggagcggggtcccctgaacagagggcagccaggagccagtccttggtgagccagacttcactgtggaggcggcagcaccttcagccagggtagcccgaccaagcctggaactctggagaggcaccgtgactgtggcttctagtcctggctccacctctctctcccctcccaggaactccccctccacctcccatctttatctctcaattttgcaggcagtcacccaagccaggccggatggtgggcctggggtgcggcgtcagatgggtaacgccctgggcctggagaggccaccgagcctagccatgcggcattagctctagctctcactccctaatccgtccttcttagctgcgcacacaccacacgccccctcccctgcaccctgtccccggcctctctcagccactcttctgcttcccttgttcactgtggagccgtgtgccctggggagggggagacaccgcttcgcagccctcggttctgctttgctgcttctagactctgcacagtggtggggggctgtcagagttggggtcacgcgggctgctgcaccaggcacctggggactgggctgcttgtcaggaggggcagctagtcagttgggtggacgtcaggcaggccttggacacaaaggaagacatggacagagtggatggtgggcctgatcccggaggccactgggatttccagacctgggatcaggacgagggatgtctcctttcatccatggacttaaaccccgaggaacgtcctgactcagccttttgactaaatgaccttgggtgaattatggaccctcttagagcctcacctgtcaatagggaataagaattcttaggccccaggtggttattgcagcatcggctccgatgcaagaagaagcactttgtctgaagaggacacgcaagggtattcatgccttggggtttcaagaggaagagattgaggggaacctgggagctggctgggcagggtggggagcccttcccagagcagtgggcccccctttccactccagcccatttctctcctgtggcctgtggctcagctttctcctgggacagagtccttcctgtggggaagggacagatgacagggggagtggggggatgagggcgtggccgtgggcgaggcacagcccaggtttgatctagggacctctggggtagcagggcttggggacccacctgaccacagcatgccctgctctgtgcctcacagaactacaggatctcatgcacatctcacgggcccggaagccagcgttcatcctgggctccatgagggacgagaagcggacgtaagtggatcgagatcgggggcagagcggggaacgtgtgcgctttcctgcccctcacccaccccctgttgtgggctcagggctttactctctgcaccctcacagccggcgaagtggctctgctcctagtcttatagttctcagcagagacagaacatggagagcctgtgtcgctcgttcattaatgctgggcggtgcaggctctggagaccagcccagggtgccaggcttcttggacttggtggggctggcgcagtgttctggcctccctccctgatctccttatggctagaagagggggagatgcctgggtcccccctggggagatctcagcagctgcttcccactgctcctactggcttccttaaccacctcccactgcagaatagtggcgtgggctgccttccccagcacctgctgtatacctagtcccattgtaagaggcgggcctgggtgacaggatgcaaagagaagacgcccaggccttgcccttcaggcataatcccgggtgcttgaactcagtgccagctggcacggcaaggtaccaggacaaatgcgtttccagccactgtgctgtcgccacctcccttgattgctgcagttgattcatttattctttattagtctctcatgttcctaatagccttcccagggaggaatttgtaaccttgttttacagatgcagaacctgagcccctgagaggtgaagtgacttgctcaaggtcacacggagtgagtgtcagggtggcaactcacagccgggtcttccgaacccacgtcctttgtgctaccgcaggctctctctgggttctctgtggactctatacctagtgccagccctctgcagggaaagctctcttctcagaatcagaggcagctccactcccagggccaggcagtgatcgtgcagctctgtgggtcctctcacttcgcactcacttccatgctaccctgttgtgtgccctggaggttcccctgccccatcagcattccctcccctgtgccccctgcatgctcttgcacgcgggcacacgcacacacacacgcacacatgcacgcacacacacccacatgcacatgcctgcgggttgcccacatgcatgtgttgcccacatgcaaacacatggacacgcacacacatgcacacatgcaaacacacgtgcatgcacacacatacacatgcgcacacatacacatgcatgcatgcacatggacacccacacacatgcacacacatgtacacacatgcatgtacatacacacacctgtgcaggggctgaggtgaggcagctgcacctgaaggggggacccacatttcccaagggaggaaaagcagattccccagattctggagcctcagaaccctgcctggagcggggctgaggcaagagtcaggagacccctcggtagctccccacttgggccttccaagctacagagccctgcgccctctgggttgatctctgtcgccagccccgcatcttcgggagtttgctttggcctccagcaacagtgtagtctctcccctgccacctctaggcttgctgtggggctgggtacctggtccaggaaaagacccctagaggtgggacccgggcctcctccatttatcagccctcttgggcacctcctgcatccccttgacacacagcgctgcccagagcagaggcggcttctgccctggtggagcttccaggtcagcgcaggagagagtaaaagaaagattgcgaatggaatggaagcagcctccaccaggaagcaggtggagcagcaggcgggctgtgagggagggtctcgatggcatcagggcaggcttctctcagcttcatcaagctgagatgggaagatgagaagatcagaggaaggttccagactgaaccaaccacaaaggcattcccccagggcatggccaatgaggacaggcaggatgtggggagacgtgtcagggcgcgctggagagcatgtgactcaggaggcggcagacctgggtccaggtccagtccgcatccatatgacttggttcccgtcacctaacctctgagctacactccctccgtcactcaaaaatatgcacagagagtaggcgcagtggctcctgcctgtagtcccagctactcgggaggatcacttgagctcagaaggttgaggctgccgtgaactgtgattgcaccaccacacaccagcctgggtgacagagtgagaccctgtctctataaataaataaataaataaataaggctgggcacggtggctcgtgcctgtaatcccagcactttgggaggccgagacaggcggatcacatgaggtcgggagttcaagaccagcctggccaacatggagaaaccccgtctctattaaaaatacaaaattagctgggtgtggtggcgggcacctgtgatcccagctactcgggaggttgaggcaggagaatcgtttgaacccgggaggcagaggttgcggtgagccgagatcgcgttattgcactccagcctgggcaacaagagtgaaactccgtctctaaataaataagcacagggatgtcagggagggtctgcctcagaggcgtttgggacaatgacatgagctaatgctggtagcacccctcccatagcccctggcatgaacctctcccttcctccctgccccctcctcccctgcttcttccaccttgtgtggaggccctgatactctgtcactgcccattcctggcctggctgtagggtccccgcccctccttccccagccttatttaattccaacagactttatcaggcacctgctttggatcaggcctgatactgaccaaaatcaggtgtcccaagttggggagactggccgagatcctgctgggatggcgcctggtcagtgatgctatcccccgaccttcctttccctttctctgttgcactctccagcccctgaaatactagacatttgttcctttactgccctcacccccaccctcgctgtcctgcataggacagaagttcctcgggtccgtctgggtctgtctgccaggacacagctgcaggggacaagggctatgagggtggatgtaaagtactgggctgtggcaggaccctcctctctcccactgctgttcccactgcagccacgaccacctgctgtgcctggatggaggaggagtgaaaggcctcatcatcatccagctcctcatcgccatcgagaaggcctcgggtgtggccaccaaggacctgtttgactgggtggcgggcaccagcactggaggcatcctggccctggccattctgcacagtgagggcggcccctggggatggggccaggcggggctgagacctgtgtcctcaaggggccgagtttgtcttcagggctttgcaaaaagagagtggaggagtagaggagggctataagcactttgaggaggcaggggcggggctgcaggtgctgaggtcccaggctggaaggagaagggctgggcccatgggcttgggtttggggatcccccgccctctggccacagagggtagagctggctgtgtgaaattttggcataggaagcgtttcctatcgactgccttaacccctcctcccctcacccctgcaaagcaggcaccaggggccacacagcctgctgcacataaggaatcccattcccagggtgcacgcagcaggcagtctcaggaatgaggagccactgagcctcaggatgccagagccctcgcctgcacacttcattttactgggaaattttactgggaaattaagttcccaggtggggagggatgacgtgaagtcacatagctcatccatggggtcgctgggctggagcacagtcccctagactcccagcctggcacctcctaggccacagggcactgtgtagtctcctttcactgccgctttgcgaaggcgcctggcttgctggacagatagccgggtggtcagtgttgtgacggctcctctgtggagctgtctgagcttctaggtgctgacaggtggggaggggcactgccagatcagggtcctcagctccccccaaccccctggacattgtcctgggactcaacatgtctgactggtgcccctgcccctgtgctggtcagattccattttctccagagcgcccccacatctggatcctggtcatgcaaagtcttggaggtgcccggggaggactccccaccctagggtgggtatcagggcctgtgggccaggcctgtgttggatgctggggatgcagagctgagccaggcataccccagcctcaggagcagggggctcagccagtccaggaggtgctggggacagagtcccatgggcggaggaggagagtcatctgtcaagttgccgggacgttagtgtccacggcggtttattgactggtatttcatttccttttgatgattctcaccatagccctgcggggtgagcagatggggaaactgagaaccagagaggatcagccagtgaattgggcagtcaggactgggtctccagcagtgtgcccagctctctaccccagcctcagggtcccagcatcccctctctggtcttccacagggtccaagggcgggcacgaggtctgagcaggcagactgggcagagtcctagcttcttctccaaaagggccacgtccttcttcagggaccatttcttccccatccggggtcttgagactcccaggggccatggaggggatttgagaggtctcctggctgatcctccggtgtgggcagatggcctcctttcagctaccctctgcttgtacatccctggccctggggaactcactgcctcacgggggaagtggggcagcttctccttcctggaggtgcagccggccccttggccctgtctgttctgaaggctcaaaggacagggctattccttgttttctgtgacaaacaacgtgggtctagcttttataagcttttactcttgaggggctcttctttaaggaaaataatacaaaatcatgaatacaagatgaagtgcagagccgtggggcttcagtggtttttgagtctctccgttgcccaggctggagtgcagtggtgcatcttggctcactgcaacctccgctcccgggttcaagcgattctcctgcctctcagcctcccgagtagctgggactacaggcgcccgccaccacacctggcgaatttttgtatttttaatagacggggtttcaccatgttgggcaggctggtctcaaactcctgacctcaagtgatccacctgcctcagcctcccaaagtgctgggattacaggcgcgagccaccatgtccagccggaaggaggtttctctctgtctgtctgggaggttgcaaaggaagggcccagaatttgggtttgcttaggcctcggtaaacccgcttcctcctgccacctcctgcgttcaggcgctctgcaggctgttctacgggagccctgcgtgtggccgctgcatctccccgcctctgacccctttgttcctaggtaagtccatggcctacatgcgcggcatgtactttcgcatgaaggatgaggtgttccggggctccaggccctacgagtcggggcccctggaggagttcctgaagcgggagtttggggagcacaccaagatgacggacgtcaggaaacccaagtaagccctggcgcactggggccgtggccgcagctgtgcccactgtggctgttccctggggacagagggctccctgtcctgctgagggagggggaagagcgccccacgcttgaggggagcagagggaacccccttcccagggaggcagagggctggggtgtggctctcacttgggcatgcagacacctgctgagcgcaggaggggcgtggcctggtgggcctggctctgccctgcctggctctgccctgcccggctctgccctgccggctctgccctgcctggctctgccctgcccggccaggggtctggggcttgcctggagagagcctgggccacccttctctgagaccacctgggcagaggctgggtttttgctgcccaggcaaaaggaacccactggcctttcaaatgacacggctaaacattttctcacatttcagacagcactcgctcccaggatcggactactaggttataatcagagggcttcagtcttacctttaatttaaggcctacaagacttgaactaatttaagtcagactgaaggagaaagtcacatttccaggaaacatttgtttgggaagcccaaatcctaggactaagcaatgcatcccgttcggggctggatgaatggtgtgttccaagaggagtgttttgagcatttctgagtgattttttcatattttgaaagtgagtgtcccccagtcttaggggcccggcatcccctctgcggtcttccctagggtccaaggccagggaccttcaatcttttttcccactctgtggcttgtctttctgctctgtggtgtttctaggtttttgttttttgttttttgttttggttttggttttggtggcccatgttcttaatgaggtagataatatttataaatatttttcttcttgtagtttgtgattttttcctttctttctttcttttttttgaaacagggtcttgctgtggggcccatgctggagtatattgctgtgaacacggcttactgcagcctcgacctcctgggttcaagcagtcctcccatctcagccgcctgagtgcctgggactactagcatgtgccaacacatgtattttttgtagagatggggtttcaccatgttgtccaggctagtcttgaactcctgagctgaggcgatcctcccgccttggtttcccattacaggcatcagccaccatgcccagcctagtttgtgctttttatttctcgttcataaacccctttgctgcccccaagcagcacacgattctcctgtgtcgagctggaaagctctctagatctgccttttacattgaggtcttttatcaacctggaattgatttttgtatgagggtgaaatccaagatccaatttaatgttttccacgtgattggccaatttttcccagccccatctgtgaagtctgtccttccctccgcttcctcagcagtgggtcaagcatccctctgctcttggatctgctccaggctgtgttttgttccactggttggaaagctgtctctgtgcccggaccacagagcataaaaaactaccgctgtgtggtgagtcctggtgtctgggtggcagatcctccaccttggccttcttcaaaaacatcatggctattcttgggggcagtagagagaagtggatacaagcatagaccctgaagtttctacctcttctcaaaaataggaatatgccaggcatggtggctcaagcctgtaatcccagctctttgggaggctgaggcaggaggatcacttgaggccaggaggtcgagaccagcctgggcaacatagtgagaccctcatctctacaaaaaatttaaaactaacaattagctgggcatggtggcactatggctgtagtcccagctaattgagaggctgaggtgggaggatcacttgagccccggaggctgaggctacagtgggctgtgatcccatcactgcactccagcctgggcaatagagtgagaccctgtcttaagacaaaaaaaaaaaaacaaaaacaaacaaactcacaaactataaaaagaaaaaatatttataaattctactccattaagaacatgggtccatccaaataaataaataaaacaaaaacaccataaagggagtaaaaagacaagccacagagtgggagaaaagatttcgaatccatacatccatcaaaggactcattttcaaaatatgaaaagatcattcagaaatgctcaaaatagtaaccaccattttactttctcttcctatgagtttaactgctccaggtactgttaagtaaaatttttaggggataattgatttggaccaggattctgtaccaggcccaacagaagaaacgaatatggagtcattcatgccaagtgaacctagttagcttaggcgtatacccatgtaacaaatagctgagttctggttagctacaacagctaagctttaatcaatcatagatggccacctgattcaaacaaggcaaaccaattaagctccacacctcactttggttttcagcccatcaacactgcctgaccacgttgcaggccagagttctttgaacctattctggttttgtggcctgcctgactctcagttcatcaataaaagccaattaacatctttaaatttgttgcaattttatctttgaccgtaccttatgtaagtggaatcatacagtatttgtctttttgtgactggcttatttctttctttttttttttttttgagatggagtcttgctctatcacccaggctggagtgcagtggcgcgatctcggctcactgcaatttctgcttcccaggttcaagtgattctcctgcctcagcctccggagtagctgggattataggcgtgcaccaccatgcccggctaattttttgtattttagtagagacagggtttcaccatgttggccaggccagtctcaaactcctaacctcgtgatccacccacctcggcctcccaaagtgctgggattacaggggtgagccaccgtgcccggccatgactggcttatttcacttggcatccatgttgtagcgtgtgtcagaatttccttcctttttaaggctgaaaaactccattgtctgttggatacacgttttgcttctccattcatccattgatggatattttagttgtaaattgactgctgtcaatgtcggatgtgcaaatacctgtttgaggcctactctctcttactggtgccttctctagagagaattctgatgggttcagtttgatcatattttgtttaagatttttggccaggcgcagtggctcacgcttgtaatcccagcactttgggaggccgaggtgggcggatcatgaggtcaggagatcaagaccacagtgaaaccccatctctactaaaaatacaaaaaattagccgggcgtggtggcgggcgcctgtagtcccagctactcagagaggctgaggcaggagaatggcgtgaacccgggaggcagatcttgcagtgagccgagattgcgccactgtactacagcctgggcaacagagtgagactccgtctcaaaaaaaagatttttgtgtccacgctcgtgggcgaacttgacccgttttttcctattttgggttttgaggaaatatttcctctttttatttttcttggaagagttagtataatagtttattttgaatttatggtagaacttgatagtaaattcttctaggcctggagtttgcttggtgggaggatttttgatgatggaattaatttctatagtggttgtgagactgaccactcggggtttctaaatacctttttgagttagttttggttaagtgaggtttttctaggaatgtgtccatttcatctaaatctttaagcttattggcttagagttgttcaaaatattctgtttttttttttttttttttttttttgagacggagtttcactcttatcgcccaggctggagtgcaatgacgtgatctcggctcactgcaacctctgcctcctgggttcaagcaattctcttgcttcagcctcccaagtagctgggattacaggcatgcgcaaccacacctaatttttgtattattagtagagacggggtttccccatgttggccaggctggtctcgaactcctgacctcaggtgatccacctgcctcggcctcccaaagtgctgggattacagacatgagccaccatgcccagccgattctcctttttctaacgtctgcagtgtgtgttggtgcggcccccttttctttcctgattttgataacagataacagccatgttttatcagtcttgcaacaggtttttccattggattagcctttcaaaaaaaccaacttttgctgaattgtgcccccaaggttggaccaatctgacactcctccagcactgccggagagagcctgttttgcggggatggtgcggggagaagcccacctatcccgaacagaggttggagtgggcactctgctacccaaggccctggggtgtgaattgtggggaaagggaaaggtggatgggcgggtggctcagccgtcctcctgcctcatttctctccagggtgatgctgacagggacactgtctgaccggcagccggctgaactccacctcttccggaactacgatgctccagaaactgtccgggagcctcgtttcaaccagaacgttaacctcaggcctccagctcagccctcaggtttaaaccatgtttgatgcatccatgggaagcgactggcccgagaggctgtggggtggtgggtgggagtcgtgcacttgccatcaggcaccctcaccgtgccaccagcccacccgctgcactggtctttattggctgaggacagggattgcgggggagctgtcaggcccctggcaggttagaaaagtccctggaaagtcctcagctgtacctgccttccaccaggacgaactagccagagagtgtggcttcgtgggtcctgcttctgaagagttcccagcctcccctcttcccgcacccccagcccccaacacgcacaccctgagatctggagtgcatgggttttatgccagtcccttgtgccactgggccgccctccttccccgcccctagaccagctggtgtggcgggcggcccgaagcagcggggcagctcctacttacttccgacccaatgggcgcttcctggacggtgggctgctggccaacaaccccacgctggatgccatgaccgagatccatgagtacaatcaggacctgatccgcaaggtgagtgccgtaggccagagggcctggacccactgctccctggagccaatcctgtgtcagcaaaccatgctagggaccgacccccaggacagcaggtggcttttacacacgcactcattcatatgtgcacacagggcaaattgatctcactggaacctgttccatgggtgggatctgcctgaagcactgtgctaagggggatctgaggaccactgtgctctaagtgtgcatgagtggggagggcggcatgcataccatgaacgtgccactcgagccagcctggggacaggacacatgcttgcccttgagctcacctctgtggatagacagtcccacaggaatgcctgtccccacgggttgccggtgctgtggtggaggaccgtgaggcctctgctaaaaggcctgggggctcggaaagggctccatggaacaggggacccatcctgaggcccttggggacagagcagtgcagaatcagtgatctggaggaagagcagcagccctctctctgcagaggtacagcagaggctggcaggacccagcatgctaggggaggccctgtggcgtggcgggcggtgggtgaccggggtgggcgagcgcggtggctgagctcagaccctggagccagggcgcctctgggggtccccgttctgcctgcactcactgcagctacctaatggggccatcatagcgcctgcctggggaggctgcgaggccttggcatgctgttgtctgtgaaatgttcacagcactgccgggagcctgagctgcatccttgctgctgtggtttcccgaagccccagggcgtcctgggcagcgcagcagaggctctgggcagacagagaagcgccctctaggggccagatcgggcagggcgggcttcctgcaggcggcagagaccgtcagactgtcagacactagccagtctaactctcctattgcgtgcggatggggagcctgggacccagagtgggaggcatcacccaagatcatccagcaaatcggcagcagagcttgttcggaagcaaataagagaggcagcggccgggcgcagcggctcacgcctgtaatcccagcactttgggaggccgaggcaagtggatcatgaggtcaggagatcgagaccatcctggctaacacggtgaaaccctgtctctactaaaaatacaaaaaaattagccaggcgggcatagtggcaggagcctgtagtcccagctactcgggatgctgaggcaggagaatggtgtgaacccaggaggcggagcttgcagtgagccgagatcgcgccactgcactccagactgggagacagagcgagactccgtctcaaaaaaaaaaaaaaaaaggcagcacccagggctcaggttcaagccttagcccctacttccctaccacgtggcccctgcagctgcttcccggcctgagcttcgctgagagccctcatttgcaaactgggtgatcagtgccctctccacagactggctggagattaaatgaagtaatgatgcaaatacctggcaaatcaccaacaccaaggaacaccgtctgcctttcctcccctggccacgacttgacttgggccagcatcagatggggtgggcgggatccttcttgcagctggtgtatgtgtggtcctgttggtacacagatgctgtcctgagcagatggcatgtgatgcccgcaccagccgttctggggtcacgtgcaagaggctggctggaaatcatgccaggcatgctcttgccaccagagacctcttgccctgttctcatgtgccccagagcccagtcttgggcctccccttgacgctccccttcgtgccccctacctgtggaaggtctcttctgactgcccctgtcctgttcccaacagggtcaggccaacaaggtgaagaaactctccatcgttgtctccctggggacagggaggtccccacaagtgcctgtgacctgtgtggatgtcttccgtcccagcaacccctgggagctggccaagactgtttttggggccaaggaactgggcaagatggtggtggactgtgtgagtgtgggcccctcccccaggccacttccctcagggtctgtagcccaggtcgatggcttcccctcatcctgtggggcctttggtgttggaggagacagcagggctctgtccatcgcctttagccagctggagggagagagagtccacagttcagagtctcagtgcggggcagggaccctcagtgaccaccagcaggggggttttcaaacgctttttagctgcggatccctttctgcaaacatagcgcagtgtagaagcccagaatggacaaaggctccagagcgggctgggcgctcaccctgtaatcccagcactttgggaggccaaggcaggcggaccacttgagcacagcagtttgagaccagcctgagcaatataatgagactttgtctctaccaaaaaattaaaaactagctggacatggtggtgtgtgcctgtggtcccagctactcaggaggctgaggtgggaggattgcttaagcccaagaggcagaggctgcagtgagctgtgatcatgccactgcactccagcctgagcaacagaaggagaccttgtctcaaaaagaaagaaagaaagagagagagagagagagaggagggagggagggaaacttcagggagaggggacatggaggcctgtcgactcagccgctaccctttcccccactcatcatccctgaaagggcactgctgagacctctgcccctctgattgcacagctgggacagtccctgcagtcccaggaaggggttttgcccgagccgctctgctgctgtgtggctcagcctgactcgaaagagcctggggctccccaggctggggctccgagagtgcagggcagggccgggcggggtgcgggccgggcggggtgtgggcccggcactcaccaaggctgcttctcaccagtgcacggatccagacgggcgggctgtggaccgggcacgggcctggtgcgagatggtcggcatccagtacttcaggtgagggctcagccgccccagcccttggccccgtgccctggcgtggtcggactcaccgaccttcccctcccagccctagtgtggactttcccttccccaagggtctgctctgttccccaagcccaccctggtcctagctggcgtcccctgcccagcctgagcatcctagggtgaccccctcctccctggcccgaacagattgaacccccagctggggacggacatcatgctggatgaggtcagtgacacagtgctggtcaacgccctctgggagaccgaggtctacatctatgagcaccgcgaggagttccagaagctcatccagctgctgctctc

SEQ ID NO: 15718 - DNA, 36316 bp, Homo sapiens
aagtagaagtgctgagtaagccgaggtgagtgacctcgcgggtgggcggggcctgggggtccgttccccaacttcctcggcgctccggactcccaagtctccgccggaccctcctttggatattcctcgtgtctccgattctgaggcatgtcctccattaacccttatgtgactccctgagtgcccccaccttccatcttttcatccccctgcgtccccaattcccatcccgagaccgcccgtgtctcatctcgaacttgtggaccccagggaccccagcttcgaccctgagtttctcccctgaaccccagtctcctccgtgtgtctccctcagtatccctaacttcccgagtcaatccatctcttctctttccccgaccctcagtgcctctttaggccccattggccgtcctaattttccttcctgtgctcctctaagtgctcacttgattccccacttcacgtccgtctccacctttcgtggtgcctctactcatttctcactccctgcttctcctgcctttcctccctgctttttttccttgcctttcctctctcgcgtgcctccagacctgcccccgacatgctccctccttcccctcagcctggccaccccagagtctcccacccctaatcctgtgtccacctcctgctcccacagatgacttggaagctggtgacagggagcatgtgaccagggtgatcatgggactgggtcggggcaagcctgtgggtgtgggacagggagggcacagggcaaggggacctgtggccgtatttttaatgggctacccacatgaccccaacgaatacctccccctagcttctgggtctttccctcacctgcctcttacccgcccaacaggatgtcaggcaggttcggtttggcaacgttgaggctgcacccttgggctgaatgcattgtttttgaatgcattgtttttgttagagtttctgcctggagtttggaacctgttttctgtccaagtctcagtttcctcatctgtgacaggggaactgtacctcctgccctcgtaagtctgccatgaggttcaaaatttgaatgagaaaatgtagaaggtaaagctttataaccagtatggccctgtacaaatacatgattttactgttgggtcataggcagaattgaaaggagtggaaagggaaagggctagaatgagaagacaaggagagaaggatgagcaggaggtcccttgtctttcagtgtatcatttggcagtgtttgttcatcacctcttgtgagtcaggctcttctgtatatgttctcttcaccattcattcagtcatcgtttatctaacaaatatttacggactgtctgatgttctaggctacccttggtgtggccaatgatattctcacttcacatgagaaaaagagggcgcatgagttgcttgaggtcacaccgatgaggttgaagctggaatctgacaccagagcctgtgtgattgtcctgatgtgtaaggtttgctactgtttaggacacttcttgttccttccgtggattactttcttgttacatgagagactccccaaaagggagtttccctcttactcagcagaatgacatcactaagagatacagaaaggagaaatttaaatactctgtgtgtgtgtgtgtgtgtgtgtgtgtgtgtgtgtgtgtgtgtctgcagacatctattgggtgtgtgtgctgggggaagtaggtaggcaaggagtaaggggccgtagtgaagagtgtgttacaaacttcactttgtagagggtggctccctgggagaatatgttctgtgtctttcacagtggattttgatagggtcatgtcttaaatgcctcttctcgttttcggatggtgatctcatccagtcttatttctttaagtgccgtctctattctgtcagcccacaaatttatatccccagtccagtccagacctttccctggaatgacatactcaaatctagttgcttactcagcacctcaaacttaggcttttcaaacttgaagtatttatttattgatttatttattttttgagacagagtctcactctgtcacccaggctggaatgcaatggcacgatctcggctcactgcaacctccacctcctgattctcctgcctcagcctcccaagtagctgggattacaagcatgcgccatcatgcccaactaatttttgtatttttgtagaggcggggtttcaccgtgttggccaggctggtctcgaactcctgatctcaagtgatccacctgccttggcctcccaaagtggtgggattacaggtgtgagccaccgcgccaggcctcaaacttaagagtttagaattgagctcctgttagttctgccctccatccctgaccccactcttcaccaaaacatgtccctcccactctctttctcatcttaggacataggagtattgttcattcagttgctcaggtcaaagctgtgagattatctatgatgcctctctgtttcttaccccacacccagccagagtgatcttgttaaaatgttgtttctttgcagtggcctctcctctcatggcacatgcctggccccctgttgcctctctgatgtcactggcttccttgcttttcctggaactcgctaaacatgttccagccccatggcctttgcacacgctctctttgcctagctattcatatgactttcatctctctccatcaggtatttatttaagatcaatttcttggtgaagacttctctcctcacccaatctaaaatttcactctccacctcagcacttcctatccccattctctggtttttctcctcagtagttaattgtcatctaaaacctttgtaaatatttacctgtttatcttctttattattagtagctctgtctaaaatataagttccaggatgtcagggattttgtggggttttttttggttggttggttgttttggttttgagacagggtctcactctgttgcccaggctggagcgcagtggtgcgatctcagctcactgcagcctccgcctcctgggtttgagtgattctcccacctcagtctcccaggaagctggaattacaggtgcacgccaccacacccagctaatttttgtattttttggtagagatggggtttcactatgttggccaggccggtcttgaactcttgacctcaagtgatccacccgcctcggcctcccaaagttctgggattactggtgtgagccaccgcgcccggccttgttttgttttaagacagggtctcactgtcgctcaggctggattgcagtggcacaatcacagctcactgcagcctcgacctgctagacttaagcaatccccccacctcagccaccttagtagctgggacttacaggcatgagagataccatgcctgggtaattgttaagtttttgtagaggtgaggtctcactatattacccaggctggtctcaaagtcctgagcttaagtgatcctccttccttggcctcctaaagtgctgggattacaggagtgaactgccgtgcctgaccagtctgttttgtttacgattgtatcctcagcggttagaacaatgcctgccacaatccatctcagtaaatatttgtggagtgagtcataacatgggccacactgtaccgtgccaccagcccaaagatctcttaaagtcacccctgtctcatgtgcttgggagctccagtgacagtttcggggcagtttgcttccagctgtggtccagccaagcggagtgaatgaaagagatgctttttccttttgtgaaaggacgttttgctctggctcacgtgagcagcagtgcattttgagacgagggccttggcttttggaatctaagagcctgttgagcaagcctcgctcagccaccttctttcagctttctcctgaaggcagtttgaggattaagagcctgatgctctggattccacctaattgggttcagatcctggcaaactgtgtaacctgtgccccagtttcctgtgtaatgtggagagacctggaccttttcttacaggtgtttggagggttaaatgtggcaattcggccgggcgcagtggctcatgcctgtaaccccagcactttgggaggtggaggtgggcggatcaccggaggtcaggagttcaagaccagcctggttaacatggtgaaaccccgtttctactaaaaatacaaaaaattagccgagtgtggtggtgcgcgcctgtaatcccagctagtctggagactgaggcaggagaatcgcttgaacccgggaggcagaggttgcagtgagccaagatcacgccattgcactccagcttgggcaacaagagtgaaactctgtctcaaaaaaaaaaaaaaaaaaaaagtggcaatttacccgaaactgtggtgaagcgtctggcgccctgtgggtgctgggcagcagtgggtgctgatggggtgtgaggggatgggatcaagccctttcccactaacttaggaaagaggttggaatgagctggggtcagagggaacatttgcggggacattttgccgggaggctgccttggaggttcagaggctcagatgacccctgtgttcattcagtgttttctcacccacagattgagcacctgctgtgtggccagccctttgcctagtgctgttcaagagtcagaggacataggcaggcaatcccccaccacaacctgccaccccatttcctctcttggggccttgatttctccacatgccaaacagggagaatgattgcaccttccttgtttctttttttttttttttgagacagtctcactttgtcatccaagctttagtgcagtggcatgatctcggctcactgcagcctctgcctctcgggttcaaagattctcctgcttcagcctcccaagtagctgtgattataggcacccaccatcacgccaggctaattttttttgtagttttagtagagatggggtttttttctcacacgttggccaggctggtcttgaacttctgacctcaggtgatctgcccatctcaccctcccaaagtgctgggattacaggtgtgagccaccgcgcccggctgcgccttccctgtttctttgtgagcttggaggtggatcacaagtgtgaaaccctttgccaaccgtgaggcatggtggccttgtgagaggacggaggccggtgtgtggtggcatgctcccgtgctgtgtggcacagacggagctacaggaaggaagttggggcagcttggcactctgagtggaccctgagtttccagcctgctctgtcttgactgggtgggaggagggtgctcaggagggtgtcactgctgccaggttctgctgccaggaccatccaacagttgttccaatcatgggacatcctgtcgtcagcagctggggctcgtgaggcctgatttccacctcgggcagttctgtgtgtgctcctggaatcccccacgtggccaagcctgtgaggtctgcttcctggcctgctgcctgtgggttcctgtcacgcacctctcgggcagctgtccggctcctctgctctcggcttagtcaagaaggaagcagaaggcttggagtctttcctgcttggactaggagtgagctcagcctaagtgccctgactatatataaagctgaactttccagaccgaagcctggggatggatcagtccgatcacttagggccgctcctgaaggagtgcaggtgctagatacaggttctcccggtggaggagcgaaccccttgtgggccgttagctactggtgggatttgagcatggtatttccctatccgttgtggagaggagcatggcagctcagagtgggtgggaacagtgtgtggtccctgttatcaccttcaagggaataaagtgtgtctgggggcttcagaggtgctggccccatgggcttataggtggttcattcattcattctcattcattcattcaccaaacttattaaacacccactgtgagtcaggaacatcatgccaggtgcttagggaaacaaatcaaagcgggttgggtgagcagcccaagccaacagatgcacccccattctcacatggtgtgtgttcctgtgggctgggccctgggtggtgtggggtgctggggagaagaggaaggcacaccaggctgcagggcggaggtgcgggtatgaattttcagaggagatggcacctgagctgtatcttcatggataagaagagatttgttcatttgtcctttgtggagcacacattcaggttaagaaagtggggaggatgggctacgctgatggagcgtatgtgtggtatccccaagtgcactgagacacgagtttgacgtgttctgggaagatcgatggtgcggcgtggctggagtagaggtgagggatgagttggaggggtgagttgggccagctctcatggatgctggagtctgggctttccctgggaggtcatggggcgccactggccagggtcagcagggagacctgcagctggatttgcatcgtacagtgggcatggaggggtgtcaggctgggttgggaaccgtgcaggctggaagggcactctggtgctctgagcattcagagggggcagctgggccttgaaggatgagcaggggctccagcaggaactggagagcgcattccagggaggacgcaagtgcaggcccctttcactacagaaaagcagttttcacacagaccttccaaaggggaggagaggggactgcctgggcctggcagctgcggcaggtagcagcaatcagagggcagggaccgctcctcccgtgcctgagacctgcccagggtccttcagggaattcgtagctgaggaggaaccagatttttgggactgagttctccctcaccacccgctctgagccaccctcttggtcccttgtcctctactgcacttcttccggggcttggctcctcgtcatgagaggagcttccctgggcatggcgaggggcgtgactgacatagcagccctggacaagtggctccaggtgacctgtgttcacgttgatcacagcactaaccacggcccctcctctcagcaccttcccctctcgagccgtccagtcccagtgaaaatgctcaccgttcatgggtgggctgagcaagcccctgatctctgccttcctccgtgttctgatctgcttcatctgctgtgaaggcctctcgccatttcccccgctggcaaactcctgttcttcctggaaagttcagctaaaaagtcatcccctttaggggtccttccctcaggggaccgtgcacttggcgagacagggactggtcttgggtctctctgttgactgttttatgaacccaggtagtcacttccagggaactcatcagagatgctaccattggctccaatctccctctgttcccactcgaggttttttgtttcttcgtttgtttttctttctttctttttttttgagacagagtctcgctctcgcccaggctggagtgcagtgacatgatctcggctcactgcaagctccgcctcccgggttcacgccattctcctgcctcagcctcccgaatagctgggactacaggcacccgccaccacgcccagctaattttttttgtatttttagtagagacggggtttcaccatgttagccaggatggtctcaatctcctgatttcgtgatccgcccgccttaacctcccaaagtgctgggattacaggcgtgagccactgcgcccagcccgtttgtttttgttttttggtggacatcaactttaatttgccctttgttttgttttgtttttgaggcagggtcttgctctgtctcccaggctggagtgcagtagtgcaatcttggctcactgcagtctcgacctcaagaggatcaagcaatcctcttgccttagcctcccgagtagctgggaccacaggcgcacaccaccatgcccagctaattttattttatattttgtagagacagggttttgccatgttccccaggctggtctcaaattcctgggctcaagcaatccgtctgcctcagcctcccaaaatgctggaattacaggcacgagccactgtgcccggccttaatttgccctttgaacatgtacaattcagggcctctctgggcctcagtttcttgatctctgagatgggaagatgggataataatacttgttcctcccgtccttcagctcctccaggggaccctcacaccagcacactctctgtcagtcttccctcaatgaacccagcaggcaagcttggttttgacagaggatgggtgagcagagataaggaaaacggccagaaatatctggcttccctcagcaggggcaccaaaattggtacctggaaattgcctggcttggacaggcagaattgtcactgtcaacccccaccaccaaaggtcttgggtctttgtctttctgcttgtggtgtttgagagagctgcttgacacagccgaggtgcggtctgtgtcaggtgacctgggcatcctgggggtgcagggagaagcccaggtaaggaggaggaggggccggtcatcagtggggaaaagtgattgtctaccccacgggaaggtcaagggtaggacgctgtgagaagccagggggagagatgaagtgaggcatgatgcggggggccctcatccaccatccccctcttgcagctgtgctgggaagagcctaggctccagggtccaaggtggcagggacagaaggaagcacgtgtgagcactttctccctgctggcccgccttcctggttggcaatgccgtgagtgttccaggatgtggccccgtggctgtcatttcctttcttccacctagtgataacaatggccactgtttgtgtgcccacagtcggcctgtgtcccagacaccttccctccattgcgtcatctcgtcctcctgcctaccctgaaggctggatgccagccaagcctgtcgtttctgtggccatgctgtcgtgggtgtgtggggggcatcccctagccccaggctctggtggggggtacacaggctgggccattgacgaaggggtgtgtggaatctttctttgatttcactgcacccctggtgactttctccctcaatctgaggctcatgggtgctggatgctcttgactctctgcccttcctgggcgcacccctccgcgtccctgtgggcccgtcctcggggtagcctctctgcgctcttccaggccaggcctgagtcccacaggtccccatcttcccggctgcagcccccagaggctcagcctatactgctacttcctttgaaaactataatcgctttacatagcatctggaaaatagggaaaaggaaaaaacaaaagcccataaacccagcaccctcatctactcaatggcatgttttctgtcagtctatcttggtttgttttctatcaggctttgttttttctatgcataatatttactcagttaaatttttgttttgacaaactttctgtgagccaagcttgtggacggagatgaaaagacgagcagctgcctttgagaaactcagactctgggccagcccatctgggtgccagctttcactgctccacccactagctgggtgaccctgggcccgtgactttacccctctgttctttggtgttctcatatgtaaaatgaggataataatagtaaccagttcatagagtggttgtcagacagaatgattaatgtacgtaaagctttcaggatggtgccagcaagatgcacaggagtgtttggtaggaggatgacgaagcttaccgtctggcaggaggggcagttgtaacatgctgggctgtgatagtacagatgtgtttaaagtgagggagagcccagagcaaggagagagaacctggcatctggtgatggtgtatcaagaacattttaggccagacacggtgactcacacctgtaatcccagcactttgagaggctgaggcaggcagatcgcttgaacccgggcgttcgagaccagcctgagcaacgtggtaagaccctgtctttataatttttttttttttttttctgagacggagtcttcactctgtcacctaggctggagtgcggtggtgctatcttggctcactgcaacctccacctcccgggctcaagtgattctcctgcctcagtctcccaagtagctgggattataggtgcccaccaccatgcccagctaatttttttatatttttagtagagacggagtttcaccatgttggtcaggctggtctcaaattcctgacctcaagtgatctgccctcctcagcctcccagagtgctgggattacgggcatgagccaccatgcctggcctctataaaaattgtttggaagaaattacctaggcctggtgatacacacctgtagtcctagctactcaggaggctgaggtggaaggaggtagaggctgcagtgagccatgattgagccactgtactccagcctgggcaacagagccagaccctgtttcaaaacaacaacaacaaaaacatttttaaggaggaggctgagaaccacgagaaccaagcttggatttgaagaaggatcagggctttctcagacagaaaaggagaggaagaacattccagatagacatcattgagagatggcactgagccttgtaatgggacactgcgaacttttcttcagttgttatgatctttttttttttttttttgagacggagtttcgctcttgttgcccaggctggagtgcaatggcgccatctcagctcaccgcaacctccgcctcccaggttcaagcgattcttctgcctcagcctcccaagtagctgggattacaggcatgcgccaccatgcctggctaattttttgtatttttagtagagacggggtttctccatgttggtcaggctggtctcaaactcctgacctcaggtgatccgcccgagtcggcctcccaaagtgctgggattacaggcgtgaaccaccgtgccttgttggtataattattagtattgatcttttttccttttcatgtgcctcttagtgggccccttgcttttgtcttccttctgtccccagggttgatcctgtgctcagcacataggccagggaagaatgtggctgtgacccagtgtccactcagatgtcctctctcccccagggcacccatactctgtccttagtgtcttttgtctggtgacatcttggcacagaggcagagggcggcctccgtctgattggcgcctggctttggtgacagtaccttaggaaggcagtgtattttctgggaacctaggaaataacaaggtatctaattccatcatcaacactggggacaatttccatggcagaaactatgactctgaatatgcagcgtaaagttaccacccagacactgctgctcctgagtctcgaatggcatcttctgcaggggctcccccacctgcccctgcagaaggtgcagttcgttcatttccaaggagcttgcttttgtgtgctgtctctcggagctctttgggaaacctgtggtagcaggaaacaaaggatttagaccaatgccgatgatccccttgctccgatagagtgtgacatgatgctggtcaccttttggtatctaggaggggggacattgattttgtttgcggaagtgaaatgatccatgctggcctctttttttttttttttttttgagacagagtcaccctatcgcccaggctggagtgcagtggcgcgatctcagctcactgcaacctctgcctcccgggttcaagtgattctcctgcctcagcttcccgggcagctgggactacaggcgcctgccaccacatctggctaatttttgtatttttagtagaggcagggtttcgccatgttggccaggctggtctcgaatttctgacctcaaatgatccgcccgcctcagcctctcgaagtgctgggattacatgcctgagccactgtgtctggtccatactagcctctttgagtgctgaaaggttatctctgtaacttatttagtgagaaccctccatttgcccagggcattactgcctataatgtatgttcacatgtgctatctcctttggtcaataccacacactacaggtgaggaaactgagtctctgctgggacactgggtcaggaagcaggcagttaaggtcacctgtgcacagtggcagcacagggggacagccttctaggtagccagcctggcctgagggttctgtcacttttacctcccactcagtgttgtttctctttctttcccctccttttaagatccctccaggcccaggatctggggacaacgctggtggggagtgatctgggtgtctgtgcaggaaaccgctgcactgggtgagatgggcatgggagactgtgcctggctgaccagagacctcgttttcttccagacagagggggaagacggtggggcctccccacctgccccgcagaagatgcagttctttggccgcctggtcaataccttcagtggcgtcaccaacttgttctctaacccattccgggtgaaggaggtggctgtggccgactacacctcgagtgaccgagttcgggaggaagggcagctgattctgttccagaacactcccaaccgcacctgggactgcgtcctggtcaaccccaggaactcacagagtggattccggtgggtgatgctcagcgggaacatacttctctcctttcactcccccacgtctcggattggaggtcttattggccgagaagcagtttctttgagtctctgtctgaggggtctggagaggggtgggagagaggggagactgtactcttggaccagagggaagggcttccgagactccacacttctggcccatcagtgtcccagcacgaggctgaggatggaagcctgggttgtttctggcctggaggctcgacctatatggacaaagggaagaaggaaggacagggagactgagagtgtccacatcagataaggcccatggggagaacctttagccctggctctttatttttggttttggtttttgttttttgagacagtcttgctctgttgcccaggctggagtgcagtggcgcaatctcggctcactgcaacctctgcctcccaggttcaagcgattctcctgcctcagcctcctgagtagctgggattacaggcacccaccaccacgcccagctgatttttgtatttttagcagagacggggtttcatcatattggccaggctggtctcaaactcctgacctcaggtgatctgcccaccttggcctcccaaagtgctgggattgcaggcgtgagccactgcacctggcctagccctggctctttaagggcatggccgttctcataggggctgcccagggtttgcttaggaaggctggacagagctgttgcctcttggggcatgctgggactcccctgggcctgaagagaaggctcaaaagccaggacaggcctgagggaaccgggccaacggcagagctggttgggaaaaggggagaagcagccaaggttccaaatgcaggccccagcagtgcttggcagactggcatctagttgggctcagacagatatccctgtttccgctcacctatccatctggctgtcctgtcagccatccattcaacatgcaccaagcacctccagtgtctccagagtcctgggcttcgggccagtcctggctggcctgtgagatgacaaacatgtcctgtgtctttaaggaacgtacagtctggtgggggaggtccggtgcaaacaggcgtcatagcaccccttgaggagtgctgtgacagagggagagcctaggaaacagtgtggatcacaaggaggtgattgagagctactctgcgtctggaagagtgaggaggagcctgtgtggcagaacaaaatggataaggtcgttccagccgtgcagaagtgtggaggtgtgagcctgcaggcaggtggctctggttggatcccaggtgcatgcagggctttggtgagagtgaggctgaaggaagcagctggggactcattctgactaaagaggcatggcaggaggggtctctgaaagtgtcaggctgggggccaggggctgccaccaacagaagagcaaggcaggtatcagggccccatccaatcaggtgagaattcagagcctggctccacaaggaacctgaggcagaggcacccacagcaggtgcttgggctaaatgcagctcagtggccagtgcaggcaccagttttaatacagtggggccattccagattctgagtgcagatggggctgagcagaccgccttccagctggactcgatcaggactgaccctggacggggcaggcttgcacttgtagcttcagagctccactgcaggcacagctgaccagggcagcgggtccactccttggagagctggacagccccacttttgaggtacacggccctggggataccactaatctccacgtaccaataatcaccaagttctgtcagttgtaaaatcccttgacaggattccagatttgtctcagccagcttaagccccagtgtgggcagacctccatcccaggaggatttagtcctttgtcagcagcttcttagctacacgtaagctattctgtggtactttatagtttacaggattttttgttttcttttttttttttttttgagacagagtctcgctctgtcacccaggctggagtacagtgacgcgatctcggcttactgcaagctccgcctcccaggttcacgccattctcctgcctcagcctcccaagtagctgggactacaggcacccgccaccacgcctggctaatattttgtatttttagtagagatggggtttcaccatgttagccaggatggtctcaatctcctgacctcgtgatccgcctgcctcggcctcccaaagtgctgggattacaattttacaggatgtttttaagtatgttgggttagcacattctctgccaatccgtggaggtgggcaaggaaggcagtattccattttatgcatgagaaaatagccttgggatgataagtgattcatcccacttatacacaggaagcagtgaagaaacagaatcagtgtcttctggttcccaattcatttctctgtgctgctgtgttgtttccatgtatgtatgtatgtatttatttttttgagacgttaagtcttgctctgttgcccaggctggagtgcagtggcatgatcttggcttacagcaacctctgcctcctgggttcaagctattcttctgcctcagcctcccgagtagctgagactacaggtgcgtgccaccatacctggctaatttttgtgttttttagtagagacagggtttcactgtgttagccaggatggtcttgaactcctgacctcgtgatctgcctgccttggcctcccaaagtgctgggattacaggcatgagtcaccatgcccggctttgtttgtcttatttctaaattttattgatttatttattttcacagtcatagctctggagtcttttttatcttctcccctctaacctgctcccacccgaacctttccatttcagcagatagcatcattgcaacgggctgtgccagatccagccatcacatccacctttccagccaaagggagggtggaagggcaggatgcagaaggtcaatctccccctcctcagggacatttcatggaagttgcacgcattggccagaacccggtcacatggccacagctaactgcaaaggatgctgggaagtgttgcctgtgttgcagacagccacgtgccagtcgaaaatcagaggttctttctccctccgtcttgctgctggctcgcttctccagaccacagtcattgtgcacgtgtctcctgctgctccggctgtggcctgcactcctctcatcctcttccaagctgctgtcacagcgctgtttccagagggcaaatctgattggtcactcccctgctttactccccaagggcttcctgttttcttttatttttatttttattttcattttttgagatggagtctcgctctgtcgctcaggctggagtgcagtggcacaatgtcagctcactgcaagatctgcctcctgggttcatgccattctcctgcctcagcctcccaagtagctgggactacaggcgcccgccaccacgcccagttaattttttttgtatttttagtagagacggggtttcaccatctactcttagccaggatggtctcgatctcctgaccttgtgatctgcccgcctcagcctcccaaagtgctgggattacaggagtgagccaccgcgcccggccagcttcctgttttcttaacacatcaggtgcttaatgacttaaaagggcccagtgtgatcaagtttctgcctctgtgttctcagctcatgccgccttgtgctcctggcctttgcccaggctcttgctgtggcctggaatactcccctttctttgcctgccttccttcctcttgccctcccctgacctgcaggctggattaggagtttctgctgggcatcccatggcacccgtccctgcactggggatcctgctttcctggtaggccacagaccttgtgaggggagggactgtgtctgttgggttcatgacagtgtgcccagcccccagcaggtgcctggcgtagatcaggtttgtggaacaaatgaatgtgatatattaatttagctttagagtattcattgagggctgctgtgtgccaggccctctgtgccacctgggtggagggtggaggactgttgcattgagggcagttgaaggagtgagctgggaagtgggaggtggaggatggggactgggatgcagggtttgaggttatcaggggtcccagaagcagtaatgccaaggcctaggctgtgacctggagtgagggctgcgatggggtggggtggggtcgaggctgtggaggagggtcatcagggcactgctggagccctggggttctccagggccgggggtggtcattgcagtgttctcccagctcctctcaacaccctgcggtctgtggagagcaggcctggtgcactggacttgcctctggccagggctgagtttctgccttctaaacgatcttcctcctgtgttgccctagaggcctctggactgtcctgagtacttgacgcgtgttagagtgagcatgggctgctagccttccgctccaggtggaggagtttctgttgttcttttgctgctgttgctgcagtgagctgccaggctgagcttctggatggacctgggggatggaattaggagcttctgaattcttgggttgtataacctaaggccggagagtcccacagcactgctgctgggcggagagactggaccctgctgatacagacagcgacagcagcaggagcatctgcagtttcccagcaggtcctgcatgcctgggcttggcactagtctaagtagtaactcatgttatcctcacgacagtcccacgaggtggggtcattactgacctcctattacagatgaggaaacagaggcttgcagaatttgagatcacacagctggtcagcgtagcgattattcagaccctgtcacctggctccagaacccactcgtttacctttcttacatcagggctgctttgtagtgtggcgagctgagtggagctccacccgcctgggctgatcctggcccttcctgcctgacctatggtgcgggggccctggctctccccgtgtgagcccccaggggtcacttgtaatatgcctgtgtacactatgatagcatagatacttctgttcctggtacagattaatcatttacggctggcattgacttgtaacagatgacatttgatgaaatcaaccagcctctcactggtatctcagcagaaacagggctgtacctcccaggcatcctgggaaggatgatagaagtgtgtgatctgtgcttccctaccgggagctgacttttgaggctctctggactgggactttgccataaaactgcttatcagaaacctcagataagtggagtgccctgtgtcctggccacgtactctggggccagctcctccatccattcagtcctcccacatcccatcttcaccaagcagagtggaaagcggcaggtctctgcgagaaaaggaggctctgtacccagccttcagtgagataactttagagtggggccttgtattccctacacaggccttgtccccgacacggcctctttgcccttgcttctccttctgctaagaatgctccttcccaactccttggctggacacacggctcctgctctgtgggcctgtcctgttcccactcagagcctcagcaccccccatgtggccaagacacagcccctcttgccttaggttgccgtgggtctgtttccacatctgtttcccctccagactgcagggctcctgagggacagggcctggggccaagtctcctctgcgttcctgatgcctggtggtgtgccacgctctccgtgggtgcacggtaaatatctgccgagtggctagatgtatccatggttgctgaaggccaagtgtgttgaccagagggcgtgggaaaggctccactggggtggctggggtagagatagaccttaaggggtccagaagactccaccagctggagggaaaggccctacagagacaaggtactaggaaaggcccagaggacagaggaggggccctgtggggagcctgtgggcaggaagggcctgtgctgggctttgaaactggggactcaggtactgctctagcgtgagggtccttggcattttttttggtccaggaccccctgaggtccctggggaatgagaacaggctcacacagccactttcaagaggtttgcaggtcccctgaggcttagccacagacccctcccaccccagcagagacacagcagaggcttctgagtggaggccaggtggcttcagcctggggttctagaagggagggaagagacacacccccgtgtgtcctccagagcctcagccttctccctgaatctcccctttgcctcctcactgtaacccacacctggctctccttgaaggacccgcttgccccgcagcctcctgagagttttctctcccagtccctctcccactgggcctggaggtggggtagggtcctccttgcccccagccttgaatcttctgtcaccctacaataccacttgctgtcaccccggtgataggtatctacgagcctggggtgctcccccacatcctcaaagatgtgagcccctgactcagcgttgcctctggttcctgaccctccacattcacatgaccacgcgctggcctttatcatcgccagtgacagcagctctcccgtaaatacaagtttcaagcaccccactttccagtctctgccttctgtctttccagttcattccctctagtcctccacccacacagtgcttttccccattgacagggaattgctcctggccgcttttcccagccccatcccgttcatgtgccttgctttgtacccagcatggactccatggcctgtcattgtcactccttcacctatacttcctgcctccttgcttctctctctcttcgtcatcctggcatcaccaccccagaactgcttggtttcagttctccaccatggctaggggaacatacctttttgctgactgctctcactttctttttttttttttttcttttttttttttttgacacagagtctcgctctgttgcccaggctggagtgcagtggcacactctcagctcactgcaacctccacctccggggttcaagcagttctctctgcctcagcctcctgagtagctggtattataggcacccgccaccacacccggctaatttttgtattttttttagtacagacagggttttgccatggtggccaggctggtcttgaactcctgacctcaggtgatatgcctgccttggcctcccaaagtgctgggattacaggcatgaaccaccctgcccggccctattgctctcactttgaaatcacgacatgagccacagtgagcctatgatgtggtttgacgtctttctgcatttctctgttcacccctctcccagaaggcatgcctccttccctcccctcagcctgcagccccttcccctccacgcttactctcagctgatagccctgctgctgtctcgctgagaaaatagaaatagccagaggagaattccctctaccccatgcacacacctctgtccccgcctactccacattccctgttgtcagcaccgatgtgtttagctgagggtggtccccccattcaaggccatcatctcctgtcatctacttcttgacaccatttgaacaattatctcccctctttcctacataacactttccccttttctactatatattttttgctatggattgaaagtatccccccgaaatcatatgttgaagccccaatccctcgtgtgatggtattaggaggtagagcactatgggggtgattaggtcatgaggatggagccctcatgaatgggattagtgcccttagacgaagaggcaagaaagagatgatctgtctctgccatgtgagggcacaacgagaagatagccatctgcaaaccaggaagtgaaccctcatcaggaactctatcagccagcaccttgatcatagacttcctagcctctagaactgtgagaaataaaggttgtttaagcctcccagtctgtagttttctgttataatgtcctgacctaagttattttccatcgctatacaatgggttatttttttctttaaaaaaaaattatttcttgactctactttttcctccagagactgcttatattccactgtcttcattcttctcctcctgttttctctctttaaacttttcaaaaatagcaaaatataacacatatagagaaaatgatatacagctcagtgatttatcacaaacacctgtgtaaccaccactcgaatctagagataggacattacagcaccccagaagccctccttttgtcccctcttcccaaagaagggtaaccaataacttgccttttatgataaaggctttttttttttgagatggagtctcactgtgttgcccaggttggagtgcggtggcgcaatctctgcttactgcaagctctgcctcctgggttcacgccattctcctgcctcagcctcctgagtagctgggactacaggtgcccgccaccacgcccggctaattttttgtattttagtagagacgaggtttcaccgtgttagccaggatggtcttgatctcctgacctcgtgatccacctgcctcagcctcccaaagtgctgggattacaggcgtgagccaccgcccccggccaagataaaggcttttctatctggcttctttgttagcattttgttggcgagattgatacgttttgtgtgcagctgtctgtcattttcattgcaatagaattccattgtctactatatcacagttactcattctactactgatgaaaatttgggttatttctagtttttttggtgcatacatgcatacatttctggtagacatacctagaagtgaactggctgcattatgggccataacttgtcttcaacgttagtaaataataccgcccgtctgttttccaagcagcagtaaatggcactttctgttacttcatatcttctgttacttggtactgtcaggttttaaaattttagtcattctgtcgggtgtctagtagtatgttattgtggttttattttgcatttgcctgattgcaaatgaagttgagcactttttgatacagtgattaaccatttggatatcctcttcagtgaagtatcagctcaattctcttgactatttaaaaaataaagttgtttatctttttcttacagagttttaggaggagttttttggtacatgtgcagtccaaatacacaccttttgtcagtgatacgtgttcagctgcacacacggtgttttgcctttttattcttttaatggtatctattgataaacatgagttcttagttttaatgaagtcaaatttgttcatcttctttacggtgtactttttgtgtcttgtttaaggaagtccttctctatcttaaagctttgagaagcattccttctttctcctattttctaaaaattgttgaagatctccttccttccttccttccttccttccttccttcctttcatctatctctctctcacccaggccaaacttcagtggcatgatcatggctcactgcagcctcaacttcccaggctcaagtgatcctcctgcctcagcctcctgagtagccaggactacaggcacgcaccaccatacctggctaattttaaaaattttttgtagagacacggtctcatcaagttacccaggctggtcttgaactcctgggctcaaacaatcctcccacctcagcctcccaaagtgctgggattacaggcatgagtcacatgtctagcctgtattctttctttcttaaatgtttggaagaattcatgggtaaaaccatgtgaccctggagtttatttgtgggaagcttttaaaacatggattcgatttctttaacaaatataggactatgagattttcatctcatgtcggtttgggtatgttgtgttttcaaggaatttttctattttatcgaagttgtcaaatttgtctgcaggtccccttatttcctttttaatgtatggaggatctgaagggatggtactttgtgttgtctctatttcttgtttggttttgctagtgatttgccaatttaaaaaatctttccaaagaaccaacttttggctttgtttattttttgaaaacctgagtagctgggattacaggcgcccaccaccacacccggctaatttttttatttttagtagaggtggggtttcaccatattggccaggctggtctcgaactcctgacctcagatgatccacccgcctcggcctcccaaagtgctgggattacaagtgtgagccagtgtgcctggcaagccgctttttaaatggcaccaatcccattcatgagggcagagccctgatgatcgaattacctcctaatggccccatttcttaatactatcacactgagaattaagttttaacataagaattttaggaagacacaaacattcagaccatggaacatatataaaacagttgtcctaccaactaacagaatacacattcttttcaagaacacctatataaaaattatagacactgacctatgctggccataaagcaaatatgaacaaatttcagatacctgaagagatttagactatgttctccaactacagtgcaattaagctagaaatcaatagcaaaaatgtaactataaatgagcccgtatgtttgaattttaagcaagatatatgtaaattatctatggttcaaaaaagaagtcacagtgaaatttagaaaatatcttgacgtggcgggttgcagtggctcacgcctgtaatcccagcactgtgggaggccaaggcgggtggatcacctgaggtaaggagtttgagaccagcctggccaacatggtgaaaccctgtctctactaaaaatacaaaacattagccaggcgtggtggtgggcacctgtggtcacagctacttgggaggctgaagcgggagaatcacttgaacccgggaggcagaggttgcagtgagccgagattgcaccactgcactccagcctgggcaacatgagtgaaacttcatctcaaaaaaaaaaaaaaaagaaaagaaaaagaaaatatcttgacccaatgatgatgcaaatactacgtatcaaacttgtaggatgaacttccacttctggccatgacagaggagcctgtatcagactagccttcctatttatatatttatttttgagatggggtgtcgctctgttgcccaggctggagtgcggtggtgcaatctcagctcactgcaacctccacctcctgagttcaagtaattctcctgtcccagccttccaagtagctggaattacaggcgcccaccaccacacccagctagttttttatatttttagtagagacggggtttcaccatgttggccaggctggtctcgacacctgacctcaggtgatccacctgcccctgcctcccaaagtgccgggattacaggtgtgagccactgcgcctggccgtgagtgacctttttaatgtgttgttgaatttgatttgctggtattttgttgagaagttttgcatcaatatccatcagggatactggcctgtagttttctttttttatatgtctttgtctggttttggtgtcagggcaatactggcctcatagaatgagtttggaagttttctctcctctgtttttcataatagtttgagtagggttggtattagtttttgtttaaatgtttggtaaaattaagcagtgaagccactgggtcccaggcttttctttgctgggagacttttcattacagctttgatctcattacttgttattggtctatttaggttttggatttcttcacggttccatcttggtaggttgtgtatgcctaggaatttatccatttcttctagggttttcaatttattggcatataattgttcacagtaacctctaataatcctttgagtttctgtgatattggttgtaatatctcttttgtcatttctgatttttttgtttgggttttctctctttttttgttagtctagttaaagatttattgattttgtttatcttttcaaaaaactttattttgttgatcttttgtattgttttgtttcaatttcatttatttctgctatgatctttattatttcttttcttctactaattttgggtttggtttgctcttttctagttctttaagagacatcattagattattttgaagtttttctacttacttgatgtaggtgcttataggtacaactttcctcttagtacttctttccctgtatctcacaggttttgatatgttgtgtttccattatcatttgtttcaggatgtttttaaatttccttcttaatttcttcattgaccattcaagagcatattatttcatttccatgtgttcgtatggtgtgcaaaataccttgtttttgatttgtagttttatttcattgtgatcacagaagatacttgatatgatttcaaatttaaaaagtaatttggctgggagaagtggctcatgcttgtaatcccagcgctttgggaggccgaggcaggcagatcacgaggtcaggagatcgagaccatcctggctaacacagtgaaaccccgtctctactaaaaatacaaaaaattagccaggcatggtggcaggtgcctgtagtcccagctactcaggaggctgaggcaggagaatggtgtgaacccgggaggcagagctggtagtgagccgagatcgcgccgctgcactccagcctgggtgacagagcaagactctgtctcaaaaaaaaaataataacaataataataatttaagacttgttttgtggcctaccatatggtctatccttgagaatgatccatatgctgaggagaagaatgtgtattctgcagccgttggatgaaatgttctgtaaatatctaataggttcatctgatctatactgcagactaaggctggtgtttctttgttgattttctgtctggatgaactgtctaatgctgaaagtggagtattgaagtctccagctattattgtattgaggtctatctctctctttagctctaagaatacttcctttatatatctgggtgttccagtgttgagtgcatatgtatttaaaattgttacattatcttgctgaattgacccttttatataatgaccttctttgtctctttttatagtttttgtcttgaagtctgttttgcctcatagaatagcatagctattcctgctcttatttggtttccatttgcatggaatatctttctccatccctttagtttcagtctatgtgtgtctttacaggtaaagtgtgtttcatgtaggcaacagatcactgggtcttgtttttctatccgttctgccactctgtgtcttttgattggagagtttagtccatttatgttcaatgttattactgacaagtaaggacttactcctgccactttattaattattttcttgttgctttgtgatcttctttctttccttcctgttctccttttagtgaaggtgattttctctggtggtatgttttaatttcttgctttttatttttttgtgtgtatctgctgtatgttttttgatttgaggttaacatgaggcttgcaaataatatcttataacctaatattttaaactgatgacaccttaacactgattgcataaacagacaaacaagcaaagagaaaactaataaaaactctacattttaactttgtccccccactttttaacttattgtactgtttatgtctgaaaagttgtagttattatttttgattggttcctcttttagtctttctactcaagatatgagtggtctacatatgacagtgttataatattctatatgtttctgtgtacttgctattaccattaagttctgtactttcaagtgatttcttattgctcattaatgtccttttctttcagattgaaaaactccctttagcatttagcagtatgtgaactgcatttttcaagtccagaatttctgcttgattcttttttttttttttgagatggagtcttgctctgtcgcccaggctggagtgcagtggcgcgatttccgctcactgcaagctctgcctcccgggttcacaccattcttctgcctcagcctcccgagtagctgggattacaggcgcccgccaccacgcctggctaattttttgtatttttagtagagatgggatttcaccatgttagccaggatagtctcgatctcctgaccttgtgatccgcctgccttggccttccgaagtgctgggattacaggcgtgagccactgtgcccagcctgcttgattcttttaaattatttcaatctctttgctaagtttatctgttaggattctgaattccttctctgtgttagcttgaatttcactgagttccctcaaaacagctattttgaattctctgtctgaaaggtcacatatctctgtctctccagaattggccactggtaccttaattagttcatttggtgaggtcatgttttcctgtatggtcttgatgcttgtgatgttcgtcagtgtctgggcattgaagttaggtatttattgtagtctttgcagtctgggcttgtttgtatctgttcttcttaggaagactttccaggtaataaaagggacttgggtattgtgatctaagtttttggtcactgcagccatatctgcattagggggcaccccaagcctactaatactatggctcttgcagactcgtaaaggtaccacttgggtggtcttggataagatctggaagaattctctggattaccaggcagaggctcttgttctcttcccttactttctcccctaaaagtggagtctctctctctgtgctgggccgcctggagctaggagaggggtgacacaggcacctctgtggccactatcactaggactatgctggctcagacctgaagccagcacagcactgggtctcacccaaggcctacagtctccactgcctggctactgcctacgtttgcttaaggcactagggctctacagtcagcaggtggtgaagccagtgagattatgtccttcccttcaaggcagcaagttccccctacccccatcctgggaaggtccttagatgccatctgggaggcagggcctgcagtcagaaaccttagtaatctccccagtgctctattctattacagcctggctgatacccaagccataaggcaaagtccttcctgctcttccctcccctttccacaagcagagaagtctctctccatggccaccactgccccagccctgtggcagtgctgccaggccactgccaacgttcattcagggcctaagggctcttgaagcaactgaacactgccaggcctgggactctccctttagggtagtgggctcccctctgacccagggcaggtccagaactgccaccccacagccaacacttagaatctgggaccccaagagccctcttggtgctctgccacactgtagctgagctggtacctaggctgatttttgctttttatgaaggtacttttttgtgtgtatagttcaatttggttttcctccagggaggacaattggtggaggtttctatttgggcatcttttttttttttttttgagacggagttttgctctttcacccaggctggagtgcagtggcgcgatctcggctcactgcaacctctgcctcctgggttcaagcgattctccagcctcagcctccccagtagctgggattacaggtgcctgccaccatgcttggctactttttttttcaattaaaaagtaaactttaatgtcgaaaatgcaaacttggggaaggcagaaagatcacacacaaggctgtcgcttcacacttggaaggttgcacggcggccaggagaggcactcctcacttcccagacagggcgggggccgggcagaggcgctcctcacttgccagacggggcggcggccacatgcctggctaatttttgtatttttagtagggacggggattctccgtgttggccaggctggtctcaaactcctgacttcaggtgatccacgcacctcggcctcccaaagtgctgggattacaggcatgagccaccgcgcccagccctatttggccatcttgctttgcctccaccttcatttgataacagaacacccccatgtaaccaccaccacaatcaagatataagacatttctgttattctccaaatttccttcaccctcctttatagtccatggcacccaccccatccctgggcaacacctatgtgcttcctttttttttttccccgcaggaggacgtcttcctatacctatgtgcattccatcactgctgcttttaatcatatagcgtgtagtcttatgagtctgactttttcacttagcataatgcttttgcaatttgtgattgagcgttttcatatgattctgttttttctgtctcttagcttggaagttatacactttttagtagtaactgttgggagatcgttctccaagagtctctctcatatttccatacatcctgctagcagagacattgactacctgtttttgtctgtttagtgttgctataaaggaatacctaagtctgagtattatacatagaaaagaggttttatttgtctcatggctcctcaggccatacaagaaacatggtgccagcatcttaccagtgtcacatggcaagaaaggaagtgaggaagagaaaataagttgttaactggttgttaaaaagtgccaggcacgggccaggcacagtggctcgtgcctgtaatcccagcactttgggtggccaaggcgagtggatcacctgaggtcgggagttttgagaccagcctgaccaacatggagaaaccctgtctctactaaaaaaaatacaaaaaaattagctgggcatggtggtgcatgcctgtaatcctagctactcgggaggctgaggcaggagaatttcttgaatccaggaggtggaggttgcagtgagccaagatcacctgggcgacaagagcgaaactctgtctcaaagaaaaaaaaagtgccaggctctttttaacaaccagttcttacaggaactaatagagtgaaaactcactcacccccaccccacagggagggcattcattcatgagggatccacccctatgacccaaacacctcccattagccccccacctccaacattggaatcaaaatttaacatgaggtttggggggcagaaatccaaattatagcactacctttgttccaggctaccttcaaaggatgtttatacagcaaacagccttggaaaatagagttagggtctccttgtagagcacagggtaagtttgcttacttttcagcataatcaagattgtgtcttcttctggagcaaaactttgacaacaacaagcggggcaaagtctgaaaccttttgcacatcttgacagaaccttagagattacgagatttatctctgccttactcaaggtccattagtatcttccagaacaataagttggtcttagaatcctttagctatgtattcccttccaggcttcgatgctgtgtgctgttgttttatttagtttttattttaaacccaacaagacgctataccatcaatacttatttagatccccccacatatttaacttgccatggtgcttcattctttcatgcctctttaagcatccatctaggatcgtgttcattccacatgaagagaaagcttttggcccagcacgatggctcacacctgtaatcccagcactttgggaagcctaggcgggaggatcgcttgagcccaggatttccagaccagcctgggctacgtggcaaaaccctgtctctactgaaaatacaaaaaattagccaggtgtggtggttcacgtccctgctactcgggaggctgaggtgggaggattacttaaacctgggaggttgaggctgcagtgagcgttgattgcaccactgcactccagcgtgggtgacaggagtgagaccatgtctccaaaaaaaaaaaagaaggaaagaaaaagcttttgtatttcctttcgtgtaggtctgctaatgacaaagtctctgggttttttgtttgactagagaaatgttttaattttaaccttattcttgaaggttttgtttttgttttcattttgttttgtgtgctaagtacagaattctcattggcatttatttatttagagacagagtcttgctctgtggcccaggctagagtacagtggcacgatctccgcctcccaggttcaagcgattctcctccctcaacctcctgagtagctggggctacaggcatgcaccactacacctgactaatttttgtatttttagtagagacggggtttcaccgtgttgcccaggctgatctcaaactcctgagctcaagtgatttgcctgccttggcctcccaaagtgctgggattataggcatgagccgccgtgcctggccagcatttattttcttttcagctctttaaggaagtcattccattatctctgggttccattgttgagaagccagctgtcattctaatggttgccctttgaagataacttttttccctctgctattttaaatatttcctccttgtattttattttcaacaggtgtaatgtggcacatatatcagcaattgttatgttacatacaatacatattgtgcaacatatgtatcattatcagttattgctgtgtaacaaactactccagaacacagtggcttataaaaggaatcatttatttagtccttaaatctgcaatttgagcagagctcagtgggaaagcctcagctttactttatatggcaccatataaggtaactcgcaactggcaagttggtgctggctgttggctggtagttcattcagggctcagggcccaggaccaagagtcgtcaccatggcttgcttcagcctccttgaggcatgatggctgggtcccaagagaagagaaatagaaacttccagtctcttaaggcattggtctggaagctgggacggcatcacttttgccatattctgttggtaacgcagttacatcgccagattaaagggtaaagagatacaaattcccactgctcagtgcaaggaatatcagtgattttagggggccctgttttaaaacccctacaaggtgctaagcgtggatttctggggctttcttgttttttgtttttttctatgtgtttttttttttttttttggtggtggggtcagggagggcttatagggtatgttaaatcagcagaataattttatttatttatttggagatggagtttcactcttttgcctaagctggagtgaagtagcgtgatcagagatggagtttcactcttttgcctaagctggagtgaagtagcgtgatctcggctcactgcaacctccgccccgctggttcaagcaattcccctgccttagcctcccaagtagctgggattataggcacccaccgccacgcccggctaatttttatatttttagtagacatggggtttcgccatggctagtctggaattcctgacctcaggtgatccacccaccttggcctcccaaagtggtgggattacaggtatgagccactgtgcctgacctataatgttttttaaaaatcagttttggaaagtttgcagacattaacttttcaaatgtagcttccatttgattctttttctactctgcctctgatcctccacttatgtatgtatgctagatcttttattagatagtctgtgtctcttatgtactctactatattttgtattcttctgtctctccatgctttattctgtttactctttcctgattatattttttaattttgtaatttccatttgatgcttttttgatcattcaaaactcttcaccaaaattctaaatttccttttttaacctctcgaatgttatcacagttactttaaagtctattttggataacttaaatatttacagtcccctcacagatatgtttcttttgtatattgtttctgttggttttctttcatgtcttatctccacatatgcctggtgagttttgattatgtgttggtcattgtatttgcaagtatgctcgtagaaataatctggaatggccgggcgcagtggctcatgcctgtaatcccagcactttgggaggctgaggcaggtggatcacgagatcaggagatcaagaccatcctggctaacatggtgaaaccccatctctactaaaaatacaaaaaattagctgagcatggtggcacgttcctgtaatccctgctactcgggaggctgaggcaggagaatcacttgaaccaggaggcagaggttgcagtgagccgagatcacgccactgcactccagcctgggtgacagagcgagactccgtctcaaaaaaaaaaaaaaaaaaaaaaaaagaaataatctagagcctagtttgatgtttccttacaaagaatgaatttatttttgcttctcccattgcaactaggataacctcagtctagtttctggaactgaaatcacttgaggctgaactgtggtctctgtgagagcgtgtctgtgtatggctcacccttattcctaggctacgtagttctttaggaccctaacccaaagtaagagatgttcatcagggctctcctcttggcagacgcctgggctccagtccctgtgtcctgagccccatgaggctgttactggtgctgctcgtctgcccatcctctccagtaacagccacctgaacactgcaattcctgggtttccatcattccttccagcctggtgagtcatcagtgtcttttgaggtatccagtgcctgccagcagatgttttttaataatttgtccagcatttctggctgtcctcagtaggtggtctgtttcacattccctagtctgctgttaatggaaagtggaagttctgagagagaatcatcgttcccgtcagcattcaaatgcctgattacactttccccattcgctatcctttcctttatttgctcctcaccacagcaaaactcctcaaaaatatctatctttgcaatcttcagattctcacattgtgtccttaaacccactttaatcaggccttggttccctccattccactaaaagtaatgttgtcaaggtcgtgcatgcctccgtgatgctaattccagtgatgagttttcagttgtcattctctgacatatcggcaacacttgatgtggagtaccctgatgttgagaggctggtgagatgaaggaaaaacccagccaagggcaatgaggaatggcttccttccgcctcctccttccctatctttgttgtggtttttgttgtttctgtaacactgattacgttatagtttatttaatgtacttccttattctatgtttttactttagtcattttgttgatctcctccataataacataggctcgggccaagcacagtggctcacgcctgtaatcccagcactttgggagaccaagatgggtggatcacttgaggtgaggagttcgagaccagcctggccaacatggcgaaaccctgtgcctactaaaaatacaaaaattagctgggcgtggtagcaagcgcctgtaatcccagctactagggaggctgaagcaggagaattgcaggagaatcacttgaacccagggggcagaggttgcagtgagctgagatcgcgccactgcactccagcctgggtaacagagtgagactctgtctcaaaaaaaaaaaaaaaaaaaaggcttcaggagggcagagcattttatgcaattgttcattaattgacccctccatttggcacagatcacatgcccagtagttaactgttaatcaacgcactctctgtggaacaacaggctggtcccgttgagccaacactctctgggcactgccttcactagactctggctggctgctgcgcttgtagaggtatgcaagacaaaaccttttggtatgttaaaagccctggtcagaactttaagtaaccatcactgacatataatggttatggttttgaaagtgcttttatagtggtttttcatctgtcctcacagcacctctgggaggtaggtaggacaggtacagttagtctcatgtttcaaatggggctcagagagggaaaaggatttcccaagatcacacagcaccttagtagcaaaacttggactcaacctcaacacttaaaaatgaacaaagctggccgggcgcagtggctcatgcctgtaatcctagcactttgggaggcccaggcaggcaggtcacctgaggccaggagtttaagatcagcctggccaacatgacaaaactctgtctcttctaaaaatacaaaaaattagccgggcatggtggcgggtgcctgtaatcccagctactcaggaggctgaggcaggagaatcacttgaacctgggagatggaggctgcagtgagccgagatcgtgccattgtactccagcctgggcaacaagaatgaaactccatctcaaaaaaaaaaaaaagaaaagaaaagaaaaagaaaagtttccctttttttaaatatctcattttaatgactgcataatagtttattacatagttataccataatttatataatattttgttgctgtacatttaggttaaacaatacttacttagttcctactatgaagaggggccaagtactcgaggctggagctctcacatgtggcaatgaaattagaaagtggatatggcagggctgtggtaaaataaaatataaaaataataaatgatattaccaaagaaaaggaaagtttttcaaaataaaggaaaatctagacaagcatagtggctcacacctgtaatcccagtacttttggaggctgaggcaggaggaacacttgaggccaggagttcaagaccagcctgggcaacatagcaagaccccctgtcaacaaaaataaaaaaaaattaggccaggcacagtggctcacggtggctagtgcctgaaatcctagcactttgagaggctgaggggggtggattgcctgagctcaggagttcgagaccagcctgggcaacatggccaaaccccatctctactaaaaacacaaaaaattagccaggtgtggcagcacacgcctttaatcccagctactctggagactgaggtaggagaattgcttgaacccgggaggtgaaggtcgcagtgaggtgagattacaacactgcactccagcctgggtgacaaaatgagactctatctcaaaaaaaaaaaaaattagctgggcatggtggtgcatgcctgtaatcccagctactcaggaactaaggtaggaggatcccttcagcccaggaattcgaagatgcagtgagtcatgatcacaccaccgcaccccagcctgggttacagagcaagaccttgtctctaaaaaacaaagaaagtctaacctaaacgccattatgtcatttacatgtgtataggggtgtgtgtgtgtgtgtgtgtgtgtgtgtgtgtgtgtgtgtgtgtgtgtgtttgcttgggaggggagtcgggctggagctggccaggccgcagcctggggaccttctgattccagcagggatgtgggccgagggtcccgccttactcatttcgggtcttgctcctctgtcctggctctacagactcttccagctggagttggaggctgacgccctagtgaatttccatcagtattcttcccagctgctacccttctatgagagctcccctcaggtcctgcacactgaggtcctgcagcacctgaccgacctcatccgtaaccaccccagctggtcagtggccc

SEQ ID NO: 15719 - DNA, 34781 bp, Homo sapiens
atgagttgcttgaggtcacaccgatgaggttgaagctggaatctgacaccagagcctgtgtgattgtcctgatgtgtaaggtttgctactgtttaggacacttcttgttccttccgtggattactttcttgttacatgagagactccccaaaagggagtttccctcttactcagcagaatgacatcactaagagatacagaaaggagaaatttaaatactctgtgtgtgtgtgtgtgtgtgtgtgtgtgtgtgtgtgtgtgtgtctgcagacatctattgggtgtgtgtgctgggggaagtaggtaggcaaggagtaaggggccgtagtgaagagtgtgttacaaacttcactttgtagagggtggctccctgggagaatatgttctgtgtctttcacagtggattttgatagggtcatgtcttaaatgcctcttctcgttttcggatggtgatctcatccagtcttatttctttaagtgccgtctctattctgtcagcccacaaatttatatccccagtccagtccagacctttccctggaatgacatactcaaatctagttgcttactcagcacctcaaacttaggcttttcaaacttgaagtatttatttattgatttatttattttttgagacagagtctcactctgtcacccaggctggaatgcaatggcacgatctcggctcactgcaacctccacctcctgattctcctgcctcagcctcccaagtagctgggattacaagcatgcgccatcatgcccaactaatttttgtatttttgtagaggcggggtttcaccgtgttggccaggctggtctcgaactcctgatctcaagtgatccacctgccttggcctcccaaagtggtgggattacaggtgtgagccaccgcgccaggcctcaaacttaagagtttagaattgagctcctgttagttctgccctccatccctgaccccactcttcaccaaaacatgtccctcccactctctttctcatcttaggacataggagtattgttcattcagttgctcaggtcaaagctgtgagattatctatgatgcctctctgtttcttaccccacacccagccagagtgatcttgttaaaatgttgtttctttgcagtggcctctcctctcatggcacatgcctggccccctgttgcctctctgatgtcactggcttccttgcttttcctggaactcgctaaacatgttccagccccatggcctttgcacacgctctctttgcctagctattcatatgactttcatctctctccatcaggtatttatttaagatcaatttcttggtgaagacttctctcctcacccaatctaaaatttcactctccacctcagcacttcctatccccattctctggtttttctcctcagtagttaattgtcatctaaaacctttgtaaatatttacctgtttatcttctttattattagtagctctgtctaaaatataagttccaggatgtcagggattttgtggggttttttttggttggttggttgttttggttttgagacagggtctcactctgttgcccaggctggagcgcagtggtgcgatctcagctcactgcagcctccgcctcctgggtttgagtgattctcccacctcagtctcccaggaagctggaattacaggtgcacgccaccacacccagctaatttttgtattttttggtagagatggggtttcactatgttggccaggccggtcttgaactcttgacctcaagtgatccacccgcctcggcctcccaaagttctgggattactggtgtgagccaccgcgcccggccttgttttgttttaagacagggtctcactgtcgctcaggctggattgcagtggcacaatcacagctcactgcagcctcgacctgctagacttaagcaatccccccacctcagccaccttagtagctgggacttacaggcatgagagataccatgcctgggtaattgttaagtttttgtagaggtgaggtctcactatattacccaggctggtctcaaagtcctgagcttaagtgatcctccttccttggcctcctaaagtgctgggattacaggagtgaactgccgtgcctgaccagtctgttttgtttacgattgtatcctcagcggttagaacaatgcctgccacaatccatctcagtaaatatttgtggagtgagtcataacatgggccacactgtaccgtgccaccagcccaaagatctcttaaagtcacccctgtctcatgtgcttgggagctccagtgacagtttcggggcagtttgcttccagctgtggtccagccaagcggagtgaatgaaagagatgctttttccttttgtgaaaggacgttttgctctggctcacgtgagcagcagtgcattttgagacgagggccttggcttttggaatctaagagcctgttgagcaagcctcgctcagccaccttctttcagctttctcctgaaggcagtttgaggattaagagcctgatgctctggattccacctaattgggttcagatcctggcaaactgtgtaacctgtgccccagtttcctgtgtaatgtggagagacctggaccttttcttacaggtgtttggagggttaaatgtggcaattcggccgggcgcagtggctcatgcctgtaaccccagcactttgggaggtggaggtgggcggatcaccggaggtcaggagttcaagaccagcctggttaacatggtgaaaccccgtttctactaaaaatacaaaaaattagccgagtgtggtggtgcgcgcctgtaatcccagctagtctggagactgaggcaggagaatcgcttgaacccgggaggcagaggttgcagtgagccaagatcacgccattgcactccagcttgggcaacaagagtgaaactctgtctcaaaaaaaaaaaaaaaaaaaaagtggcaatttacccgaaactgtggtgaagcgtctggcgccctgtgggtgctgggcagcagtgggtgctgatggggtgtgaggggatgggatcaagccctttcccactaacttaggaaagaggttggaatgagctggggtcagagggaacatttgcggggacattttgccgggaggctgccttggaggttcagaggctcagatgacccctgtgttcattcagtgttttctcacccacagattgagcacctgctgtgtggccagccctttgcctagtgctgttcaagagtcagaggacataggcaggcaatcccccaccacaacctgccaccccatttcctctcttggggccttgatttctccacatgccaaacagggagaatgattgcaccttccttgtttctttttttttttttttgagacagtctcactttgtcatccaagctttagtgcagtggcatgatctcggctcactgcagcctctgcctctcgggttcaaagattctcctgcttcagcctcccaagtagctgtgattataggcacccaccatcacgccaggctaattttttttgtagttttagtagagatggggtttttttctcacacgttggccaggctggtcttgaacttctgacctcaggtgatctgcccatctcaccctcccaaagtgctgggattacaggtgtgagccaccgcgcccggctgcgccttccctgtttctttgtgagcttggaggtggatcacaagtgtgaaaccctttgccaaccgtgaggcatggtggccttgtgagaggacggaggccggtgtgtggtggcatgctcccgtgctgtgtggcacagacggagctacaggaaggaagttggggcagcttggcactctgagtggaccctgagtttccagcctgctctgtcttgactgggtgggaggagggtgctcaggagggtgtcactgctgccaggttctgctgccaggaccatccaacagttgttccaatcatgggacatcctgtcgtcagcagctggggctcgtgaggcctgatttccacctcgggcagttctgtgtgtgctcctggaatcccccacgtggccaagcctgtgaggtctgcttcctggcctgctgcctgtgggttcctgtcacgcacctctcgggcagctgtccggctcctctgctctcggcttagtcaagaaggaagcagaaggcttggagtctttcctgcttggactaggagtgagctcagcctaagtgccctgactatatataaagctgaactttccagaccgaagcctggggatggatcagtccgatcacttagggccgctcctgaaggagtgcaggtgctagatacaggttctcccggtggaggagcgaaccccttgtgggccgttagctactggtgggatttgagcatggtatttccctatccgttgtggagaggagcatggcagctcagagtgggtgggaacagtgtgtggtccctgttatcaccttcaagggaataaagtgtgtctgggggcttcagaggtgctggccccatgggcttataggtggttcattcattcattctcattcattcattcaccaaacttattaaacacccactgtgagtcaggaacatcatgccaggtgcttagggaaacaaatcaaagcgggttgggtgagcagcccaagccaacagatgcacccccattctcacatggtgtgtgttcctgtgggctgggccctgggtggtgtggggtgctggggagaagaggaaggcacaccaggctgcagggcggaggtgcgggtatgaattttcagaggagatggcacctgagctgtatcttcatggataagaagagatttgttcatttgtcctttgtggagcacacattcaggttaagaaagtggggaggatgggctacgctgatggagcgtatgtgtggtatccccaagtgcactgagacacgagtttgacgtgttctgggaagatcgatggtgcggcgtggctggagtagaggtgagggatgagttggaggggtgagttgggccagctctcatggatgctggagtctgggctttccctgggaggtcatggggcgccactggccagggtcagcagggagacctgcagctggatttgcatcgtacagtgggcatggaggggtgtcaggctgggttgggaaccgtgcaggctggaagggcactctggtgctctgagcattcagagggggcagctgggccttgaaggatgagcaggggctccagcaggaactggagagcgcattccagggaggacgcaagtgcaggcccctttcactacagaaaagcagttttcacacagaccttccaaaggggaggagaggggactgcctgggcctggcagctgcggcaggtagcagcaatcagagggcagggaccgctcctcccgtgcctgagacctgcccagggtccttcagggaattcgtagctgaggaggaaccagatttttgggactgagttctccctcaccacccgctctgagccaccctcttggtcccttgtcctctactgcacttcttccggggcttggctcctcgtcatgagaggagcttccctgggcatggcgaggggcgtgactgacatagcagccctggacaagtggctccaggtgacctgtgttcacgttgatcacagcactaaccacggcccctcctctcagcaccttcccctctcgagccgtccagtcccagtgaaaatgctcaccgttcatgggtgggctgagcaagcccctgatctctgccttcctccgtgttctgatctgcttcatctgctgtgaaggcctctcgccatttcccccgctggcaaactcctgttcttcctggaaagttcagctaaaaagtcatcccctttaggggtccttccctcaggggaccgtgcacttggcgagacagggactggtcttgggtctctctgttgactgttttatgaacccaggtagtcacttccagggaactcatcagagatgctaccattggctccaatctccctctgttcccactcgaggttttttgtttcttcgtttgtttttctttctttctttttttttgagacagagtctcgctctcgcccaggctggagtgcagtgacatgatctcggctcactgcaagctccgcctcccgggttcacgccattctcctgcctcagcctcccgaatagctgggactacaggcacccgccaccacgcccagctaattttttttgtatttttagtagagacggggtttcaccatgttagccaggatggtctcaatctcctgatttcgtgatccgcccgccttaacctcccaaagtgctgggattacaggcgtgagccactgcgcccagcccgtttgtttttgttttttggtggacatcaactttaatttgccctttgttttgttttgtttttgaggcagggtcttgctctgtctcccaggctggagtgcagtagtgcaatcttggctcactgcagtctcgacctcaagaggatcaagcaatcctcttgccttagcctcccgagtagctgggaccacaggcgcacaccaccatgcccagctaattttattttatattttgtagagacagggttttgccatgttccccaggctggtctcaaattcctgggctcaagcaatccgtctgcctcagcctcccaaaatgctggaattacaggcacgagccactgtgcccggccttaatttgccctttgaacatgtacaattcagggcctctctgggcctcagtttcttgatctctgagatgggaagatgggataataatacttgttcctcccgtccttcagctcctccaggggaccctcacaccagcacactctctgtcagtcttccctcaatgaacccagcaggcaagcttggttttgacagaggatgggtgagcagagataaggaaaacggccagaaatatctggcttccctcagcaggggcaccaaaattggtacctggaaattgcctggcttggacaggcagaattgtcactgtcaacccccaccaccaaaggtcttgggtctttgtctttctgcttgtggtgtttgagagagctgcttgacacagccgaggtgcggtctgtgtcaggtgacctgggcatcctgggggtgcagggagaagcccaggtaaggaggaggaggggccggtcatcagtggggaaaagtgattgtctaccccacgggaaggtcaagggtaggacgctgtgagaagccagggggagagatgaagtgaggcatgatgcggggggccctcatccaccatccccctcttgcagctgtgctgggaagagcctaggctccagggtccaaggtggcagggacagaaggaagcacgtgtgagcactttctccctgctggcccgccttcctggttggcaatgccgtgagtgttccaggatgtggccccgtggctgtcatttcctttcttccacctagtgataacaatggccactgtttgtgtgcccacagtcggcctgtgtcccagacaccttccctccattgcgtcatctcgtcctcctgcctaccctgaaggctggatgccagccaagcctgtcgtttctgtggccatgctgtcgtgggtgtgtggggggcatcccctagccccaggctctggtggggggtacacaggctgggccattgacgaaggggtgtgtggaatctttctttgatttcactgcacccctggtgactttctccctcaatctgaggctcatgggtgctggatgctcttgactctctgcccttcctgggcgcacccctccgcgtccctgtgggcccgtcctcggggtagcctctctgcgctcttccaggccaggcctgagtcccacaggtccccatcttcccggctgcagcccccagaggctcagcctatactgctacttcctttgaaaactataatcgctttacatagcatctggaaaatagggaaaaggaaaaaacaaaagcccataaacccagcaccctcatctactcaatggcatgttttctgtcagtctatcttggtttgttttctatcaggctttgttttttctatgcataatatttactcagttaaatttttgttttgacaaactttctgtgagccaagcttgtggacggagatgaaaagacgagcagctgcctttgagaaactcagactctgggccagcccatctgggtgccagctttcactgctccacccactagctgggtgaccctgggcccgtgactttacccctctgttctttggtgttctcatatgtaaaatgaggataataatagtaaccagttcatagagtggttgtcagacagaatgattaatgtacgtaaagctttcaggatggtgccagcaagatgcacaggagtgtttggtaggaggatgacgaagcttaccgtctggcaggaggggcagttgtaacatgctgggctgtgatagtacagatgtgtttaaagtgagggagagcccagagcaaggagagagaacctggcatctggtgatggtgtatcaagaacattttaggccagacacggtgactcacacctgtaatcccagcactttgagaggctgaggcaggcagatcgcttgaacccgggcgttcgagaccagcctgagcaacgtggtaagaccctgtctttataatttttttttttttttttctgagacggagtcttcactctgtcacctaggctggagtgcggtggtgctatcttggctcactgcaacctccacctcccgggctcaagtgattctcctgcctcagtctcccaagtagctgggattataggtgcccaccaccatgcccagctaatttttttatatttttagtagagacggagtttcaccatgttggtcaggctggtctcaaattcctgacctcaagtgatctgccctcctcagcctcccagagtgctgggattacgggcatgagccaccatgcctggcctctataaaaattgtttggaagaaattacctaggcctggtgatacacacctgtagtcctagctactcaggaggctgaggtggaaggaggtagaggctgcagtgagccatgattgagccactgtactccagcctgggcaacagagccagaccctgtttcaaaacaacaacaacaaaaacatttttaaggaggaggctgagaaccacgagaaccaagcttggatttgaagaaggatcagggctttctcagacagaaaaggagaggaagaacattccagatagacatcattgagagatggcactgagccttgtaatgggacactgcgaacttttcttcagttgttatgatctttttttttttttttttgagacggagtttcgctcttgttgcccaggctggagtgcaatggcgccatctcagctcaccgcaacctccgcctcccaggttcaagcgattcttctgcctcagcctcccaagtagctgggattacaggcatgcgccaccatgcctggctaattttttgtatttttagtagagacggggtttctccatgttggtcaggctggtctcaaactcctgacctcaggtgatccgcccgagtcggcctcccaaagtgctgggattacaggcgtgaaccaccgtgccttgttggtataattattagtattgatcttttttccttttcatgtgcctcttagtgggccccttgcttttgtcttccttctgtccccagggttgatcctgtgctcagcacataggccagggaagaatgtggctgtgacccagtgtccactcagatgtcctctctcccccagggcacccatactctgtccttagtgtcttttgtctggtgacatcttggcacagaggcagagggcggcctccgtctgattggcgcctggctttggtgacagtaccttaggaaggcagtgtattttctgggaacctaggaaataacaaggtatctaattccatcatcaacactggggacaatttccatggcagaaactatgactctgaatatgcagcgtaaagttaccacccagacactgctgctcctgagtctcgaatggcatcttctgcaggggctcccccacctgcccctgcagaaggtgcagttcgttcatttccaaggagcttgcttttgtgtgctgtctctcggagctctttgggaaacctgtggtagcaggaaacaaaggatttagaccaatgccgatgatccccttgctccgatagagtgtgacatgatgctggtcaccttttggtatctaggaggggggacattgattttgtttgcggaagtgaaatgatccatgctggcctctttttttttttttttttttgagacagagtcaccctatcgcccaggctggagtgcagtggcgcgatctcagctcactgcaacctctgcctcccgggttcaagtgattctcctgcctcagcttcccgggcagctgggactacaggcgcctgccaccacatctggctaatttttgtatttttagtagaggcagggtttcgccatgttggccaggctggtctcgaatttctgacctcaaatgatccgcccgcctcagcctctcgaagtgctgggattacatgcctgagccactgtgtctggtccatactagcctctttgagtgctgaaaggttatctctgtaacttatttagtgagaaccctccatttgcccagggcattactgcctataatgtatgttcacatgtgctatctcctttggtcaataccacacactacaggtgaggaaactgagtctctgctgggacactgggtcaggaagcaggcagttaaggtcacctgtgcacagtggcagcacagggggacagccttctaggtagccagcctggcctgagggttctgtcacttttacctcccactcagtgttgtttctctttctttcccctccttttaagatccctccaggcccaggatctggggacaacgctggtggggagtgatctgggtgtctgtgcaggaaaccgctgcactgggtgagatgggcatgggagactgtgcctggctgaccagagacctcgttttcttccagacagagggggaagacggtggggcctccccacctgccccgcagaagatgcagttctttggccgcctggtcaataccttcagtggcgtcaccaacttgttctctaacccattccgggtgaaggaggtggctgtggccgactacacctcgagtgaccgagttcgggaggaagggcagctgattctgttccagaacactcccaaccgcacctgggactgcgtcctggtcaaccccaggaactcacagagtggattccggtgggtgatgctcagcgggaacatacttctctcctttcactcccccacgtctcggattggaggtcttattggccgagaagcagtttctttgagtctctgtctgaggggtctggagaggggtgggagagaggggagactgtactcttggaccagagggaagggcttccgagactccacacttctggcccatcagtgtcccagcacgaggctgaggatggaagcctgggttgtttctggcctggaggctcgacctatatggacaaagggaagaaggaaggacagggagactgagagtgtccacatcagataaggcccatggggagaacctttagccctggctctttatttttggttttggtttttgttttttgagacagtcttgctctgttgcccaggctggagtgcagtggcgcaatctcggctcactgcaacctctgcctcccaggttcaagcgattctcctgcctcagcctcctgagtagctgggattacaggcacccaccaccacgcccagctgatttttgtatttttagcagagacggggtttcatcatattggccaggctggtctcaaactcctgacctcaggtgatctgcccaccttggcctcccaaagtgctgggattgcaggcgtgagccactgcacctggcctagccctggctctttaagggcatggccgttctcataggggctgcccagggtttgcttaggaaggctggacagagctgttgcctcttggggcatgctgggactcccctgggcctgaagagaaggctcaaaagccaggacaggcctgagggaaccgggccaacggcagagctggttgggaaaaggggagaagcagccaaggttccaaatgcaggccccagcagtgcttggcagactggcatctagttgggctcagacagatatccctgtttccgctcacctatccatctggctgtcctgtcagccatccattcaacatgcaccaagcacctccagtgtctccagagtcctgggcttcgggccagtcctggctggcctgtgagatgacaaacatgtcctgtgtctttaaggaacgtacagtctggtgggggaggtccggtgcaaacaggcgtcatagcaccccttgaggagtgctgtgacagagggagagcctaggaaacagtgtggatcacaaggaggtgattgagagctactctgcgtctggaagagtgaggaggagcctgtgtggcagaacaaaatggataaggtcgttccagccgtgcagaagtgtggaggtgtgagcctgcaggcaggtggctctggttggatcccaggtgcatgcagggctttggtgagagtgaggctgaaggaagcagctggggactcattctgactaaagaggcatggcaggaggggtctctgaaagtgtcaggctgggggccaggggctgccaccaacagaagagcaaggcaggtatcagggccccatccaatcaggtgagaattcagagcctggctccacaaggaacctgaggcagaggcacccacagcaggtgcttgggctaaatgcagctcagtggccagtgcaggcaccagttttaatacagtggggccattccagattctgagtgcagatggggctgagcagaccgccttccagctggactcgatcaggactgaccctggacggggcaggcttgcacttgtagcttcagagctccactgcaggcacagctgaccagggcagcgggtccactccttggagagctggacagccccacttttgaggtacacggccctggggataccactaatctccacgtaccaataatcaccaagttctgtcagttgtaaaatcccttgacaggattccagatttgtctcagccagcttaagccccagtgtgggcagacctccatcccaggaggatttagtcctttgtcagcagcttcttagctacacgtaagctattctgtggtactttatagtttacaggattttttgttttcttttttttttttttttgagacagagtctcgctctgtcacccaggctggagtacagtgacgcgatctcggcttactgcaagctccgcctcccaggttcacgccattctcctgcctcagcctcccaagtagctgggactacaggcacccgccaccacgcctggctaatattttgtatttttagtagagatggggtttcaccatgttagccaggatggtctcaatctcctgacctcgtgatccgcctgcctcggcctcccaaagtgctgggattacaattttacaggatgtttttaagtatgttgggttagcacattctctgccaatccgtggaggtgggcaaggaaggcagtattccattttatgcatgagaaaatagccttgggatgataagtgattcatcccacttatacacaggaagcagtgaagaaacagaatcagtgtcttctggttcccaattcatttctctgtgctgctgtgttgtttccatgtatgtatgtatgtatttatttttttgagacgttaagtcttgctctgttgcccaggctggagtgcagtggcatgatcttggcttacagcaacctctgcctcctgggttcaagctattcttctgcctcagcctcccgagtagctgagactacaggtgcgtgccaccatacctggctaatttttgtgttttttagtagagacagggtttcactgtgttagccaggatggtcttgaactcctgacctcgtgatctgcctgccttggcctcccaaagtgctgggattacaggcatgagtcaccatgcccggctttgtttgtcttatttctaaattttattgatttatttattttcacagtcatagctctggagtcttttttatcttctcccctctaacctgctcccacccgaacctttccatttcagcagatagcatcattgcaacgggctgtgccagatccagccatcacatccacctttccagccaaagggagggtggaagggcaggatgcagaaggtcaatctccccctcctcagggacatttcatggaagttgcacgcattggccagaacccggtcacatggccacagctaactgcaaaggatgctgggaagtgttgcctgtgttgcagacagccacgtgccagtcgaaaatcagaggttctttctccctccgtcttgctgctggctcgcttctccagaccacagtcattgtgcacgtgtctcctgctgctccggctgtggcctgcactcctctcatcctcttccaagctgctgtcacagcgctgtttccagagggcaaatctgattggtcactcccctgctttactccccaagggcttcctgttttcttttatttttatttttattttcattttttgagatggagtctcgctctgtcgctcaggctggagtgcagtggcacaatgtcagctcactgcaagatctgcctcctgggttcatgccattctcctgcctcagcctcccaagtagctgggactacaggcgcccgccaccacgcccagttaattttttttgtatttttagtagagacggggtttcaccatctactcttagccaggatggtctcgatctcctgaccttgtgatctgcccgcctcagcctcccaaagtgctgggattacaggagtgagccaccgcgcccggccagcttcctgttttcttaacacatcaggtgcttaatgacttaaaagggcccagtgtgatcaagtttctgcctctgtgttctcagctcatgccgccttgtgctcctggcctttgcccaggctcttgctgtggcctggaatactcccctttctttgcctgccttccttcctcttgccctcccctgacctgcaggctggattaggagtttctgctgggcatcccatggcacccgtccctgcactggggatcctgctttcctggtaggccacagaccttgtgaggggagggactgtgtctgttgggttcatgacagtgtgcccagcccccagcaggtgcctggcgtagatcaggtttgtggaacaaatgaatgtgatatattaatttagctttagagtattcattgagggctgctgtgtgccaggccctctgtgccacctgggtggagggtggaggactgttgcattgagggcagttgaaggagtgagctgggaagtgggaggtggaggatggggactgggatgcagggtttgaggttatcaggggtcccagaagcagtaatgccaaggcctaggctgtgacctggagtgagggctgcgatggggtggggtggggtcgaggctgtggaggagggtcatcagggcactgctggagccctggggttctccagggccgggggtggtcattgcagtgttctcccagctcctctcaacaccctgcggtctgtggagagcaggcctggtgcactggacttgcctctggccagggctgagtttctgccttctaaacgatcttcctcctgtgttgccctagaggcctctggactgtcctgagtacttgacgcgtgttagagtgagcatgggctgctagccttccgctccaggtggaggagtttctgttgttcttttgctgctgttgctgcagtgagctgccaggctgagcttctggatggacctgggggatggaattaggagcttctgaattcttgggttgtataacctaaggccggagagtcccacagcactgctgctgggcggagagactggaccctgctgatacagacagcgacagcagcaggagcatctgcagtttcccagcaggtcctgcatgcctgggcttggcactagtctaagtagtaactcatgttatcctcacgacagtcccacgaggtggggtcattactgacctcctattacagatgaggaaacagaggcttgcagaatttgagatcacacagctggtcagcgtagcgattattcagaccctgtcacctggctccagaacccactcgtttacctttcttacatcagggctgctttgtagtgtggcgagctgagtggagctccacccgcctgggctgatcctggcccttcctgcctgacctatggtgcgggggccctggctctccccgtgtgagcccccaggggtcacttgtaatatgcctgtgtacactatgatagcatagatacttctgttcctggtacagattaatcatttacggctggcattgacttgtaacagatgacatttgatgaaatcaaccagcctctcactggtatctcagcagaaacagggctgtacctcccaggcatcctgggaaggatgatagaagtgtgtgatctgtgcttccctaccgggagctgacttttgaggctctctggactgggactttgccataaaactgcttatcagaaacctcagataagtggagtgccctgtgtcctggccacgtactctggggccagctcctccatccattcagtcctcccacatcccatcttcaccaagcagagtggaaagcggcaggtctctgcgagaaaaggaggctctgtacccagccttcagtgagataactttagagtggggccttgtattccctacacaggccttgtccccgacacggcctctttgcccttgcttctccttctgctaagaatgctccttcccaactccttggctggacacacggctcctgctctgtgggcctgtcctgttcccactcagagcctcagcaccccccatgtggccaagacacagcccctcttgccttaggttgccgtgggtctgtttccacatctgtttcccctccagactgcagggctcctgagggacagggcctggggccaagtctcctctgcgttcctgatgcctggtggtgtgccacgctctccgtgggtgcacggtaaatatctgccgagtggctagatgtatccatggttgctgaaggccaagtgtgttgaccagagggcgtgggaaaggctccactggggtggctggggtagagatagaccttaaggggtccagaagactccaccagctggagggaaaggccctacagagacaaggtactaggaaaggcccagaggacagaggaggggccctgtggggagcctgtgggcaggaagggcctgtgctgggctttgaaactggggactcaggtactgctctagcgtgagggtccttggcattttttttggtccaggaccccctgaggtccctggggaatgagaacaggctcacacagccactttcaagaggtttgcaggtcccctgaggcttagccacagacccctcccaccccagcagagacacagcagaggcttctgagtggaggccaggtggcttcagcctggggttctagaagggagggaagagacacacccccgtgtgtcctccagagcctcagccttctccctgaatctcccctttgcctcctcactgtaacccacacctggctctccttgaaggacccgcttgccccgcagcctcctgagagttttctctcccagtccctctcccactgggcctggaggtggggtagggtcctccttgcccccagccttgaatcttctgtcaccctacaataccacttgctgtcaccccggtgataggtatctacgagcctggggtgctcccccacatcctcaaagatgtgagcccctgactcagcgttgcctctggttcctgaccctccacattcacatgaccacgcgctggcctttatcatcgccagtgacagcagctctcccgtaaatacaagtttcaagcaccccactttccagtctctgccttctgtctttccagttcattccctctagtcctccacccacacagtgcttttccccattgacagggaattgctcctggccgcttttcccagccccatcccgttcatgtgccttgctttgtacccagcatggactccatggcctgtcattgtcactccttcacctatacttcctgcctccttgcttctctctctcttcgtcatcctggcatcaccaccccagaactgcttggtttcagttctccaccatggctaggggaacatacctttttgctgactgctctcactttctttttttttttttttcttttttttttttttgacacagagtctcgctctgttgcccaggctggagtgcagtggcacactctcagctcactgcaacctccacctccggggttcaagcagttctctctgcctcagcctcctgagtagctggtattataggcacccgccaccacacccggctaatttttgtattttttttagtacagacagggttttgccatggtggccaggctggtcttgaactcctgacctcaggtgatatgcctgccttggcctcccaaagtgctgggattacaggcatgaaccaccctgcccggccctattgctctcactttgaaatcacgacatgagccacagtgagcctatgatgtggtttgacgtctttctgcatttctctgttcacccctctcccagaaggcatgcctccttccctcccctcagcctgcagccccttcccctccacgcttactctcagctgatagccctgctgctgtctcgctgagaaaatagaaatagccagaggagaattccctctaccccatgcacacacctctgtccccgcctactccacattccctgttgtcagcaccgatgtgtttagctgagggtggtccccccattcaaggccatcatctcctgtcatctacttcttgacaccatttgaacaattatctcccctctttcctacataacactttccccttttctactatatattttttgctatggattgaaagtatccccccgaaatcatatgttgaagccccaatccctcgtgtgatggtattaggaggtagagcactatgggggtgattaggtcatgaggatggagccctcatgaatgggattagtgcccttagacgaagaggcaagaaagagatgatctgtctctgccatgtgagggcacaacgagaagatagccatctgcaaaccaggaagtgaaccctcatcaggaactctatcagccagcaccttgatcatagacttcctagcctctagaactgtgagaaataaaggttgtttaagcctcccagtctgtagttttctgttataatgtcctgacctaagttattttccatcgctatacaatgggttatttttttctttaaaaaaaaattatttcttgactctactttttcctccagagactgcttatattccactgtcttcattcttctcctcctgttttctctctttaaacttttcaaaaatagcaaaatataacacatatagagaaaatgatatacagctcagtgatttatcacaaacacctgtgtaaccaccactcgaatctagagataggacattacagcaccccagaagccctccttttgtcccctcttcccaaagaagggtaaccaataacttgccttttatgataaaggctttttttttttgagatggagtctcactgtgttgcccaggttggagtgcggtggcgcaatctctgcttactgcaagctctgcctcctgggttcacgccattctcctgcctcagcctcctgagtagctgggactacaggtgcccgccaccacgcccggctaattttttgtattttagtagagacgaggtttcaccgtgttagccaggatggtcttgatctcctgacctcgtgatccacctgcctcagcctcccaaagtgctgggattacaggcgtgagccaccgcccccggccaagataaaggcttttctatctggcttctttgttagcattttgttggcgagattgatacgttttgtgtgcagctgtctgtcattttcattgcaatagaattccattgtctactatatcacagttactcattctactactgatgaaaatttgggttatttctagtttttttggtgcatacatgcatacatttctggtagacatacctagaagtgaactggctgcattatgggccataacttgtcttcaacgttagtaaataataccgcccgtctgttttccaagcagcagtaaatggcactttctgttacttcatatcttctgttacttggtactgtcaggttttaaaattttagtcattctgtcgggtgtctagtagtatgttattgtggttttattttgcatttgcctgattgcaaatgaagttgagcactttttgatacagtgattaaccatttggatatcctcttcagtgaagtatcagctcaattctcttgactatttaaaaaataaagttgtttatctttttcttacagagttttaggaggagttttttggtacatgtgcagtccaaatacacaccttttgtcagtgatacgtgttcagctgcacacacggtgttttgcctttttattcttttaatggtatctattgataaacatgagttcttagttttaatgaagtcaaatttgttcatcttctttacggtgtactttttgtgtcttgtttaaggaagtccttctctatcttaaagctttgagaagcattccttctttctcctattttctaaaaattgttgaagatctccttccttccttccttccttccttccttccttcctttcatctatctctctctcacccaggccaaacttcagtggcatgatcatggctcactgcagcctcaacttcccaggctcaagtgatcctcctgcctcagcctcctgagtagccaggactacaggcacgcaccaccatacctggctaattttaaaaattttttgtagagacacggtctcatcaagttacccaggctggtcttgaactcctgggctcaaacaatcctcccacctcagcctcccaaagtgctgggattacaggcatgagtcacatgtctagcctgtattctttctttcttaaatgtttggaagaattcatgggtaaaaccatgtgaccctggagtttatttgtgggaagcttttaaaacatggattcgatttctttaacaaatataggactatgagattttcatctcatgtcggtttgggtatgttgtgttttcaaggaatttttctattttatcgaagttgtcaaatttgtctgcaggtccccttatttcctttttaatgtatggaggatctgaagggatggtactttgtgttgtctctatttcttgtttggttttgctagtgatttgccaatttaaaaaatctttccaaagaaccaacttttggctttgtttattttttgaaaacctgagtagctgggattacaggcgcccaccaccacacccggctaatttttttatttttagtagaggtggggtttcaccatattggccaggctggtctcgaactcctgacctcagatgatccacccgcctcggcctcccaaagtgctgggattacaagtgtgagccagtgtgcctggcaagccgctttttaaatggcaccaatcccattcatgagggcagagccctgatgatcgaattacctcctaatggccccatttcttaatactatcacactgagaattaagttttaacataagaattttaggaagacacaaacattcagaccatggaacatatataaaacagttgtcctaccaactaacagaatacacattcttttcaagaacacctatataaaaattatagacactgacctatgctggccataaagcaaatatgaacaaatttcagatacctgaagagatttagactatgttctccaactacagtgcaattaagctagaaatcaatagcaaaaatgtaactataaatgagcccgtatgtttgaattttaagcaagatatatgtaaattatctatggttcaaaaaagaagtcacagtgaaatttagaaaatatcttgacgtggcgggttgcagtggctcacgcctgtaatcccagcactgtgggaggccaaggcgggtggatcacctgaggtaaggagtttgagaccagcctggccaacatggtgaaaccctgtctctactaaaaatacaaaacattagccaggcgtggtggtgggcacctgtggtcacagctacttgggaggctgaagcgggagaatcacttgaacccgggaggcagaggttgcagtgagccgagattgcaccactgcactccagcctgggcaacatgagtgaaacttcatctcaaaaaaaaaaaaaaaagaaaagaaaaagaaaatatcttgacccaatgatgatgcaaatactacgtatcaaacttgtaggatgaacttccacttctggccatgacagaggagcctgtatcagactagccttcctatttatatatttatttttgagatggggtgtcgctctgttgcccaggctggagtgcggtggtgcaatctcagctcactgcaacctccacctcctgagttcaagtaattctcctgtcccagccttccaagtagctggaattacaggcgcccaccaccacacccagctagttttttatatttttagtagagacggggtttcaccatgttggccaggctggtctcgacacctgacctcaggtgatccacctgcccctgcctcccaaagtgccgggattacaggtgtgagccactgcgcctggccgtgagtgacctttttaatgtgttgttgaatttgatttgctggtattttgttgagaagttttgcatcaatatccatcagggatactggcctgtagttttctttttttatatgtctttgtctggttttggtgtcagggcaatactggcctcatagaatgagtttggaagttttctctcctctgtttttcataatagtttgagtagggttggtattagtttttgtttaaatgtttggtaaaattaagcagtgaagccactgggtcccaggcttttctttgctgggagacttttcattacagctttgatctcattacttgttattggtctatttaggttttggatttcttcacggttccatcttggtaggttgtgtatgcctaggaatttatccatttcttctagggttttcaatttattggcatataattgttcacagtaacctctaataatcctttgagtttctgtgatattggttgtaatatctcttttgtcatttctgatttttttgtttgggttttctctctttttttgttagtctagttaaagatttattgattttgtttatcttttcaaaaaactttattttgttgatcttttgtattgttttgtttcaatttcatttatttctgctatgatctttattatttcttttcttctactaattttgggtttggtttgctcttttctagttctttaagagacatcattagattattttgaagtttttctacttacttgatgtaggtgcttataggtacaactttcctcttagtacttctttccctgtatctcacaggttttgatatgttgtgtttccattatcatttgtttcaggatgtttttaaatttccttcttaatttcttcattgaccattcaagagcatattatttcatttccatgtgttcgtatggtgtgcaaaataccttgtttttgatttgtagttttatttcattgtgatcacagaagatacttgatatgatttcaaatttaaaaagtaatttggctgggagaagtggctcatgcttgtaatcccagcgctttgggaggccgaggcaggcagatcacgaggtcaggagatcgagaccatcctggctaacacagtgaaaccccgtctctactaaaaatacaaaaaattagccaggcatggtggcaggtgcctgtagtcccagctactcaggaggctgaggcaggagaatggtgtgaacccgggaggcagagctggtagtgagccgagatcgcgccgctgcactccagcctgggtgacagagcaagactctgtctcaaaaaaaaaataataacaataataataatttaagacttgttttgtggcctaccatatggtctatccttgagaatgatccatatgctgaggagaagaatgtgtattctgcagccgttggatgaaatgttctgtaaatatctaataggttcatctgatctatactgcagactaaggctggtgtttctttgttgattttctgtctggatgaactgtctaatgctgaaagtggagtattgaagtctccagctattattgtattgaggtctatctctctctttagctctaagaatacttcctttatatatctgggtgttccagtgttgagtgcatatgtatttaaaattgttacattatcttgctgaattgacccttttatataatgaccttctttgtctctttttatagtttttgtcttgaagtctgttttgcctcatagaatagcatagctattcctgctcttatttggtttccatttgcatggaatatctttctccatccctttagtttcagtctatgtgtgtctttacaggtaaagtgtgtttcatgtaggcaacagatcactgggtcttgtttttctatccgttctgccactctgtgtcttttgattggagagtttagtccatttatgttcaatgttattactgacaagtaaggacttactcctgccactttattaattattttcttgttgctttgtgatcttctttctttccttcctgttctccttttagtgaaggtgattttctctggtggtatgttttaatttcttgctttttatttttttgtgtgtatctgctgtatgttttttgatttgaggttaacatgaggcttgcaaataatatcttataacctaatattttaaactgatgacaccttaacactgattgcataaacagacaaacaagcaaagagaaaactaataaaaactctacattttaactttgtccccccactttttaacttattgtactgtttatgtctgaaaagttgtagttattatttttgattggttcctcttttagtctttctactcaagatatgagtggtctacatatgacagtgttataatattctatatgtttctgtgtacttgctattaccattaagttctgtactttcaagtgatttcttattgctcattaatgtccttttctttcagattgaaaaactccctttagcatttagcagtatgtgaactgcatttttcaagtccagaatttctgcttgattcttttttttttttttgagatggagtcttgctctgtcgcccaggctggagtgcagtggcgcgatttccgctcactgcaagctctgcctcccgggttcacaccattcttctgcctcagcctcccgagtagctgggattacaggcgcccgccaccacgcctggctaattttttgtatttttagtagagatgggatttcaccatgttagccaggatagtctcgatctcctgaccttgtgatccgcctgccttggccttccgaagtgctgggattacaggcgtgagccactgtgcccagcctgcttgattcttttaaattatttcaatctctttgctaagtttatctgttaggattctgaattccttctctgtgttagcttgaatttcactgagttccctcaaaacagctattttgaattctctgtctgaaaggtcacatatctctgtctctccagaattggccactggtaccttaattagttcatttggtgaggtcatgttttcctgtatggtcttgatgcttgtgatgttcgtcagtgtctgggcattgaagttaggtatttattgtagtctttgcagtctgggcttgtttgtatctgttcttcttaggaagactttccaggtaataaaagggacttgggtattgtgatctaagtttttggtcactgcagccatatctgcattagggggcaccccaagcctactaatactatggctcttgcagactcgtaaaggtaccacttgggtggtcttggataagatctggaagaattctctggattaccaggcagaggctcttgttctcttcccttactttctcccctaaaagtggagtctctctctctgtgctgggccgcctggagctaggagaggggtgacacaggcacctctgtggccactatcactaggactatgctggctcagacctgaagccagcacagcactgggtctcacccaaggcctacagtctccactgcctggctactgcctacgtttgcttaaggcactagggctctacagtcagcaggtggtgaagccagtgagattatgtccttcccttcaaggcagcaagttccccctacccccatcctgggaaggtccttagatgccatctgggaggcagggcctgcagtcagaaaccttagtaatctccccagtgctctattctattacagcctggctgatacccaagccataaggcaaagtccttcctgctcttccctcccctttccacaagcagagaagtctctctccatggccaccactgccccagccctgtggcagtgctgccaggccactgccaacgttcattcagggcctaagggctcttgaagcaactgaacactgccaggcctgggactctccctttagggtagtgggctcccctctgacccagggcaggtccagaactgccaccccacagccaacacttagaatctgggaccccaagagccctcttggtgctctgccacactgtagctgagctggtacctaggctgatttttgctttttatgaaggtacttttttgtgtgtatagttcaatttggttttcctccagggaggacaattggtggaggtttctatttgggcatcttttttttttttttttgagacggagttttgctctttcacccaggctggagtgcagtggcgcgatctcggctcactgcaacctctgcctcctgggttcaagcgattctccagcctcagcctccccagtagctgggattacaggtgcctgccaccatgcttggctactttttttttcaattaaaaagtaaactttaatgtcgaaaatgcaaacttggggaaggcagaaagatcacacacaaggctgtcgcttcacacttggaaggttgcacggcggccaggagaggcactcctcacttcccagacagggcgggggccgggcagaggcgctcctcacttgccagacggggcggcggccacatgcctggctaatttttgtatttttagtagggacggggattctccgtgttggccaggctggtctcaaactcctgacttcaggtgatccacgcacctcggcctcccaaagtgctgggattacaggcatgagccaccgcgcccagccctatttggccatcttgctttgcctccaccttcatttgataacagaacacccccatgtaaccaccaccacaatcaagatataagacatttctgttattctccaaatttccttcaccctcctttatagtccatggcacccaccccatccctgggcaacacctatgtgcttcctttttttttttccccgcaggaggacgtcttcctatacctatgtgcattccatcactgctgcttttaatcatatagcgtgtagtcttatgagtctgactttttcacttagcataatgcttttgcaatttgtgattgagcgttttcatatgattctgttttttctgtctcttagcttggaagttatacactttttagtagtaactgttgggagatcgttctccaagagtctctctcatatttccatacatcctgctagcagagacattgactacctgtttttgtctgtttagtgttgctataaaggaatacctaagtctgagtattatacatagaaaagaggttttatttgtctcatggctcctcaggccatacaagaaacatggtgccagcatcttaccagtgtcacatggcaagaaaggaagtgaggaagagaaaataagttgttaactggttgttaaaaagtgccaggcacgggccaggcacagtggctcgtgcctgtaatcccagcactttgggtggccaaggcgagtggatcacctgaggtcgggagttttgagaccagcctgaccaacatggagaaaccctgtctctactaaaaaaaatacaaaaaaattagctgggcatggtggtgcatgcctgtaatcctagctactcgggaggctgaggcaggagaatttcttgaatccaggaggtggaggttgcagtgagccaagatcacctgggcgacaagagcgaaactctgtctcaaagaaaaaaaaagtgccaggctctttttaacaaccagttcttacaggaactaatagagtgaaaactcactcacccccaccccacagggagggcattcattcatgagggatccacccctatgacccaaacacctcccattagccccccacctccaacattggaatcaaaatttaacatgaggtttggggggcagaaatccaaattatagcactacctttgttccaggctaccttcaaaggatgtttatacagcaaacagccttggaaaatagagttagggtctccttgtagagcacagggtaagtttgcttacttttcagcataatcaagattgtgtcttcttctggagcaaaactttgacaacaacaagcggggcaaagtctgaaaccttttgcacatcttgacagaaccttagagattacgagatttatctctgccttactcaaggtccattagtatcttccagaacaataagttggtcttagaatcctttagctatgtattcccttccaggcttcgatgctgtgtgctgttgttttatttagtttttattttaaacccaacaagacgctataccatcaatacttatttagatccccccacatatttaacttgccatggtgcttcattctttcatgcctctttaagcatccatctaggatcgtgttcattccacatgaagagaaagcttttggcccagcacgatggctcacacctgtaatcccagcactttgggaagcctaggcgggaggatcgcttgagcccaggatttccagaccagcctgggctacgtggcaaaaccctgtctctactgaaaatacaaaaaattagccaggtgtggtggttcacgtccctgctactcgggaggctgaggtgggaggattacttaaacctgggaggttgaggctgcagtgagcgttgattgcaccactgcactccagcgtgggtgacaggagtgagaccatgtctccaaaaaaaaaaaagaaggaaagaaaaagcttttgtatttcctttcgtgtaggtctgctaatgacaaagtctctgggttttttgtttgactagagaaatgttttaattttaaccttattcttgaaggttttgtttttgttttcattttgttttgtgtgctaagtacagaattctcattggcatttatttatttagagacagagtcttgctctgtggcccaggctagagtacagtggcacgatctccgcctcccaggttcaagcgattctcctccctcaacctcctgagtagctggggctacaggcatgcaccactacacctgactaatttttgtatttttagtagagacggggtttcaccgtgttgcccaggctgatctcaaactcctgagctcaagtgatttgcctgccttggcctcccaaagtgctgggattataggcatgagccgccgtgcctggccagcatttattttcttttcagctctttaaggaagtcattccattatctctgggttccattgttgagaagccagctgtcattctaatggttgccctttgaagataacttttttccctctgctattttaaatatttcctccttgtattttattttcaacaggtgtaatgtggcacatatatcagcaattgttatgttacatacaatacatattgtgcaacatatgtatcattatcagttattgctgtgtaacaaactactccagaacacagtggcttataaaaggaatcatttatttagtccttaaatctgcaatttgagcagagctcagtgggaaagcctcagctttactttatatggcaccatataaggtaactcgcaactggcaagttggtgctggctgttggctggtagttcattcagggctcagggcccaggaccaagagtcgtcaccatggcttgcttcagcctccttgaggcatgatggctgggtcccaagagaagagaaatagaaacttccagtctcttaaggcattggtctggaagctgggacggcatcacttttgccatattctgttggtaacgcagttacatcgccagattaaagggtaaagagatacaaattcccactgctcagtgcaaggaatatcagtgattttagggggccctgttttaaaacccctacaaggtgctaagcgtggatttctggggctttcttgttttttgtttttttctatgtgtttttttttttttttttggtggtggggtcagggagggcttatagggtatgttaaatcagcagaataattttatttatttatttggagatggagtttcactcttttgcctaagctggagtgaagtagcgtgatcagagatggagtttcactcttttgcctaagctggagtgaagtagcgtgatctcggctcactgcaacctccgccccgctggttcaagcaattcccctgccttagcctcccaagtagctgggattataggcacccaccgccacgcccggctaatttttatatttttagtagacatggggtttcgccatggctagtctggaattcctgacctcaggtgatccacccaccttggcctcccaaagtggtgggattacaggtatgagccactgtgcctgacctataatgttttttaaaaatcagttttggaaagtttgcagacattaacttttcaaatgtagcttccatttgattctttttctactctgcctctgatcctccacttatgtatgtatgctagatcttttattagatagtctgtgtctcttatgtactctactatattttgtattcttctgtctctccatgctttattctgtttactctttcctgattatattttttaattttgtaatttccatttgatgcttttttgatcattcaaaactcttcaccaaaattctaaatttccttttttaacctctcgaatgttatcacagttactttaaagtctattttggataacttaaatatttacagtcccctcacagatatgtttcttttgtatattgtttctgttggttttctttcatgtcttatctccacatatgcctggtgagttttgattatgtgttggtcattgtatttgcaagtatgctcgtagaaataatctggaatggccgggcgcagtggctcatgcctgtaatcccagcactttgggaggctgaggcaggtggatcacgagatcaggagatcaagaccatcctggctaacatggtgaaaccccatctctactaaaaatacaaaaaattagctgagcatggtggcacgttcctgtaatccctgctactcgggaggctgaggcaggagaatcacttgaaccaggaggcagaggttgcagtgagccgagatcacgccactgcactccagcctgggtgacagagcgagactccgtctcaaaaaaaaaaaaaaaaaaaaaaaaagaaataatctagagcctagtttgatgtttccttacaaagaatgaatttatttttgcttctcccattgcaactaggataacctcagtctagtttctggaactgaaatcacttgaggctgaactgtggtctctgtgagagcgtgtctgtgtatggctcacccttattcctaggctacgtagttctttaggaccctaacccaaagtaagagatgttcatcagggctctcctcttggcagacgcctgggctccagtccctgtgtcctgagccccatgaggctgttactggtgctgctcgtctgcccatcctctccagtaacagccacctgaacactgcaattcctgggtttccatcattccttccagcctggtgagtcatcagtgtcttttgaggtatccagtgcctgccagcagatgttttttaataatttgtccagcatttctggctgtcctcagtaggtggtctgtttcacattccctagtctgctgttaatggaaagtggaagttctgagagagaatcatcgttcccgtcagcattcaaatgcctgattacactttccccattcgctatcctttcctttatttgctcctcaccacagcaaaactcctcaaaaatatctatctttgcaatcttcagattctcacattgtgtccttaaacccactttaatcaggccttggttccctccattccactaaaagtaatgttgtcaaggtcgtgcatgcctccgtgatgctaattccagtgatgagttttcagttgtcattctctgacatatcggcaacacttgatgtggagtaccctgatgttgagaggctggtgagatgaaggaaaaacccagccaagggcaatgaggaatggcttccttccgcctcctccttccctatctttgttgtggtttttgttgtttctgtaacactgattacgttatagtttatttaatgtacttccttattctatgtttttactttagtcattttgttgatctcctccataataacataggctcgggccaagcacagtggctcacgcctgtaatcccagcactttgggagaccaagatgggtggatcacttgaggtgaggagttcgagaccagcctggccaacatggcgaaaccctgtgcctactaaaaatacaaaaattagctgggcgtggtagcaagcgcctgtaatcccagctactagggaggctgaagcaggagaattgcaggagaatcacttgaacccagggggcagaggttgcagtgagctgagatcgcgccactgcactccagcctgggtaacagagtgagactctgtctcaaaaaaaaaaaaaaaaaaaaggcttcaggagggcagagcattttatgcaattgttcattaattgacccctccatttggcacagatcacatgcccagtagttaactgttaatcaacgcactctctgtggaacaacaggctggtcccgttgagccaacactctctgggcactgccttcactagactctggctggctgctgcgcttgtagaggtatgcaagacaaaaccttttggtatgttaaaagccctggtcagaactttaagtaaccatcactgacatataatggttatggttttgaaagtgcttttatagtggtttttcatctgtcctcacagcacctctgggaggtaggtaggacaggtacagttagtctcatgtttcaaatggggctcagagagggaaaaggatttcccaagatcacacagcaccttagtagcaaaacttggactcaacctcaacacttaaaaatgaacaaagctggccgggcgcagtggctcatgcctgtaatcctagcactttgggaggcccaggcaggcaggtcacctgaggccaggagtttaagatcagcctggccaacatgacaaaactctgtctcttctaaaaatacaaaaaattagccgggcatggtggcgggtgcctgtaatcccagctactcaggaggctgaggcaggagaatcacttgaacctgggagatggaggctgcagtgagccgagatcgtgccattgtactccagcctgggcaacaagaatgaaactccatctcaaaaaaaaaaaaaagaaaagaaaagaaaaagaaaagtttccctttttttaaatatctcattttaatgactgcataatagtttattacatagttataccataatttatataatattttgttgctgtacatttaggttaaacaatacttacttagttcctactatgaagaggggccaagtactcgaggctggagctctcacatgtggcaatgaaattagaaagtggatatggcagggctgtggtaaaataaaatataaaaataataaatgatattaccaaagaaaaggaaagtttttcaaaataaaggaaaatctagacaagcatagtggctcacacctgtaatcccagtacttttggaggctgaggcaggaggaacacttgaggccaggagttcaagaccagcctgggcaacatagcaagaccccctgtcaacaaaaataaaaaaaaattaggccaggcacagtggctcacggtggctagtgcctgaaatcctagcactttgagaggctgaggggggtggattgcctgagctcaggagttcgagaccagcctgggcaacatggccaaaccccatctctactaaaaacacaaaaaattagccaggtgtggcagcacacgcctttaatcccagctactctggagactgaggtaggagaattgcttgaacccgggaggtgaaggtcgcagtgaggtgagattacaacactgcactccagcctgggtgacaaaatgagactctatctcaaaaaaaaaaaaaattagctgggcatggtggtgcatgcctgtaatcccagctactcaggaactaaggtaggaggatcccttcagcccaggaattcgaagatgcagtgagtcatgatcacaccaccgcaccccagcctgggttacagagcaagaccttgtctctaaaaaacaaagaaagtctaacctaaacgccattatgtcatttacatgtgtataggggtgtgtgtgtgtgtgtgtgtgtgtgtgtgtgtgtgtgtgtgtgtgtgtgtttgcttgggaggggagtcgggctggagctggccaggccgcagcctggggaccttctgattccagcagggatgtgggccgagggtcccgccttactcatttcgggtcttgctcctctgtcctggctctacagactcttccagctggagttggaggctgacgc

SEQ ID NO: 15720 - DNA, 55444 bp, Homo sapiens
aggaggaagtagaagtgctgagtaagccgaggtgagtgacctcgcgggtgggcggggcctgggggtccgttccccaacttcctcggcgctccggactcccaagtctccgccggaccctcctttggatattcctcgtgtctccgattctgaggcatgtcctccattaacccttatgtgactccctgagtgcccccaccttccatcttttcatccccctgcgtccccaattcccatcccgagaccgcccgtgtctcatctcgaacttgtggaccccagggaccccagcttcgaccctgagtttctcccctgaaccccagtctcctccgtgtgtctccctcagtatccctaacttcccgagtcaatccatctcttctctttccccgaccctcagtgcctctttaggccccattggccgtcctaattttccttcctgtgctcctctaagtgctcacttgattccccacttcacgtccgtctccacctttcgtggtgcctctactcatttctcactccctgcttctcctgcctttcctccctgctttttttccttgcctttcctctctcgcgtgcctccagacctgcccccgacatgctccctccttcccctcagcctggccaccccagagtctcccacccctaatcctgtgtccacctcctgctcccacagatgacttggaagctggtgacagggagcatgtgaccagggtgatcatgggactgggtcggggcaagcctgtgggtgtgggacagggagggcacagggcaaggggacctgtggccgtatttttaatgggctacccacatgaccccaacgaatacctccccctagcttctgggtctttccctcacctgcctcttacccgcccaacaggatgtcaggcaggttcggtttggcaacgttgaggctgcacccttgggctgaatgcattgtttttgaatgcattgtttttgttagagtttctgcctggagtttggaacctgttttctgtccaagtctcagtttcctcatctgtgacaggggaactgtacctcctgccctcgtaagtctgccatgaggttcaaaatttgaatgagaaaatgtagaaggtaaagctttataaccagtatggccctgtacaaatacatgattttactgttgggtcataggcagaattgaaaggagtggaaagggaaagggctagaatgagaagacaaggagagaaggatgagcaggaggtcccttgtctttcagtgtatcatttggcagtgtttgttcatcacctcttgtgagtcaggctcttctgtatatgttctcttcaccattcattcagtcatcgtttatctaacaaatatttacggactgtctgatgttctaggctacccttggtgtggccaatgatattctcacttcacatgagaaaaagagggcgcatgagttgcttgaggtcacaccgatgaggttgaagctggaatctgacaccagagcctgtgtgattgtcctgatgtgtaaggtttgctactgtttaggacacttcttgttccttccgtggattactttcttgttacatgagagactccccaaaagggagtttccctcttactcagcagaatgacatcactaagagatacagaaaggagaaatttaaatactctgtgtgtgtgtgtgtgtgtgtgtgtgtgtgtgtgtgtgtgtgtctgcagacatctattgggtgtgtgtgctgggggaagtaggtaggcaaggagtaaggggccgtagtgaagagtgtgttacaaacttcactttgtagagggtggctccctgggagaatatgttctgtgtctttcacagtggattttgatagggtcatgtcttaaatgcctcttctcgttttcggatggtgatctcatccagtcttatttctttaagtgccgtctctattctgtcagcccacaaatttatatccccagtccagtccagacctttccctggaatgacatactcaaatctagttgcttactcagcacctcaaacttaggcttttcaaacttgaagtatttatttattgatttatttattttttgagacagagtctcactctgtcacccaggctggaatgcaatggcacgatctcggctcactgcaacctccacctcctgattctcctgcctcagcctcccaagtagctgggattacaagcatgcgccatcatgcccaactaatttttgtatttttgtagaggcggggtttcaccgtgttggccaggctggtctcgaactcctgatctcaagtgatccacctgccttggcctcccaaagtggtgggattacaggtgtgagccaccgcgccaggcctcaaacttaagagtttagaattgagctcctgttagttctgccctccatccctgaccccactcttcaccaaaacatgtccctcccactctctttctcatcttaggacataggagtattgttcattcagttgctcaggtcaaagctgtgagattatctatgatgcctctctgtttcttaccccacacccagccagagtgatcttgttaaaatgttgtttctttgcagtggcctctcctctcatggcacatgcctggccccctgttgcctctctgatgtcactggcttccttgcttttcctggaactcgctaaacatgttccagccccatggcctttgcacacgctctctttgcctagctattcatatgactttcatctctctccatcaggtatttatttaagatcaatttcttggtgaagacttctctcctcacccaatctaaaatttcactctccacctcagcacttcctatccccattctctggtttttctcctcagtagttaattgtcatctaaaacctttgtaaatatttacctgtttatcttctttattattagtagctctgtctaaaatataagttccaggatgtcagggattttgtggggttttttttggttggttggttgttttggttttgagacagggtctcactctgttgcccaggctggagcgcagtggtgcgatctcagctcactgcagcctccgcctcctgggtttgagtgattctcccacctcagtctcccaggaagctggaattacaggtgcacgccaccacacccagctaatttttgtattttttggtagagatggggtttcactatgttggccaggccggtcttgaactcttgacctcaagtgatccacccgcctcggcctcccaaagttctgggattactggtgtgagccaccgcgcccggccttgttttgttttaagacagggtctcactgtcgctcaggctggattgcagtggcacaatcacagctcactgcagcctcgacctgctagacttaagcaatccccccacctcagccaccttagtagctgggacttacaggcatgagagataccatgcctgggtaattgttaagtttttgtagaggtgaggtctcactatattacccaggctggtctcaaagtcctgagcttaagtgatcctccttccttggcctcctaaagtgctgggattacaggagtgaactgccgtgcctgaccagtctgttttgtttacgattgtatcctcagcggttagaacaatgcctgccacaatccatctcagtaaatatttgtggagtgagtcataacatgggccacactgtaccgtgccaccagcccaaagatctcttaaagtcacccctgtctcatgtgcttgggagctccagtgacagtttcggggcagtttgcttccagctgtggtccagccaagcggagtgaatgaaagagatgctttttccttttgtgaaaggacgttttgctctggctcacgtgagcagcagtgcattttgagacgagggccttggcttttggaatctaagagcctgttgagcaagcctcgctcagccaccttctttcagctttctcctgaaggcagtttgaggattaagagcctgatgctctggattccacctaattgggttcagatcctggcaaactgtgtaacctgtgccccagtttcctgtgtaatgtggagagacctggaccttttcttacaggtgtttggagggttaaatgtggcaattcggccgggcgcagtggctcatgcctgtaaccccagcactttgggaggtggaggtgggcggatcaccggaggtcaggagttcaagaccagcctggttaacatggtgaaaccccgtttctactaaaaatacaaaaaattagccgagtgtggtggtgcgcgcctgtaatcccagctagtctggagactgaggcaggagaatcgcttgaacccgggaggcagaggttgcagtgagccaagatcacgccattgcactccagcttgggcaacaagagtgaaactctgtctcaaaaaaaaaaaaaaaaaaaaagtggcaatttacccgaaactgtggtgaagcgtctggcgccctgtgggtgctgggcagcagtgggtgctgatggggtgtgaggggatgggatcaagccctttcccactaacttaggaaagaggttggaatgagctggggtcagagggaacatttgcggggacattttgccgggaggctgccttggaggttcagaggctcagatgacccctgtgttcattcagtgttttctcacccacagattgagcacctgctgtgtggccagccctttgcctagtgctgttcaagagtcagaggacataggcaggcaatcccccaccacaacctgccaccccatttcctctcttggggccttgatttctccacatgccaaacagggagaatgattgcaccttccttgtttctttttttttttttttgagacagtctcactttgtcatccaagctttagtgcagtggcatgatctcggctcactgcagcctctgcctctcgggttcaaagattctcctgcttcagcctcccaagtagctgtgattataggcacccaccatcacgccaggctaattttttttgtagttttagtagagatggggtttttttctcacacgttggccaggctggtcttgaacttctgacctcaggtgatctgcccatctcaccctcccaaagtgctgggattacaggtgtgagccaccgcgcccggctgcgccttccctgtttctttgtgagcttggaggtggatcacaagtgtgaaaccctttgccaaccgtgaggcatggtggccttgtgagaggacggaggccggtgtgtggtggcatgctcccgtgctgtgtggcacagacggagctacaggaaggaagttggggcagcttggcactctgagtggaccctgagtttccagcctgctctgtcttgactgggtgggaggagggtgctcaggagggtgtcactgctgccaggttctgctgccaggaccatccaacagttgttccaatcatgggacatcctgtcgtcagcagctggggctcgtgaggcctgatttccacctcgggcagttctgtgtgtgctcctggaatcccccacgtggccaagcctgtgaggtctgcttcctggcctgctgcctgtgggttcctgtcacgcacctctcgggcagctgtccggctcctctgctctcggcttagtcaagaaggaagcagaaggcttggagtctttcctgcttggactaggagtgagctcagcctaagtgccctgactatatataaagctgaactttccagaccgaagcctggggatggatcagtccgatcacttagggccgctcctgaaggagtgcaggtgctagatacaggttctcccggtggaggagcgaaccccttgtgggccgttagctactggtgggatttgagcatggtatttccctatccgttgtggagaggagcatggcagctcagagtgggtgggaacagtgtgtggtccctgttatcaccttcaagggaataaagtgtgtctgggggcttcagaggtgctggccccatgggcttataggtggttcattcattcattctcattcattcattcaccaaacttattaaacacccactgtgagtcaggaacatcatgccaggtgcttagggaaacaaatcaaagcgggttgggtgagcagcccaagccaacagatgcacccccattctcacatggtgtgtgttcctgtgggctgggccctgggtggtgtggggtgctggggagaagaggaaggcacaccaggctgcagggcggaggtgcgggtatgaattttcagaggagatggcacctgagctgtatcttcatggataagaagagatttgttcatttgtcctttgtggagcacacattcaggttaagaaagtggggaggatgggctacgctgatggagcgtatgtgtggtatccccaagtgcactgagacacgagtttgacgtgttctgggaagatcgatggtgcggcgtggctggagtagaggtgagggatgagttggaggggtgagttgggccagctctcatggatgctggagtctgggctttccctgggaggtcatggggcgccactggccagggtcagcagggagacctgcagctggatttgcatcgtacagtgggcatggaggggtgtcaggctgggttgggaaccgtgcaggctggaagggcactctggtgctctgagcattcagagggggcagctgggccttgaaggatgagcaggggctccagcaggaactggagagcgcattccagggaggacgcaagtgcaggcccctttcactacagaaaagcagttttcacacagaccttccaaaggggaggagaggggactgcctgggcctggcagctgcggcaggtagcagcaatcagagggcagggaccgctcctcccgtgcctgagacctgcccagggtccttcagggaattcgtagctgaggaggaaccagatttttgggactgagttctccctcaccacccgctctgagccaccctcttggtcccttgtcctctactgcacttcttccggggcttggctcctcgtcatgagaggagcttccctgggcatggcgaggggcgtgactgacatagcagccctggacaagtggctccaggtgacctgtgttcacgttgatcacagcactaaccacggcccctcctctcagcaccttcccctctcgagccgtccagtcccagtgaaaatgctcaccgttcatgggtgggctgagcaagcccctgatctctgccttcctccgtgttctgatctgcttcatctgctgtgaaggcctctcgccatttcccccgctggcaaactcctgttcttcctggaaagttcagctaaaaagtcatcccctttaggggtccttccctcaggggaccgtgcacttggcgagacagggactggtcttgggtctctctgttgactgttttatgaacccaggtagtcacttccagggaactcatcagagatgctaccattggctccaatctccctctgttcccactcgaggttttttgtttcttcgtttgtttttctttctttctttttttttgagacagagtctcgctctcgcccaggctggagtgcagtgacatgatctcggctcactgcaagctccgcctcccgggttcacgccattctcctgcctcagcctcccgaatagctgggactacaggcacccgccaccacgcccagctaattttttttgtatttttagtagagacggggtttcaccatgttagccaggatggtctcaatctcctgatttcgtgatccgcccgccttaacctcccaaagtgctgggattacaggcgtgagccactgcgcccagcccgtttgtttttgttttttggtggacatcaactttaatttgccctttgttttgttttgtttttgaggcagggtcttgctctgtctcccaggctggagtgcagtagtgcaatcttggctcactgcagtctcgacctcaagaggatcaagcaatcctcttgccttagcctcccgagtagctgggaccacaggcgcacaccaccatgcccagctaattttattttatattttgtagagacagggttttgccatgttccccaggctggtctcaaattcctgggctcaagcaatccgtctgcctcagcctcccaaaatgctggaattacaggcacgagccactgtgcccggccttaatttgccctttgaacatgtacaattcagggcctctctgggcctcagtttcttgatctctgagatgggaagatgggataataatacttgttcctcccgtccttcagctcctccaggggaccctcacaccagcacactctctgtcagtcttccctcaatgaacccagcaggcaagcttggttttgacagaggatgggtgagcagagataaggaaaacggccagaaatatctggcttccctcagcaggggcaccaaaattggtacctggaaattgcctggcttggacaggcagaattgtcactgtcaacccccaccaccaaaggtcttgggtctttgtctttctgcttgtggtgtttgagagagctgcttgacacagccgaggtgcggtctgtgtcaggtgacctgggcatcctgggggtgcagggagaagcccaggtaaggaggaggaggggccggtcatcagtggggaaaagtgattgtctaccccacgggaaggtcaagggtaggacgctgtgagaagccagggggagagatgaagtgaggcatgatgcggggggccctcatccaccatccccctcttgcagctgtgctgggaagagcctaggctccagggtccaaggtggcagggacagaaggaagcacgtgtgagcactttctccctgctggcccgccttcctggttggcaatgccgtgagtgttccaggatgtggccccgtggctgtcatttcctttcttccacctagtgataacaatggccactgtttgtgtgcccacagtcggcctgtgtcccagacaccttccctccattgcgtcatctcgtcctcctgcctaccctgaaggctggatgccagccaagcctgtcgtttctgtggccatgctgtcgtgggtgtgtggggggcatcccctagccccaggctctggtggggggtacacaggctgggccattgacgaaggggtgtgtggaatctttctttgatttcactgcacccctggtgactttctccctcaatctgaggctcatgggtgctggatgctcttgactctctgcccttcctgggcgcacccctccgcgtccctgtgggcccgtcctcggggtagcctctctgcgctcttccaggccaggcctgagtcccacaggtccccatcttcccggctgcagcccccagaggctcagcctatactgctacttcctttgaaaactataatcgctttacatagcatctggaaaatagggaaaaggaaaaaacaaaagcccataaacccagcaccctcatctactcaatggcatgttttctgtcagtctatcttggtttgttttctatcaggctttgttttttctatgcataatatttactcagttaaatttttgttttgacaaactttctgtgagccaagcttgtggacggagatgaaaagacgagcagctgcctttgagaaactcagactctgggccagcccatctgggtgccagctttcactgctccacccactagctgggtgaccctgggcccgtgactttacccctctgttctttggtgttctcatatgtaaaatgaggataataatagtaaccagttcatagagtggttgtcagacagaatgattaatgtacgtaaagctttcaggatggtgccagcaagatgcacaggagtgtttggtaggaggatgacgaagcttaccgtctggcaggaggggcagttgtaacatgctgggctgtgatagtacagatgtgtttaaagtgagggagagcccagagcaaggagagagaacctggcatctggtgatggtgtatcaagaacattttaggccagacacggtgactcacacctgtaatcccagcactttgagaggctgaggcaggcagatcgcttgaacccgggcgttcgagaccagcctgagcaacgtggtaagaccctgtctttataatttttttttttttttttctgagacggagtcttcactctgtcacctaggctggagtgcggtggtgctatcttggctcactgcaacctccacctcccgggctcaagtgattctcctgcctcagtctcccaagtagctgggattataggtgcccaccaccatgcccagctaatttttttatatttttagtagagacggagtttcaccatgttggtcaggctggtctcaaattcctgacctcaagtgatctgccctcctcagcctcccagagtgctgggattacgggcatgagccaccatgcctggcctctataaaaattgtttggaagaaattacctaggcctggtgatacacacctgtagtcctagctactcaggaggctgaggtggaaggaggtagaggctgcagtgagccatgattgagccactgtactccagcctgggcaacagagccagaccctgtttcaaaacaacaacaacaaaaacatttttaaggaggaggctgagaaccacgagaaccaagcttggatttgaagaaggatcagggctttctcagacagaaaaggagaggaagaacattccagatagacatcattgagagatggcactgagccttgtaatgggacactgcgaacttttcttcagttgttatgatctttttttttttttttttgagacggagtttcgctcttgttgcccaggctggagtgcaatggcgccatctcagctcaccgcaacctccgcctcccaggttcaagcgattcttctgcctcagcctcccaagtagctgggattacaggcatgcgccaccatgcctggctaattttttgtatttttagtagagacggggtttctccatgttggtcaggctggtctcaaactcctgacctcaggtgatccgcccgagtcggcctcccaaagtgctgggattacaggcgtgaaccaccgtgccttgttggtataattattagtattgatcttttttccttttcatgtgcctcttagtgggccccttgcttttgtcttccttctgtccccagggttgatcctgtgctcagcacataggccagggaagaatgtggctgtgacccagtgtccactcagatgtcctctctcccccagggcacccatactctgtccttagtgtcttttgtctggtgacatcttggcacagaggcagagggcggcctccgtctgattggcgcctggctttggtgacagtaccttaggaaggcagtgtattttctgggaacctaggaaataacaaggtatctaattccatcatcaacactggggacaatttccatggcagaaactatgactctgaatatgcagcgtaaagttaccacccagacactgctgctcctgagtctcgaatggcatcttctgcaggggctcccccacctgcccctgcagaaggtgcagttcgttcatttccaaggagcttgcttttgtgtgctgtctctcggagctctttgggaaacctgtggtagcaggaaacaaaggatttagaccaatgccgatgatccccttgctccgatagagtgtgacatgatgctggtcaccttttggtatctaggaggggggacattgattttgtttgcggaagtgaaatgatccatgctggcctctttttttttttttttttttgagacagagtcaccctatcgcccaggctggagtgcagtggcgcgatctcagctcactgcaacctctgcctcccgggttcaagtgattctcctgcctcagcttcccgggcagctgggactacaggcgcctgccaccacatctggctaatttttgtatttttagtagaggcagggtttcgccatgttggccaggctggtctcgaatttctgacctcaaatgatccgcccgcctcagcctctcgaagtgctgggattacatgcctgagccactgtgtctggtccatactagcctctttgagtgctgaaaggttatctctgtaacttatttagtgagaaccctccatttgcccagggcattactgcctataatgtatgttcacatgtgctatctcctttggtcaataccacacactacaggtgaggaaactgagtctctgctgggacactgggtcaggaagcaggcagttaaggtcacctgtgcacagtggcagcacagggggacagccttctaggtagccagcctggcctgagggttctgtcacttttacctcccactcagtgttgtttctctttctttcccctccttttaagatccctccaggcccaggatctggggacaacgctggtggggagtgatctgggtgtctgtgcaggaaaccgctgcactgggtgagatgggcatgggagactgtgcctggctgaccagagacctcgttttcttccagacagagggggaagacggtggggcctccccacctgccccgcagaagatgcagttctttggccgcctggtcaataccttcagtggcgtcaccaacttgttctctaacccattccgggtgaaggaggtggctgtggccgactacacctcgagtgaccgagttcgggaggaagggcagctgattctgttccagaacactcccaaccgcacctgggactgcgtcctggtcaaccccaggaactcacagagtggattccggtgggtgatgctcagcgggaacatacttctctcctttcactcccccacgtctcggattggaggtcttattggccgagaagcagtttctttgagtctctgtctgaggggtctggagaggggtgggagagaggggagactgtactcttggaccagagggaagggcttccgagactccacacttctggcccatcagtgtcccagcacgaggctgaggatggaagcctgggttgtttctggcctggaggctcgacctatatggacaaagggaagaaggaaggacagggagactgagagtgtccacatcagataaggcccatggggagaacctttagccctggctctttatttttggttttggtttttgttttttgagacagtcttgctctgttgcccaggctggagtgcagtggcgcaatctcggctcactgcaacctctgcctcccaggttcaagcgattctcctgcctcagcctcctgagtagctgggattacaggcacccaccaccacgcccagctgatttttgtatttttagcagagacggggtttcatcatattggccaggctggtctcaaactcctgacctcaggtgatctgcccaccttggcctcccaaagtgctgggattgcaggcgtgagccactgcacctggcctagccctggctctttaagggcatggccgttctcataggggctgcccagggtttgcttaggaaggctggacagagctgttgcctcttggggcatgctgggactcccctgggcctgaagagaaggctcaaaagccaggacaggcctgagggaaccgggccaacggcagagctggttgggaaaaggggagaagcagccaaggttccaaatgcaggccccagcagtgcttggcagactggcatctagttgggctcagacagatatccctgtttccgctcacctatccatctggctgtcctgtcagccatccattcaacatgcaccaagcacctccagtgtctccagagtcctgggcttcgggccagtcctggctggcctgtgagatgacaaacatgtcctgtgtctttaaggaacgtacagtctggtgggggaggtccggtgcaaacaggcgtcatagcaccccttgaggagtgctgtgacagagggagagcctaggaaacagtgtggatcacaaggaggtgattgagagctactctgcgtctggaagagtgaggaggagcctgtgtggcagaacaaaatggataaggtcgttccagccgtgcagaagtgtggaggtgtgagcctgcaggcaggtggctctggttggatcccaggtgcatgcagggctttggtgagagtgaggctgaaggaagcagctggggactcattctgactaaagaggcatggcaggaggggtctctgaaagtgtcaggctgggggccaggggctgccaccaacagaagagcaaggcaggtatcagggccccatccaatcaggtgagaattcagagcctggctccacaaggaacctgaggcagaggcacccacagcaggtgcttgggctaaatgcagctcagtggccagtgcaggcaccagttttaatacagtggggccattccagattctgagtgcagatggggctgagcagaccgccttccagctggactcgatcaggactgaccctggacggggcaggcttgcacttgtagcttcagagctccactgcaggcacagctgaccagggcagcgggtccactccttggagagctggacagccccacttttgaggtacacggccctggggataccactaatctccacgtaccaataatcaccaagttctgtcagttgtaaaatcccttgacaggattccagatttgtctcagccagcttaagccccagtgtgggcagacctccatcccaggaggatttagtcctttgtcagcagcttcttagctacacgtaagctattctgtggtactttatagtttacaggattttttgttttcttttttttttttttttgagacagagtctcgctctgtcacccaggctggagtacagtgacgcgatctcggcttactgcaagctccgcctcccaggttcacgccattctcctgcctcagcctcccaagtagctgggactacaggcacccgccaccacgcctggctaatattttgtatttttagtagagatggggtttcaccatgttagccaggatggtctcaatctcctgacctcgtgatccgcctgcctcggcctcccaaagtgctgggattacaattttacaggatgtttttaagtatgttgggttagcacattctctgccaatccgtggaggtgggcaaggaaggcagtattccattttatgcatgagaaaatagccttgggatgataagtgattcatcccacttatacacaggaagcagtgaagaaacagaatcagtgtcttctggttcccaattcatttctctgtgctgctgtgttgtttccatgtatgtatgtatgtatttatttttttgagacgttaagtcttgctctgttgcccaggctggagtgcagtggcatgatcttggcttacagcaacctctgcctcctgggttcaagctattcttctgcctcagcctcccgagtagctgagactacaggtgcgtgccaccatacctggctaatttttgtgttttttagtagagacagggtttcactgtgttagccaggatggtcttgaactcctgacctcgtgatctgcctgccttggcctcccaaagtgctgggattacaggcatgagtcaccatgcccggctttgtttgtcttatttctaaattttattgatttatttattttcacagtcatagctctggagtcttttttatcttctcccctctaacctgctcccacccgaacctttccatttcagcagatagcatcattgcaacgggctgtgccagatccagccatcacatccacctttccagccaaagggagggtggaagggcaggatgcagaaggtcaatctccccctcctcagggacatttcatggaagttgcacgcattggccagaacccggtcacatggccacagctaactgcaaaggatgctgggaagtgttgcctgtgttgcagacagccacgtgccagtcgaaaatcagaggttctttctccctccgtcttgctgctggctcgcttctccagaccacagtcattgtgcacgtgtctcctgctgctccggctgtggcctgcactcctctcatcctcttccaagctgctgtcacagcgctgtttccagagggcaaatctgattggtcactcccctgctttactccccaagggcttcctgttttcttttatttttatttttattttcattttttgagatggagtctcgctctgtcgctcaggctggagtgcagtggcacaatgtcagctcactgcaagatctgcctcctgggttcatgccattctcctgcctcagcctcccaagtagctgggactacaggcgcccgccaccacgcccagttaattttttttgtatttttagtagagacggggtttcaccatctactcttagccaggatggtctcgatctcctgaccttgtgatctgcccgcctcagcctcccaaagtgctgggattacaggagtgagccaccgcgcccggccagcttcctgttttcttaacacatcaggtgcttaatgacttaaaagggcccagtgtgatcaagtttctgcctctgtgttctcagctcatgccgccttgtgctcctggcctttgcccaggctcttgctgtggcctggaatactcccctttctttgcctgccttccttcctcttgccctcccctgacctgcaggctggattaggagtttctgctgggcatcccatggcacccgtccctgcactggggatcctgctttcctggtaggccacagaccttgtgaggggagggactgtgtctgttgggttcatgacagtgtgcccagcccccagcaggtgcctggcgtagatcaggtttgtggaacaaatgaatgtgatatattaatttagctttagagtattcattgagggctgctgtgtgccaggccctctgtgccacctgggtggagggtggaggactgttgcattgagggcagttgaaggagtgagctgggaagtgggaggtggaggatggggactgggatgcagggtttgaggttatcaggggtcccagaagcagtaatgccaaggcctaggctgtgacctggagtgagggctgcgatggggtggggtggggtcgaggctgtggaggagggtcatcagggcactgctggagccctggggttctccagggccgggggtggtcattgcagtgttctcccagctcctctcaacaccctgcggtctgtggagagcaggcctggtgcactggacttgcctctggccagggctgagtttctgccttctaaacgatcttcctcctgtgttgccctagaggcctctggactgtcctgagtacttgacgcgtgttagagtgagcatgggctgctagccttccgctccaggtggaggagtttctgttgttcttttgctgctgttgctgcagtgagctgccaggctgagcttctggatggacctgggggatggaattaggagcttctgaattcttgggttgtataacctaaggccggagagtcccacagcactgctgctgggcggagagactggaccctgctgatacagacagcgacagcagcaggagcatctgcagtttcccagcaggtcctgcatgcctgggcttggcactagtctaagtagtaactcatgttatcctcacgacagtcccacgaggtggggtcattactgacctcctattacagatgaggaaacagaggcttgcagaatttgagatcacacagctggtcagcgtagcgattattcagaccctgtcacctggctccagaacccactcgtttacctttcttacatcagggctgctttgtagtgtggcgagctgagtggagctccacccgcctgggctgatcctggcccttcctgcctgacctatggtgcgggggccctggctctccccgtgtgagcccccaggggtcacttgtaatatgcctgtgtacactatgatagcatagatacttctgttcctggtacagattaatcatttacggctggcattgacttgtaacagatgacatttgatgaaatcaaccagcctctcactggtatctcagcagaaacagggctgtacctcccaggcatcctgggaaggatgatagaagtgtgtgatctgtgcttccctaccgggagctgacttttgaggctctctggactgggactttgccataaaactgcttatcagaaacctcagataagtggagtgccctgtgtcctggccacgtactctggggccagctcctccatccattcagtcctcccacatcccatcttcaccaagcagagtggaaagcggcaggtctctgcgagaaaaggaggctctgtacccagccttcagtgagataactttagagtggggccttgtattccctacacaggccttgtccccgacacggcctctttgcccttgcttctccttctgctaagaatgctccttcccaactccttggctggacacacggctcctgctctgtgggcctgtcctgttcccactcagagcctcagcaccccccatgtggccaagacacagcccctcttgccttaggttgccgtgggtctgtttccacatctgtttcccctccagactgcagggctcctgagggacagggcctggggccaagtctcctctgcgttcctgatgcctggtggtgtgccacgctctccgtgggtgcacggtaaatatctgccgagtggctagatgtatccatggttgctgaaggccaagtgtgttgaccagagggcgtgggaaaggctccactggggtggctggggtagagatagaccttaaggggtccagaagactccaccagctggagggaaaggccctacagagacaaggtactaggaaaggcccagaggacagaggaggggccctgtggggagcctgtgggcaggaagggcctgtgctgggctttgaaactggggactcaggtactgctctagcgtgagggtccttggcattttttttggtccaggaccccctgaggtccctggggaatgagaacaggctcacacagccactttcaagaggtttgcaggtcccctgaggcttagccacagacccctcccaccccagcagagacacagcagaggcttctgagtggaggccaggtggcttcagcctggggttctagaagggagggaagagacacacccccgtgtgtcctccagagcctcagccttctccctgaatctcccctttgcctcctcactgtaacccacacctggctctccttgaaggacccgcttgccccgcagcctcctgagagttttctctcccagtccctctcccactgggcctggaggtggggtagggtcctccttgcccccagccttgaatcttctgtcaccctacaataccacttgctgtcaccccggtgataggtatctacgagcctggggtgctcccccacatcctcaaagatgtgagcccctgactcagcgttgcctctggttcctgaccctccacattcacatgaccacgcgctggcctttatcatcgccagtgacagcagctctcccgtaaatacaagtttcaagcaccccactttccagtctctgccttctgtctttccagttcattccctctagtcctccacccacacagtgcttttccccattgacagggaattgctcctggccgcttttcccagccccatcccgttcatgtgccttgctttgtacccagcatggactccatggcctgtcattgtcactccttcacctatacttcctgcctccttgcttctctctctcttcgtcatcctggcatcaccaccccagaactgcttggtttcagttctccaccatggctaggggaacatacctttttgctgactgctctcactttctttttttttttttttcttttttttttttttgacacagagtctcgctctgttgcccaggctggagtgcagtggcacactctcagctcactgcaacctccacctccggggttcaagcagttctctctgcctcagcctcctgagtagctggtattataggcacccgccaccacacccggctaatttttgtattttttttagtacagacagggttttgccatggtggccaggctggtcttgaactcctgacctcaggtgatatgcctgccttggcctcccaaagtgctgggattacaggcatgaaccaccctgcccggccctattgctctcactttgaaatcacgacatgagccacagtgagcctatgatgtggtttgacgtctttctgcatttctctgttcacccctctcccagaaggcatgcctccttccctcccctcagcctgcagccccttcccctccacgcttactctcagctgatagccctgctgctgtctcgctgagaaaatagaaatagccagaggagaattccctctaccccatgcacacacctctgtccccgcctactccacattccctgttgtcagcaccgatgtgtttagctgagggtggtccccccattcaaggccatcatctcctgtcatctacttcttgacaccatttgaacaattatctcccctctttcctacataacactttccccttttctactatatattttttgctatggattgaaagtatccccccgaaatcatatgttgaagccccaatccctcgtgtgatggtattaggaggtagagcactatgggggtgattaggtcatgaggatggagccctcatgaatgggattagtgcccttagacgaagaggcaagaaagagatgatctgtctctgccatgtgagggcacaacgagaagatagccatctgcaaaccaggaagtgaaccctcatcaggaactctatcagccagcaccttgatcatagacttcctagcctctagaactgtgagaaataaaggttgtttaagcctcccagtctgtagttttctgttataatgtcctgacctaagttattttccatcgctatacaatgggttatttttttctttaaaaaaaaattatttcttgactctactttttcctccagagactgcttatattccactgtcttcattcttctcctcctgttttctctctttaaacttttcaaaaatagcaaaatataacacatatagagaaaatgatatacagctcagtgatttatcacaaacacctgtgtaaccaccactcgaatctagagataggacattacagcaccccagaagccctccttttgtcccctcttcccaaagaagggtaaccaataacttgccttttatgataaaggctttttttttttgagatggagtctcactgtgttgcccaggttggagtgcggtggcgcaatctctgcttactgcaagctctgcctcctgggttcacgccattctcctgcctcagcctcctgagtagctgggactacaggtgcccgccaccacgcccggctaattttttgtattttagtagagacgaggtttcaccgtgttagccaggatggtcttgatctcctgacctcgtgatccacctgcctcagcctcccaaagtgctgggattacaggcgtgagccaccgcccccggccaagataaaggcttttctatctggcttctttgttagcattttgttggcgagattgatacgttttgtgtgcagctgtctgtcattttcattgcaatagaattccattgtctactatatcacagttactcattctactactgatgaaaatttgggttatttctagtttttttggtgcatacatgcatacatttctggtagacatacctagaagtgaactggctgcattatgggccataacttgtcttcaacgttagtaaataataccgcccgtctgttttccaagcagcagtaaatggcactttctgttacttcatatcttctgttacttggtactgtcaggttttaaaattttagtcattctgtcgggtgtctagtagtatgttattgtggttttattttgcatttgcctgattgcaaatgaagttgagcactttttgatacagtgattaaccatttggatatcctcttcagtgaagtatcagctcaattctcttgactatttaaaaaataaagttgtttatctttttcttacagagttttaggaggagttttttggtacatgtgcagtccaaatacacaccttttgtcagtgatacgtgttcagctgcacacacggtgttttgcctttttattcttttaatggtatctattgataaacatgagttcttagttttaatgaagtcaaatttgttcatcttctttacggtgtactttttgtgtcttgtttaaggaagtccttctctatcttaaagctttgagaagcattccttctttctcctattttctaaaaattgttgaagatctccttccttccttccttccttccttccttccttcctttcatctatctctctctcacccaggccaaacttcagtggcatgatcatggctcactgcagcctcaacttcccaggctcaagtgatcctcctgcctcagcctcctgagtagccaggactacaggcacgcaccaccatacctggctaattttaaaaattttttgtagagacacggtctcatcaagttacccaggctggtcttgaactcctgggctcaaacaatcctcccacctcagcctcccaaagtgctgggattacaggcatgagtcacatgtctagcctgtattctttctttcttaaatgtttggaagaattcatgggtaaaaccatgtgaccctggagtttatttgtgggaagcttttaaaacatggattcgatttctttaacaaatataggactatgagattttcatctcatgtcggtttgggtatgttgtgttttcaaggaatttttctattttatcgaagttgtcaaatttgtctgcaggtccccttatttcctttttaatgtatggaggatctgaagggatggtactttgtgttgtctctatttcttgtttggttttgctagtgatttgccaatttaaaaaatctttccaaagaaccaacttttggctttgtttattttttgaaaacctgagtagctgggattacaggcgcccaccaccacacccggctaatttttttatttttagtagaggtggggtttcaccatattggccaggctggtctcgaactcctgacctcagatgatccacccgcctcggcctcccaaagtgctgggattacaagtgtgagccagtgtgcctggcaagccgctttttaaatggcaccaatcccattcatgagggcagagccctgatgatcgaattacctcctaatggccccatttcttaatactatcacactgagaattaagttttaacataagaattttaggaagacacaaacattcagaccatggaacatatataaaacagttgtcctaccaactaacagaatacacattcttttcaagaacacctatataaaaattatagacactgacctatgctggccataaagcaaatatgaacaaatttcagatacctgaagagatttagactatgttctccaactacagtgcaattaagctagaaatcaatagcaaaaatgtaactataaatgagcccgtatgtttgaattttaagcaagatatatgtaaattatctatggttcaaaaaagaagtcacagtgaaatttagaaaatatcttgacgtggcgggttgcagtggctcacgcctgtaatcccagcactgtgggaggccaaggcgggtggatcacctgaggtaaggagtttgagaccagcctggccaacatggtgaaaccctgtctctactaaaaatacaaaacattagccaggcgtggtggtgggcacctgtggtcacagctacttgggaggctgaagcgggagaatcacttgaacccgggaggcagaggttgcagtgagccgagattgcaccactgcactccagcctgggcaacatgagtgaaacttcatctcaaaaaaaaaaaaaaaagaaaagaaaaagaaaatatcttgacccaatgatgatgcaaatactacgtatcaaacttgtaggatgaacttccacttctggccatgacagaggagcctgtatcagactagccttcctatttatatatttatttttgagatggggtgtcgctctgttgcccaggctggagtgcggtggtgcaatctcagctcactgcaacctccacctcctgagttcaagtaattctcctgtcccagccttccaagtagctggaattacaggcgcccaccaccacacccagctagttttttatatttttagtagagacggggtttcaccatgttggccaggctggtctcgacacctgacctcaggtgatccacctgcccctgcctcccaaagtgccgggattacaggtgtgagccactgcgcctggccgtgagtgacctttttaatgtgttgttgaatttgatttgctggtattttgttgagaagttttgcatcaatatccatcagggatactggcctgtagttttctttttttatatgtctttgtctggttttggtgtcagggcaatactggcctcatagaatgagtttggaagttttctctcctctgtttttcataatagtttgagtagggttggtattagtttttgtttaaatgtttggtaaaattaagcagtgaagccactgggtcccaggcttttctttgctgggagacttttcattacagctttgatctcattacttgttattggtctatttaggttttggatttcttcacggttccatcttggtaggttgtgtatgcctaggaatttatccatttcttctagggttttcaatttattggcatataattgttcacagtaacctctaataatcctttgagtttctgtgatattggttgtaatatctcttttgtcatttctgatttttttgtttgggttttctctctttttttgttagtctagttaaagatttattgattttgtttatcttttcaaaaaactttattttgttgatcttttgtattgttttgtttcaatttcatttatttctgctatgatctttattatttcttttcttctactaattttgggtttggtttgctcttttctagttctttaagagacatcattagattattttgaagtttttctacttacttgatgtaggtgcttataggtacaactttcctcttagtacttctttccctgtatctcacaggttttgatatgttgtgtttccattatcatttgtttcaggatgtttttaaatttccttcttaatttcttcattgaccattcaagagcatattatttcatttccatgtgttcgtatggtgtgcaaaataccttgtttttgatttgtagttttatttcattgtgatcacagaagatacttgatatgatttcaaatttaaaaagtaatttggctgggagaagtggctcatgcttgtaatcccagcgctttgggaggccgaggcaggcagatcacgaggtcaggagatcgagaccatcctggctaacacagtgaaaccccgtctctactaaaaatacaaaaaattagccaggcatggtggcaggtgcctgtagtcccagctactcaggaggctgaggcaggagaatggtgtgaacccgggaggcagagctggtagtgagccgagatcgcgccgctgcactccagcctgggtgacagagcaagactctgtctcaaaaaaaaaataataacaataataataatttaagacttgttttgtggcctaccatatggtctatccttgagaatgatccatatgctgaggagaagaatgtgtattctgcagccgttggatgaaatgttctgtaaatatctaataggttcatctgatctatactgcagactaaggctggtgtttctttgttgattttctgtctggatgaactgtctaatgctgaaagtggagtattgaagtctccagctattattgtattgaggtctatctctctctttagctctaagaatacttcctttatatatctgggtgttccagtgttgagtgcatatgtatttaaaattgttacattatcttgctgaattgacccttttatataatgaccttctttgtctctttttatagtttttgtcttgaagtctgttttgcctcatagaatagcatagctattcctgctcttatttggtttccatttgcatggaatatctttctccatccctttagtttcagtctatgtgtgtctttacaggtaaagtgtgtttcatgtaggcaacagatcactgggtcttgtttttctatccgttctgccactctgtgtcttttgattggagagtttagtccatttatgttcaatgttattactgacaagtaaggacttactcctgccactttattaattattttcttgttgctttgtgatcttctttctttccttcctgttctccttttagtgaaggtgattttctctggtggtatgttttaatttcttgctttttatttttttgtgtgtatctgctgtatgttttttgatttgaggttaacatgaggcttgcaaataatatcttataacctaatattttaaactgatgacaccttaacactgattgcataaacagacaaacaagcaaagagaaaactaataaaaactctacattttaactttgtccccccactttttaacttattgtactgtttatgtctgaaaagttgtagttattatttttgattggttcctcttttagtctttctactcaagatatgagtggtctacatatgacagtgttataatattctatatgtttctgtgtacttgctattaccattaagttctgtactttcaagtgatttcttattgctcattaatgtccttttctttcagattgaaaaactccctttagcatttagcagtatgtgaactgcatttttcaagtccagaatttctgcttgattcttttttttttttttgagatggagtcttgctctgtcgcccaggctggagtgcagtggcgcgatttccgctcactgcaagctctgcctcccgggttcacaccattcttctgcctcagcctcccgagtagctgggattacaggcgcccgccaccacgcctggctaattttttgtatttttagtagagatgggatttcaccatgttagccaggatagtctcgatctcctgaccttgtgatccgcctgccttggccttccgaagtgctgggattacaggcgtgagccactgtgcccagcctgcttgattcttttaaattatttcaatctctttgctaagtttatctgttaggattctgaattccttctctgtgttagcttgaatttcactgagttccctcaaaacagctattttgaattctctgtctgaaaggtcacatatctctgtctctccagaattggccactggtaccttaattagttcatttggtgaggtcatgttttcctgtatggtcttgatgcttgtgatgttcgtcagtgtctgggcattgaagttaggtatttattgtagtctttgcagtctgggcttgtttgtatctgttcttcttaggaagactttccaggtaataaaagggacttgggtattgtgatctaagtttttggtcactgcagccatatctgcattagggggcaccccaagcctactaatactatggctcttgcagactcgtaaaggtaccacttgggtggtcttggataagatctggaagaattctctggattaccaggcagaggctcttgttctcttcccttactttctcccctaaaagtggagtctctctctctgtgctgggccgcctggagctaggagaggggtgacacaggcacctctgtggccactatcactaggactatgctggctcagacctgaagccagcacagcactgggtctcacccaaggcctacagtctccactgcctggctactgcctacgtttgcttaaggcactagggctctacagtcagcaggtggtgaagccagtgagattatgtccttcccttcaaggcagcaagttccccctacccccatcctgggaaggtccttagatgccatctgggaggcagggcctgcagtcagaaaccttagtaatctccccagtgctctattctattacagcctggctgatacccaagccataaggcaaagtccttcctgctcttccctcccctttccacaagcagagaagtctctctccatggccaccactgccccagccctgtggcagtgctgccaggccactgccaacgttcattcagggcctaagggctcttgaagcaactgaacactgccaggcctgggactctccctttagggtagtgggctcccctctgacccagggcaggtccagaactgccaccccacagccaacacttagaatctgggaccccaagagccctcttggtgctctgccacactgtagctgagctggtacctaggctgatttttgctttttatgaaggtacttttttgtgtgtatagttcaatttggttttcctccagggaggacaattggtggaggtttctatttgggcatcttttttttttttttttgagacggagttttgctctttcacccaggctggagtgcagtggcgcgatctcggctcactgcaacctctgcctcctgggttcaagcgattctccagcctcagcctccccagtagctgggattacaggtgcctgccaccatgcttggctactttttttttcaattaaaaagtaaactttaatgtcgaaaatgcaaacttggggaaggcagaaagatcacacacaaggctgtcgcttcacacttggaaggttgcacggcggccaggagaggcactcctcacttcccagacagggcgggggccgggcagaggcgctcctcacttgccagacggggcggcggccacatgcctggctaatttttgtatttttagtagggacggggattctccgtgttggccaggctggtctcaaactcctgacttcaggtgatccacgcacctcggcctcccaaagtgctgggattacaggcatgagccaccgcgcccagccctatttggccatcttgctttgcctccaccttcatttgataacagaacacccccatgtaaccaccaccacaatcaagatataagacatttctgttattctccaaatttccttcaccctcctttatagtccatggcacccaccccatccctgggcaacacctatgtgcttcctttttttttttccccgcaggaggacgtcttcctatacctatgtgcattccatcactgctgcttttaatcatatagcgtgtagtcttatgagtctgactttttcacttagcataatgcttttgcaatttgtgattgagcgttttcatatgattctgttttttctgtctcttagcttggaagttatacactttttagtagtaactgttgggagatcgttctccaagagtctctctcatatttccatacatcctgctagcagagacattgactacctgtttttgtctgtttagtgttgctataaaggaatacctaagtctgagtattatacatagaaaagaggttttatttgtctcatggctcctcaggccatacaagaaacatggtgccagcatcttaccagtgtcacatggcaagaaaggaagtgaggaagagaaaataagttgttaactggttgttaaaaagtgccaggcacgggccaggcacagtggctcgtgcctgtaatcccagcactttgggtggccaaggcgagtggatcacctgaggtcgggagttttgagaccagcctgaccaacatggagaaaccctgtctctactaaaaaaaatacaaaaaaattagctgggcatggtggtgcatgcctgtaatcctagctactcgggaggctgaggcaggagaatttcttgaatccaggaggtggaggttgcagtgagccaagatcacctgggcgacaagagcgaaactctgtctcaaagaaaaaaaaagtgccaggctctttttaacaaccagttcttacaggaactaatagagtgaaaactcactcacccccaccccacagggagggcattcattcatgagggatccacccctatgacccaaacacctcccattagccccccacctccaacattggaatcaaaatttaacatgaggtttggggggcagaaatccaaattatagcactacctttgttccaggctaccttcaaaggatgtttatacagcaaacagccttggaaaatagagttagggtctccttgtagagcacagggtaagtttgcttacttttcagcataatcaagattgtgtcttcttctggagcaaaactttgacaacaacaagcggggcaaagtctgaaaccttttgcacatcttgacagaaccttagagattacgagatttatctctgccttactcaaggtccattagtatcttccagaacaataagttggtcttagaatcctttagctatgtattcccttccaggcttcgatgctgtgtgctgttgttttatttagtttttattttaaacccaacaagacgctataccatcaatacttatttagatccccccacatatttaacttgccatggtgcttcattctttcatgcctctttaagcatccatctaggatcgtgttcattccacatgaagagaaagcttttggcccagcacgatggctcacacctgtaatcccagcactttgggaagcctaggcgggaggatcgcttgagcccaggatttccagaccagcctgggctacgtggcaaaaccctgtctctactgaaaatacaaaaaattagccaggtgtggtggttcacgtccctgctactcgggaggctgaggtgggaggattacttaaacctgggaggttgaggctgcagtgagcgttgattgcaccactgcactccagcgtgggtgacaggagtgagaccatgtctccaaaaaaaaaaaagaaggaaagaaaaagcttttgtatttcctttcgtgtaggtctgctaatgacaaagtctctgggttttttgtttgactagagaaatgttttaattttaaccttattcttgaaggttttgtttttgttttcattttgttttgtgtgctaagtacagaattctcattggcatttatttatttagagacagagtcttgctctgtggcccaggctagagtacagtggcacgatctccgcctcccaggttcaagcgattctcctccctcaacctcctgagtagctggggctacaggcatgcaccactacacctgactaatttttgtatttttagtagagacggggtttcaccgtgttgcccaggctgatctcaaactcctgagctcaagtgatttgcctgccttggcctcccaaagtgctgggattataggcatgagccgccgtgcctggccagcatttattttcttttcagctctttaaggaagtcattccattatctctgggttccattgttgagaagccagctgtcattctaatggttgccctttgaagataacttttttccctctgctattttaaatatttcctccttgtattttattttcaacaggtgtaatgtggcacatatatcagcaattgttatgttacatacaatacatattgtgcaacatatgtatcattatcagttattgctgtgtaacaaactactccagaacacagtggcttataaaaggaatcatttatttagtccttaaatctgcaatttgagcagagctcagtgggaaagcctcagctttactttatatggcaccatataaggtaactcgcaactggcaagttggtgctggctgttggctggtagttcattcagggctcagggcccaggaccaagagtcgtcaccatggcttgcttcagcctccttgaggcatgatggctgggtcccaagagaagagaaatagaaacttccagtctcttaaggcattggtctggaagctgggacggcatcacttttgccatattctgttggtaacgcagttacatcgccagattaaagggtaaagagatacaaattcccactgctcagtgcaaggaatatcagtgattttagggggccctgttttaaaacccctacaaggtgctaagcgtggatttctggggctttcttgttttttgtttttttctatgtgtttttttttttttttttggtggtggggtcagggagggcttatagggtatgttaaatcagcagaataattttatttatttatttggagatggagtttcactcttttgcctaagctggagtgaagtagcgtgatcagagatggagtttcactcttttgcctaagctggagtgaagtagcgtgatctcggctcactgcaacctccgccccgctggttcaagcaattcccctgccttagcctcccaagtagctgggattataggcacccaccgccacgcccggctaatttttatatttttagtagacatggggtttcgccatggctagtctggaattcctgacctcaggtgatccacccaccttggcctcccaaagtggtgggattacaggtatgagccactgtgcctgacctataatgttttttaaaaatcagttttggaaagtttgcagacattaacttttcaaatgtagcttccatttgattctttttctactctgcctctgatcctccacttatgtatgtatgctagatcttttattagatagtctgtgtctcttatgtactctactatattttgtattcttctgtctctccatgctttattctgtttactctttcctgattatattttttaattttgtaatttccatttgatgcttttttgatcattcaaaactcttcaccaaaattctaaatttccttttttaacctctcgaatgttatcacagttactttaaagtctattttggataacttaaatatttacagtcccctcacagatatgtttcttttgtatattgtttctgttggttttctttcatgtcttatctccacatatgcctggtgagttttgattatgtgttggtcattgtatttgcaagtatgctcgtagaaataatctggaatggccgggcgcagtggctcatgcctgtaatcccagcactttgggaggctgaggcaggtggatcacgagatcaggagatcaagaccatcctggctaacatggtgaaaccccatctctactaaaaatacaaaaaattagctgagcatggtggcacgttcctgtaatccctgctactcgggaggctgaggcaggagaatcacttgaaccaggaggcagaggttgcagtgagccgagatcacgccactgcactccagcctgggtgacagagcgagactccgtctcaaaaaaaaaaaaaaaaaaaaaaaaagaaataatctagagcctagtttgatgtttccttacaaagaatgaatttatttttgcttctcccattgcaactaggataacctcagtctagtttctggaactgaaatcacttgaggctgaactgtggtctctgtgagagcgtgtctgtgtatggctcacccttattcctaggctacgtagttctttaggaccctaacccaaagtaagagatgttcatcagggctctcctcttggcagacgcctgggctccagtccctgtgtcctgagccccatgaggctgttactggtgctgctcgtctgcccatcctctccagtaacagccacctgaacactgcaattcctgggtttccatcattccttccagcctggtgagtcatcagtgtcttttgaggtatccagtgcctgccagcagatgttttttaataatttgtccagcatttctggctgtcctcagtaggtggtctgtttcacattccctagtctgctgttaatggaaagtggaagttctgagagagaatcatcgttcccgtcagcattcaaatgcctgattacactttccccattcgctatcctttcctttatttgctcctcaccacagcaaaactcctcaaaaatatctatctttgcaatcttcagattctcacattgtgtccttaaacccactttaatcaggccttggttccctccattccactaaaagtaatgttgtcaaggtcgtgcatgcctccgtgatgctaattccagtgatgagttttcagttgtcattctctgacatatcggcaacacttgatgtggagtaccctgatgttgagaggctggtgagatgaaggaaaaacccagccaagggcaatgaggaatggcttccttccgcctcctccttccctatctttgttgtggtttttgttgtttctgtaacactgattacgttatagtttatttaatgtacttccttattctatgtttttactttagtcattttgttgatctcctccataataacataggctcgggccaagcacagtggctcacgcctgtaatcccagcactttgggagaccaagatgggtggatcacttgaggtgaggagttcgagaccagcctggccaacatggcgaaaccctgtgcctactaaaaatacaaaaattagctgggcgtggtagcaagcgcctgtaatcccagctactagggaggctgaagcaggagaattgcaggagaatcacttgaacccagggggcagaggttgcagtgagctgagatcgcgccactgcactccagcctgggtaacagagtgagactctgtctcaaaaaaaaaaaaaaaaaaaaggcttcaggagggcagagcattttatgcaattgttcattaattgacccctccatttggcacagatcacatgcccagtagttaactgttaatcaacgcactctctgtggaacaacaggctggtcccgttgagccaacactctctgggcactgccttcactagactctggctggctgctgcgcttgtagaggtatgcaagacaaaaccttttggtatgttaaaagccctggtcagaactttaagtaaccatcactgacatataatggttatggttttgaaagtgcttttatagtggtttttcatctgtcctcacagcacctctgggaggtaggtaggacaggtacagttagtctcatgtttcaaatggggctcagagagggaaaaggatttcccaagatcacacagcaccttagtagcaaaacttggactcaacctcaacacttaaaaatgaacaaagctggccgggcgcagtggctcatgcctgtaatcctagcactttgggaggcccaggcaggcaggtcacctgaggccaggagtttaagatcagcctggccaacatgacaaaactctgtctcttctaaaaatacaaaaaattagccgggcatggtggcgggtgcctgtaatcccagctactcaggaggctgaggcaggagaatcacttgaacctgggagatggaggctgcagtgagccgagatcgtgccattgtactccagcctgggcaacaagaatgaaactccatctcaaaaaaaaaaaaaagaaaagaaaagaaaaagaaaagtttccctttttttaaatatctcattttaatgactgcataatagtttattacatagttataccataatttatataatattttgttgctgtacatttaggttaaacaatacttacttagttcctactatgaagaggggccaagtactcgaggctggagctctcacatgtggcaatgaaattagaaagtggatatggcagggctgtggtaaaataaaatataaaaataataaatgatattaccaaagaaaaggaaagtttttcaaaataaaggaaaatctagacaagcatagtggctcacacctgtaatcccagtacttttggaggctgaggcaggaggaacacttgaggccaggagttcaagaccagcctgggcaacatagcaagaccccctgtcaacaaaaataaaaaaaaattaggccaggcacagtggctcacggtggctagtgcctgaaatcctagcactttgagaggctgaggggggtggattgcctgagctcaggagttcgagaccagcctgggcaacatggccaaaccccatctctactaaaaacacaaaaaattagccaggtgtggcagcacacgcctttaatcccagctactctggagactgaggtaggagaattgcttgaacccgggaggtgaaggtcgcagtgaggtgagattacaacactgcactccagcctgggtgacaaaatgagactctatctcaaaaaaaaaaaaaattagctgggcatggtggtgcatgcctgtaatcccagctactcaggaactaaggtaggaggatcccttcagcccaggaattcgaagatgcagtgagtcatgatcacaccaccgcaccccagcctgggttacagagcaagaccttgtctctaaaaaacaaagaaagtctaacctaaacgccattatgtcatttacatgtgtataggggtgtgtgtgtgtgtgtgtgtgtgtgtgtgtgtgtgtgtgtgtgtgtgtgtttgcttgggaggggagtcgggctggagctggccaggccgcagcctggggaccttctgattccagcagggatgtgggccgagggtcccgccttactcatttcgggtcttgctcctctgtcctggctctacagactcttccagctggagttggaggctgacgccctagtgaatttccatcagtattcttcccagctgctacccttctatgagagctcccctcaggtcctgcacactgaggtcctgcagcacctgaccgacctcatccgtaaccaccccagctggtcagtggcccacctggctgtggagctagggatccgcgagtgcttccatcacagccgtatcatcaggtgagcaagggaacaagaccatttggacaacgtgtgtgtacctgcttgtgtgggcagtgggggccgcaggcctcggttcccctccatagtttgacttaaaaaggagcagggcctggcatggtcgctcactaacgcagtcccagcactttgggaggctgaggagggaggatcacttgagactaggagttcaagaccagcctggcaaaatagcaagaccttgtctctacgaaaaaattaaaaaattagcatgtgtctatactcctagctacttgggatgctgaggcaggaggattgcttgagcccaggagttagagtttacagtgagctatgattgcaccactgcacttcagcctgggtgacagaatgagaccttgtctctaggaaaaaaaaaaaaaaaaaaaaaaaggtgctgcgttgctaccagattaaaatgtaagaaggacaatgtaatgtttccagagtccggagtgctcaccaggtgccaggtctgtgggagctgatttctacccaccatgaaattgaattttcccaacccccacaaggtatcgtcattttattttactttattttattttattttattttattttattttattttattttatgttacgttatgttattttattttgagacggagtcttattctgtcacccaggctggagtgcagtggcgcgatcttggctcactgcaccctctgcctcctgggttcaggtgattctcctgcctcagcctccggaatagctgggattacagtaatgtgccatcatgcccgggtaattttttttttttttttttttttttttgagacggagtctcgctctgtcgcccaggctggagtgcagtggcgcgatctcggctcactgcaagctccgcctcccgggttcacgccattctcctgcctcagcctcccgcgtagctgggactacaggcgcccgccaccacgcccggctaatttttttgtgttttttagtagagacggggtttcaccatgttggccaggttggtctcgaactcctaacctcaggtgatctgccctccttggcctcccaaagtgccgggattacaggcgtgagccaccatgcccggcccaggtatcatcattctagagagagctaacaggacttgtgcaggtcactcagccagagagggtgaaagaggggcttggatccttggtgtctgcccaggctgctcttctggaagctgaaggcctccttttgtgaatccattcagccagcagatggagcagctgttgcccctggtgagggcactgtccccacccttgcacagggcaccagttggccatcttgtgcagaggtagccacacctcctctgagtctctatcctagatagctcagttaagctcccaggcccagaactcaaaacctcactgctggccgggcgtggtggctcacacctgtaatcccagcactttgtgaggccgaggcgggtgtatcacttgaggtcaggagtttgagaccagcctggccaacgtggtgaaaccccgtctctactaaaaatacaaaaaattagcaaggcgtggtggcgcacgcctgtaatcccagctactcgggaggctgaggcaggagaattgcttgaacccagaggcggaggttgcagtgagccgagattgtgtcactgcattacagcctgggcaacaagagtgaaactccacctcaaaaaaacaaaacaaaacaaaaaccctcactgcactttagtttccaggcgtgcttttggacagcactgtctcatctcaccatcactctgtccatttcctggggcaggcacagcagcttgtgtcgataaggatattgacgcccagaaaggttaagtgaattgcctgaggctagtgagatatccgtgttctgtgaccctttcctgtgccaccaccctgcccacttcctgctggtgtggccctggggcccatctcttgtacgagtgagcaaactgaacagaaacctgatacaggtcacatcagatataattacattcaaatcagcccaactagctgagtggcgggaatgctcttgagctcaaataaaccagaaagtccgagtttccgagtgcacttccctgcatgtgcacttaggtccccctgccaccttgtaccacacctgctcacctctgctcaccctggccctctcctgcagctgtgccaattgcgcggagaacgaggagggctgcacacccctgcacctggcctgccgcaagggtgatggggagatcctggtggagctggtgcagtactgccacactcagatggatgtcaccgactacaagggagagaccgtcttccattatgctgtccagggtgacaattctcaggtgctgcaggtgagcagggggaggggcagggtgactggtactgatacctcccggtgtccacggttccctttgggcccctaggctcaggtgtcactctcaggcctctcactgtcccccattggtccttgaggcctgagctccttcatggagggtgcagacccctccctggctcttccctcccagcccttttccaggagccacgtcctcagtctctttgcttgataaacctggggacggcctccaacccagcaaaataaaccccaaaaaaggcccagctccagtcagttagttcagttccacttttcctgagcacaaactgtgagccagatgcctgcctggaggggctcgtgggccagcgggacctgggcttaaccttttgcaagcttgtccaatctgtggccctgcaggctgcatgcagcccaggacggctttgaatgtggcccaacacaaattcacaaactttcttaaaacattatgagatccatgcatggaccttttttttagatcagctgttgttagcgttcatgtattttatgtgtgacccaagacaattcttctgatgtggcccagggaggccaaaatattggacaaccctattttacaggaattcaaaccaagcaaaccaaactgtctccagttcctgtaggcatttgtgccagaggccctcctgttaacgtttttgattacctgggcaaaagatgtgattttttaattgtgggcaagcagatggggtgatactattaaatagctatttcatatattagattgaacagaaaaggcaggatgttggattatgttttattgtctagaattagaaaattcttctaaagatcatgttctctctgccttggcatcagaatgcaactacgttataccagaaaatgtggattcctttttttttttttttttttttttttttgagacagagtttccctatgtctcccaggctagagtgcagtggtgcgatctcggctcactgcaacctccacctcctgggttgaagtgatgctcgtgcctcagcttcctgagtagctgggattacaggcatgtgccaccatgcctgggtagtttccgtatttttagtagggatggggttttgccatgttgcccaggctggtctccaactcctggccttaagtgatccacctgcctcagcctcccaaaatgccgggattacaggtgtgagccactgtgcccggcccagaaaatgtggattcatatcttatgcttcttgctctcagggaagggaattctccacccactgttgaactccactttcaccgagaatcctctgcgcacccagcatggtgccgcgcagaccctgcctccatgcgggggtgtgcacacccgcttctcgatagtcatgcacgactgcagctgtcctttatccggtgctgattggtgcctgaccttgaactgagtgttgtatgtgttccagttaattcttagaatacactcatggggtggaggtcattattcccctttcctctccgaagaaactgaggttcagtgttgttaattaagaagcgtgcccagggagggccacaaagctgagagagtggggcttgaccttacattggcctcgatgccagccctttgctcttcctgctgtgtctctggcctgccttcaggtccagtgggactgctgtgaggtgaccctggtgtcacatgggtacactgtggttgtaatgaacctcatggggacagcactgagccaaaagtgagacagtaaaaccctcctagcactttcttttttttgagacagcatctagctctgtcgcccaggctggagtgcagtggtgtgattgtggctcactgcagcctcaacctcctggactcaggtgatcctcccacctcagcctcctgagcagctgggactacaggctcgtgccaccacatgggctaattttttttttttttgagacggagtcttgctctgtcgcccaggctggagtgcagtggcgcgatcttggctcactgcaagctctgcctcccgggttcatgccatcctcctgcctcagcctccagagtagctgggactacaggcgcccgccaccacacccggctaattttttttgtatttttagtagagacagggtttcaccgtgttcgccaggatggtcttggtctcctgaccttgtgatccgcctgcctcggcctcccaaagtgctgggattacaggcgtgagccaccacacccaggccacgccagctaatttttaaaatttttttggtaaagatggggtctccctatgttgccgaggctggtatcacactcttggtctcaagtgatcctctcacctcccagtgtgttggaattacaagcatgagccactgcgcctggcccctggctctctttttaatactgctgttctttcattgaaaacatagtacctgcatgtagaaaaaaatcagtcaggacagaatgaaaagcaagaatcattcccacctggacccccagtgcccatcctgagatacagctaccttttaagttccttgactcagaaatgtttcatgtgagccacagtcatgccaggtcgaccccttccctcccatccacactggcacttggctttcctggtgcttctctttacgttctttttttttagacagagtttttgctctattgcccaggctagagtgcaatgatgcaatctcagctcactgcaacctctgcctcctgggttcaagcgattctctttcctcaggttcctgagtagctgggattacaggtgcctgccaccatgcccggctaatttttgtatcgttagaagagacgacatttcaccatgttggccaggctggtctcaaactcttgacctcaggtgatccacccaccttggcctcccaaagtgctaggattacaggcatgagccactgcgcccggcctctttacgttcttatcagcatcctatggagtcaaacttcccttcctctttcatcagctccttggaaggaacgcagtggctggcctgaaccaggtgaataaccaagggctgaccccgctgcacctggcctgccagctggggaagcaggagatggtccgcgtgctgctgctgtgcaatgctcggtgcaacatcatgggccccaacggctaccccatccactcggccatgaagttctctcagaaggggtaagacctcctcccctccccatctgctggcctgctgggctccagctctcctgtcacctgtcccgtgcctgaggcaagcagtatccaccatagatcttagcatctccagcctcagagcagaggccccgggttcacaagcctcattaggccccgcctggcccaaagaaggtgctccatcattgtatcatgggtaggaatctcggttcacaagttcagctgtgcaaggaggagactttaaaatttttctggctgggcgcggtgtctcacgcctgtaatcccaacactttgggaggctgaggtgggcagatcacctgaggtcgggagttcgagaccagcctgaccaacatgaagaaaccccatctctactaaaaaatacaaaattagctgggcgtggtgacacatgcctgtaatcccagctacttggaaggctgaggcaggagaatcggttgaacccgggaggcggaggttgcagtgagccgagatcgcaccgttgcactccagcctgggcaataagagcgaaactgtctcaaaaaataaataaataaataaataaataaataaataaaaataaatttatttaatgtaccttaattcctaggagtgaatctccctctataaaactggagacaaccaatcttagccctctttggggtctcctctttccagctcccctccaggtggtgctccagttctggagtctgatgcaaccccaaggcccacctggcccctcctctaacccagcccagcctgatctgaacagccccccgatggcttcagtgctccttggtttcttgtgtgcccagctcaaagcctgggaaatgcttggtaaggtggccgagtgcccgtccacctagatgcctctttcctttctggctggtggcacgttgggaggcaggtacaggctcatgttttgggagcctgggaacccctggtgtcaggaaaattgtcttcaaaggggtaggggatgagataaaaagataaatgaatatctcaaatctcaaaatactatctaggccaggcgcggtggctcacacctgtaatcccagcagtttgggaggccaaggtgggtggatcacctgaagtcaggagttcgagaccagcctgaccaatatggtgaaaccctgtctctactaaaaatacaaaaattagccaggtgtggtggtgtgtgcctgtagtcccagctactcaggaggctgagacaggagaattgtttgaaactgggaggcagaggttgcagtgatttgagattgtgccacagcactccagccagggcgacagaacaagactccatctcaagaaaaaaaatactatctaacaggaacaacatctagaatgaatgaatgagccaatgagtccttcgatcctggcactgtgctaaagcaccagcctcaccgaaatgaataagccactccaggacaggagacaccccagccacccagaatctcatagcgcagtgccagacaagcagtgagaaggcatggacgggcagcactcaggcagggaggctggcacttgtgcctgtcctcaggttgttccttcctctgggagctgcatccaccttgctagccccatggggcattgctagcccttctaagggctggaccaagcctggacaaaccctcctttccttgaatctcccaagcacagccagaatgagctagagctttcagaaatacttgaccaaacagagaagataccaacacccccagccccgcagtcaggttccccatttgcaggttgtgacctgagtggacaccaggtgatgctcttctctacccagagggctggcacatggccccactcttgcttgtctccagccaccctgagctgtactgggcaggagctgtaattgaccagttttctctctcttcaaacaacctcagccctcaccggtccctctgtccccacacaggccatcctgggtgggtccagcgtcccatcacataagaggatctttgcacagaagacaaaggaagaggctcctaccttgagtggagcagggagatcccttatcgacttggcagccagcacagccctactccaagaatcccacggcctcagtgttactgacaagtggttccctcacagctcagactaggagctccctcgctgtttttctttttcttttcttttctttgttttgtttttgagacagagtttcactctgtcacccaggctggagtgcaatggcatgatcttggctcactgcaacctctgcctcccaggttcaactgattctcctgcctcagcctcccaaggagctgggattacaggtgtgcgccactatgcccagctaatttttgtatttttagtagagatggggtttcatcatgttgaccaggctagtcttgaactcctgacctcaggtgatctacttgcctcgccctcccaacatgctgggattacaggcgtgagccaccgcgcctggccacctctgctgtttttcaatgcagctgacctttcccacaaagctcggtttgtgcctgcggttctcagatggttaagcccctgctgaggaagggaaacagataatcccagacagtgagatggaggctgagactgaggatgcctgggggctgcactaggagctcagagacggcatcaggcagctggagttcagggaaggtttgggggcagcagagcccgagccaagccatggacactagccggagctggccactcgggtgaagacttggggggctccagagggcccagggaaagaagctgggcctgactccatgtgcctagtgctgagcaccaagcgctggcataagggctgtagggagctgggcagcataaatcctgggcctgtgctgggcacccctaataatagagaacagcagctgaacactaacgctgtcccagccaccggcttagccttcatgtgggctatttcactatagcccagagagctgatgtattttattccccctctaaagctgagggccaagtgtggtggctcatgcctctaatcccagcactttgggaggctgaggcaggaggatcgcttgagcctaggagtttgaggctacagtgagctatgatcatgccattgccctccagcctgggtgacaaagggaaatcctgtctcaaacaaacaaacaaaaaacagatgaggaaaccagggcttagagagattaagtaatttgctcaaagtcaggcagtcagtaagtgccagacctgggaattaaacccatgtgggctgtcctagtaattgcactaaaaaaaaaaaaaaaaaaaagctttattgagatatagttcctattccatacaatccacctattgaaagtatacaatgattctgatatattatgtttattttttccaactgtgatagattatatataacataaaatttgccattttaaccacttttgttttttgtttttgagacagagtttcgctctcgttgctcaggctggagtgcaatggtgtgatctcggcttaccgttacctccacctcccgggttcaagtgattctcctgcctcagcctcccgagtagtagctgggattacaggcatgcaccaccatgcccagttaattttgtattttttagtagagacagggtttctccatgttggtcaggctggtctcgaactcccgacctcaggtgatccacccaccttggcctcccaaagtgctgggattacaggcgtgagccaccacacccggcccattttaaccacttttaagtgtacaattcggtggttttaatcacatttacaatgttgtccaaccattacccctttctaaaacttttcttatcacctcaaacagaaactgtaaccattaataactcccgattctcccctccccacagcccccgataagtcccatatcctctctgtctctcagaacttgcctgttctagaacctcgtatcagtgaaatcatacagcgtttgtccttttgtgcctggcttatttcacttagcatgatgtcttcaaggctcatccatgttgcagcacgtatcagaatttcctttctttttaaggcagaatactattttgtttatccattcagtccttcactgatagacgcctgggttgtttccaccttttgtctgttgtgaagaatgctgctgtgtacatgggtctgcaaatgtccattcaagtccctgcattccgtcctttgatacttccgacctcaggtgatccgcctgcctcagcctcccaaagtgttgggattacaggcgtgagacaccgcgcccagccagaaaaattttaaagtcttctccttgcacagctgaacttgtgaaccgagattcctacccatgatacaatgatggagcactttctttgggccaggcggggcctaatgaggcttgtgaacccggggcctctgctctgaggctggagatgctaagatctctggtggacactgcttgcctcaggcaccgagtagaaagcaattgtgctctttcccactctgtcatactgcttcctatagcatgcaggtcactgtgtgactcactgacagtgtggtaaggaggtggagggtggctgtgtgccaggcacagaactgggctctgaaatgcctggtcttccttacaccccagccactcctctcagcactctctccatgttgctcagcttctggaggccaccagtgaggaagctggggcttgacttcaagcccatctgactctaaagccagtaccagggagggtgatcattgctggtggcagcatcaggaaggcttcctggaggagggggttagttgtgccttgaggggctcagtacagccttaaccatggtgagtgtgctggttgggtttgctgaactttgtttgcagtgatgctctctgtaagcagtagatgaagctccaagtcctggcttcatcccacgccacgcagaccctagcttctgctcaccaaccggggcccctctctcaccaggtgtgcggagatgatcatcagcatggacagcagccagatccacagcaaagacccccgttacggagccagccccctccactgggccaagaacgcagaggtgagtggatcctgaggtgggtgggtggggcagggggccgggccccgcaggtcctcagggccctcaggaagcaggttcccgagaggaccctgaggctagcacttgggggctgaccttgcagtgggtgtgcaggcagagaagtccatgaagagctgggatcctggcagggctctgctgctctctggctgggcggggggatccgccctgtgcctcagtttcctcatccatgaattctgctttggcgatgtgatgaagtcagcaaggcagtgtgtgacaaaactcggcacaaattgtaaagtgcttcccaaatagaaggtggcgtgatgatgattgtattattagtcaggattctctagagggccagaactaacaggagatatatatatagagagagaggggggtttatttttttattttattttttttgagacggagtctcgctctgtcgcccaggctggagtgcagtggcacaatcttggctcactgcaagctctgcctcccaggttcatgccattctcctgcctcagcctcctgagtagctgggactacaggcgcccgccaccacacccggctaatttttttgtatttttagtagagacgaggtttcaccgtgttagccaggatggtctcgatctcctgacctcgtgatctgcctgccttggcctcccaaagtgctgggattataggcgtgagccaccgtgcctggcctaaagggggatttattaaggagcattaactcacacgatcacaaggtcccacaataggccatcgcaagctgaggagcaaggaagccagtccaagtcccagagctgaaggacttggagtctgatgtttgagggcaggaagcatccagcacgggagaaagatgtaggctgggaggctaagccagtctagccttttcacatttttttctgcctgctttatattctggccgtgctggcagctgattagatggtgcccacccagattaagggtaggtctgccttcccctactgactcaaatgttaatctccgttagcagcaccctctcagacacacccagggtcaatactttacatccttcaatccaatcaagttgacactcattattaaccatcaagatgatgatgatgatgatggatgatgatggtggtggtggtggtgctgggcctagctgcacacacagggagcctggctgggcatctcctctgagttcttcccctaagctaagctctgtcctcctgggaggatggaggcctctggtctcatcaccaggaagcacagcttgacagagaatgggatgccccagagttcatggcctacttctcaatgtgatgggccaggagggagggcactgccagcctcagggtacctctgcattccaggagccggacaccgagtcaggcccttccgtgtaggtttggtcactcattgtcatcacatgctgtgaggtggggacttgcattcccatcttcacagaagccctgaagtgcacatggctacagtgacccatccaagcgcaggcagctgggatgagtgaagctgggctttgggctcaggtctgtgactccaaagccaggctcccctccctgttcccaaggctctgccagggatgtgcattgccaaggcccagtgagaggtgatacctttgcagggttccagggagggatgcagggagcggggtgcttcaggacaggccccagaggagcctttgcaaggagagtgggttctgttggcactaggaaaggaccagaagcctcttaaaacagtcagcacatctttggctttttgtccctagtcttgggatgctgatgggatgggaggcagtctaggcccccctagaactggggcctgcccctggaatcctcttgctagcgctttccaacatcccagtacctgtaggcctctcagagcagaagtggcagtgcccacgtgtcccggggtgcggcagctccccgagtgcctgtgctaactcagcctgaccgtctcccgcagatggcccgcatgctgctgaaacggggctgcaacgtgaacagcaccagctccgcggggaacacggccctgcacgtggcggtgatgcgcaaccgcttcgactgtgccatagtgctgctgacccacggggccaacgcggatgcccgcggagagcacggcaacaccccgctgcacctggccatgtcggtgagcccaggaccgcgtgtcctgccctgtggggccccggtgggaatgcaggagggctgtccggactggagccctcctccccactgtctccctcctatcgtcagctgctccaaatcatcttcccacccaaagctcagttcagaccctgactcctccctcaggaagccttccaagtccccctctcagcccaaaataacaccacctcctgtgtgctgtggtaccttttccacctgtgcccccatttggcacttgcatggcacgagagggaaaaatgacagctctggccatagactggccctgagcaagccatgtcacctgtcagcctcgatttcctcatctggaaaatggtggtgtcaatacttatctggaagagttgtggaaaagttatggtggacacttggtcaccctctacagaatgtctaagtgacacacgcagtacctggcccgagtgagcatcctgcttcccttcactggtccgcgtgttgctctcatcttccctgggaggctgtaagatcctggcaggcaaagcctgagtgtgcagcccagcagcctgtggcaggtgccaggcatattcgttggtttattatagaacacagttcctgccctcaaagcccttactgtctggttacacatctagagtatgaacatattaaacctagcagaggaggacgttactgtgttacagacatatgtgtgtgcatgtattcttttttttcgagatggagtctcgcactgtcgcccaggctggagtgcagtggcgcgatctcggctcaccacaacctccgcctcccaggttcaagcgattctcctgcctcagcctcccaagtagctgggactgcaggcacgtgccaccatgcccagctaatttttgtatttttagtagagacggggtttcaccacgttggccaggctggtctcgaactcctgtgttggccaggctggtctcaaactcctgacctcatgatccacccgccttggcaccccaaagtgctgggattacaggcgtgagccaccgcgccccaccgtgtgcacgttttctatagcaataccgtatgtacagaagtctgtttactgagtctcagtgacagaacatgagagacccccgggactctaaaagctgattcaggacacattcagagacatcctgttttataccaaaggtcaaaacttggaagagatgttgttgcccaaaaggctgaaactataaatagtttcatttttgaaactgtggacatttttagcactgggtgggcccttggaatgatctaactcagcagttctcaagttttttggcctatttgatccctttatactctgaaaaattattgaggatcacaaagattttttaatcatctggattttctttatctatatttaccattttagaaatttaaagtgtgaaaatttcaaaatattaattcatttaaaaataacaataataaatatatatgcctactatgtacccacaaaaattaaaattaaaaattttttaaaaaacttaaaaaataactggccagctgcagtggctcgtgtacaccagcactttgggaggccaagatggtcagatcacctgaggccaggagttcgagaccagcctggccaacatggcgaaagcccatctctactaaaaatgcaaaattagctgggtgtgagacctctgaaagggtatcacgtgttcacaggggtccccaggtcttactttaagaactgctgatagactttggtcatcttcatcccatcttcacagtttttggcatattcatcaaccacctttacaattatgtacttaatcacctcttcaaattggcttacttttatttatttattttgagacagagtttcgcttttgttgcccaggctggagtgcaatggcacgatcttggctcaccgcaacctctgcctcctgggttcaagcgattctcctgcctcagcttcccgagtagctgggattacgttcatgcgccaccacacctggctaattttgtatttttagtagagacggggtttctccatgttggtcaggctggtcttgaactcctgacctcaggtgttccacctgcctcagcctcccaaactgctgggattacaagcgtgagccaccgtgcccggcctggcttacttttaaactgacttaaatttattttgagagaaatgttgcatcactaccataaatggccatccatccatccagtgccaaccataaaaggtaaccaatgcagggcgcggtggctcacgcctgtaatcccagcattttgggaggccgaggtgggcgaatcacgaggtcaggagttcaagaccagcctggccaacatggtgaaaccctgtctctactaaaaatacaaaaaattagctgggcgtagtggtgggcacctgtaataccagctactctggaggctgaggcaggagaattgcttgaactcggtaggtagaggttgcagtgagctgagatcacgccactgcactccagcctgggtgacagagtgagactccgtctcaaaaaaaacaaaacaaaacagtaacaacaacaaaaaatcacagttaatgctgaaaacacacacatatctgtagccatagaagtcctaatagaatgtgaagaactgtttggaaaaccccattctagacccacagcttcattctctaggcagggaaatcgggtcccaagaagaggaaggtgacaaggccagagcccacagttccaggtggccagtgtgtcctctgaaaccatgccatgctctgcgcccctgcccggcctccaggtgtggaaatgtgtgacgttcttcgtggggacactcccccgaaggctgccattaggggcacgtgtgttcggttacccctcagggatgacaccctggactgggtgggcaagatggccttccctgccctcacccaccctctccttgctactcctgaaagccatcagcagctgacctactgtgtccccatggctcctgggtcggggtcacagatgcactgcatctttggaggcggagctggcagagcaggggcgagtcacttctagtttctgcctgggttcttacaccctcccctgtgggtgcttttaagcctgtttgtcaggtccccagccatcaaatggcagactttggactaccagattgacttgggtgggggtgaggagggttccagtgtctccccgtgctgaggagaggcccgctgggtgagttgacaggttggggctggcagccaggggcccctttgttcttcacttccccggcagttgcacgtcttatcctctctccatctccaacagaaagacaacgtggagatgatcaaggccctcatcgtgttcggagcagaagtggacaccccgaatgactttggggagactcctacattcctagcctccaaaatcggcagacgtatgtgctctgcactctggggctggagtggggtgagggttgggtggatacagggaccgaggaggagggaagtcccaggcatcaggtgccagcatcctgtgctgacccgccctgctcagagctgccaggagcacctcgtactcagagagggggcttccttacccaagcacaagggccctgagcagtagatgcaggcccaccacggggcttgctataccagcatcctctcccgtgcagcgccccccacctcagggagctaagattcccagcaggggtggggacaggagagccagcagcagccttctttccccaccgttggggaattcactgatggaaccactggctagaatgaccaagggtgcatgcactacactgcacgagctctgggcatgcctgtgtgggcagagtgcatggccatgtgctgcacgctcgcacagtgagccttagcttcagagctggacagagcagatcctcctcaccagaggcctggagcccgctctggagggtttcagcagctgtgggggtcactgtgggcaggtacctgatggcagcagtgtgtgtgtgccagtgcacacgtgtgtgtctgcatgcaccgcatctatgacctccttttcagcaatcccatccatcaaatggagtaggtgccccctggctggctcattagtccctttggaaccctgaactatcacttagcatttttgagaatcactgaatgtggccatgggattcctgctttcttggctggagtagaaggaaagaaggggttcccacaggcatcgggcagggtgacactgacctcctcctcccatatcctccttccctggccttaggaagctgcttgggatgtaccagcctgggggcagcactccctgtcagggtgggctgaggcctctggagcagcccacgtgcccagggcctgggagctgggacaggggacggagtgtggaaaggaggggcctctcctttgcatgttgacatcatttctgatcctgtgccatctccccttccccaaaccatgacaagttgtcaccaggaaggcgatcttgactctgctgagaaccgtgggggccgaatactgcttcccacccatccacggggtccccgcggagcagggctctgcagcgccacatcatcccttctccctggaaagagctcagcccccaccgatcagcctaaacaacctaggtaggcctcgcctcccgactccctcttctccagctggttcccaggcccctggatcacagcaggccccaccaaagcaacaggatccctaggacggaagtcactaaaggaagccggggaggatggggccggagttgtcagcctctaggcagccagcaacccacagatcccagaggcctagggtgtccctggctgatgtcccatgctccgttgcccctgagaggatgtgtcctgcacacagtctcaggcctgggcatttccagtggcacccatgaggtggctgctgttactgccctcctgtccccagggcgttcagggtgggcagtgaggagtgctgtcgggggactgggggcccgggccctctggcttcacctgtccctctggcttcacctctatcacactgtttgaatctcggttgggcctgagacctgtgtgcccccttcctggccccgtggtgactttcagacgttgaatgtggccaggcagccagcatctgccccggtgcattccttggtgcccagggagacatccccagactagacaggacccttctctggactttctgtgggctggcccactcagggacctccattgtttgggagcggggtcccctgaacagagggcagccaggagccagtccttggtgagccagacttcactgtggaggcggcagcaccttcagccagggtagcccgaccaagcctggaactctggagaggcaccgtgactgtggcttctagtcctggctccacctctctctcccctcccaggaactccccctccacctcccatctttatctctcaattttgcaggcagtcacccaagccaggccggatggtgggcctggggtgcggcgtcagatgggtaacgccctgggcctggagaggccaccgagcctagccatgcggcattagctctagctctcactccctaatccgtccttcttagctgcgcacacaccacacgccccctcccctgcaccctgtccccggcctctctcagccactcttctgcttcccttgttcactgtggagccgtgtgccctggggagggggagacaccgcttcgcagccctcggttctgctttgctgcttctagactctgcacagtggtggggggctgtcagagttggggtcacgcgggctgctgcaccaggcacctggggactgggctgcttgtcaggaggggcagctagtcagttgggtggacgtcaggcaggccttggacacaaaggaagacatggacagagtggatggtgggcctgatcccggaggccactgggatttccagacctgggatcaggacgagggatgtctcctttcatccatggacttaaaccccgaggaacgtcctgactcagccttttgactaaatgaccttgggtgaattatggaccctcttagagcctcacctgtcaatagggaataagaattcttaggccccaggtggttattgcagcatcggctccgatgcaagaagaagcactttgtctgaagaggacacgcaagggtattcatgccttggggtttcaagaggaagagattgaggggaacctgggagctggctgggcagggtggggagcccttcccagagcagtgggcccccctttccactccagcccatttctctcctgtggcctgtggctcagctttctcctgggacagagtccttcctgtggggaagggacagatgacagggggagtggggggatgagggcgtggccgtgggcgaggcacagcccaggtttgatctagggacctctggggtagcagggcttggggacccacctgaccacagcatgccctgctctgtgcctcacagaactacaggatctcatgcacatctcacgggcccggaagccagcgttcatcctgggctccatgagggacgagaagcggac

SEQ ID NO: 15721 - DNA, 36416 bp, Homo sapiens
accaccacctctccctggcttcttcccttggaagccagcagagctgacctccagggtctgcaggttcatgacgtcttctggaggcataaggagagaggtgactcttgagggactgacaactgccttgtccagtcagcagccacaaccctccaacgtccccctccctggccccaccagtccactccagagacatcctgtagaaggcccacccgctggcatgggctcctttctggctgctgagccattctgctcgctctgtgaggacagggaaaaaatgtgttttcctagctcttggcagtcagcactgctggagcctcctccctgctggaaggggagcaaggctggaagaaccaagcaccacagagaagcaacggcctggggttccagccccagttcaggtaccctctcacactcgctgtgtggcctcaggtacggcactccctctctctgggcctcagttttcccactatgccaaacgtcctccgagcctaaggtaccttccaacaatgactgtctctgagtttagagtttcagattctggcccagagctccaagaccaccagcagaatggaggtagggaaaggaaagcggtgaaggcttcctggaggtgggggcatgagacacaaactatcagactatcagactagccctcttctccacctgcacagccacagaccacttcctccttcatctggaccatgaccacaaccgcctgctcaccagcctcttgccttgccctccgtctccaatccccatcattgatcctcccccaagagctgtcagaggaatcactactgacacaaacccacgagcctgtccgtgcttggcccatttcaaaaccctgcaatgccagcctccccgcaagccaacacagtagggtcctcaggcctcaaccgtattcctgtccactctctcccaggatcgtatgctaacagatgaatgaacagacagcaaattctactatccctgaatgtttcccaaagggacaagcgggcagtgcatgcctgtgtgtgtgagggaggaagttgcctgagtcctgaaggatttgctcgcttttgggagactgcttcaagattcccccagcccctgccctggcttcctgtttctctggggttcccaggcctttttctccatgtgttgtggagctcttagagggcagggatccagggctcattcattcaatcagcaaacatccaagaagcacctactatgttccaggctctgtgctgggccctggagaccctgaagtgaatcacagctcctgccttcaagggcttcacagacaaccaccactctatcagactcagcacactagtcacctccccagggaagccttccttgattgccctggctaagtcagagcgctgttatgtactttcaaaccacagtgacttctccctcacatcacccatctaagctgtgttttgcatttacttctgtggatcttttttcaagtttgtgtccgctgctgagctataagctcccagagggcagtctctggatctggtctgttcatctcatccctggcatctggtccaggacaagggcccaatggcaatgcagggcccaggggtgattcaatgggaagttaaacttctcagtgctaactttccatctgggactgagtcaaccagccacttcccctcatcccctgaccccaggccctactttgtaatgtttcctgcccagctttgagggtgggcctgtctggttcctgtgctcctggccccaaccctcctgactcaaaccccacctactcttgggtacccccagctcctggcatggggctgtcagccctgctttctcttccacaattcacctggaaaatacgctgtctgcacagacttccagagcttcccccttctacccaccatcctgccatcctggctgttacctagttcccagtggtagatgggaatactgagggtccgggctgctgtagcagagctcacccagggttcaaagatccaaagtcaaaagatcattggttcctcaccctagcaagttcaattgctcccctcccacaattccatagaccgtgggtgggtgggtggagggggaaggtggattaagaccaaggaatctctagcccccagcccatcctgcaggcggctacgacaaacaggtgctttctgcagggctattgggtgagtgggtgggtggcggctaggtcaggccccacccctcactcattaaccctccgtgcagtcagagttctatccccaatgcctactgaccctgcctggcccagggtgagggcactcggggtctgtcggctggctcagagcctcagctagcttccggcgtccagctgtaggtcagtctagtctcaccagtcccacttgtgaactgaaactaccaggagagcggaaaccggctccgccccatcctccacgacctagcaggtacagcctccagaacccggactagctaaaagcctgtggtcctctccctgcgccgcacccttgcagtcaaggttttctggcccttcctgttctcatgggactgaggggatgggcaaccctggggacgaacgagagtcccttggttcttccctccccaggaagccccaaaatctggggacaagaacctgggctccaactcactttgttaccagatccaccggggtgccaagcgggggtggctcacatccctcactcctagctcagctgggtggggtctttgataccttgccccaccctgtggctgcgggcgcgggctctgggcgggagacaaacactggggtcacgtggcggaggccctgggaaactccggggagagccggggacggacagccccgggtagtaggactggggcggcccgggccagaattcccagaccccgtgcgaagacgcacgggtccgcttccttcgctcgggtccttgttccgcgtttactccggtggccggcccagggcacgccctctccgaggtacacactgctggtgtacaggccccagggagcgcgcgcgcggacacgcacacacaagcacaacacacgcacacacgcccccgaggtacacagcgcacgcacgcaccgggcaggatacccaggccgcccgccagggaacacacgcccgccctcggacgtaaacaaaccgcgcacgcaccgcccgcgggcgccgggccagggcctgttcccaccgagtcacgtaggagcacagcgcccccgcccccgccgggcggacgcggagatcgccggcctgcgctgccccttcctcccggcgccgccgcctacccgcccgcgccccgggaaggggccccgtctccacccccactcccccgagctggcctcggccccgtcctcggcgtccccgggacggccgctcccttctccccgccccgagccgtccgggcgatggagctccgggagccccgacggatcgggcccgggcgcccaccccaggcgcatcccgggacgcagaaaccctgccgccttggggtcccgcgcaccgtcctcctggtcccgcgttcctcacccgcttctgggcccgcttggtccggcgcgctcacacacgcgcgtctcgccgctgtcccggccgctgtcccgatccgcgctccggtcagtctcccctccgctctgagccgcaggtcgctctgaaccgggcgcccgggagcgctgcgctgagttttgttgtggggcgggcggcgcagggggccgaggccgcgcggagttgtaaggcgagcttcccggaattactcactcacaggattcctttcattcataaaaacccagtcatgcggtgacgtcaccgacccggccgccctccggccaggagcggccgcttggtccctcggccccgcccccgtatgaccccgccccctggaagccccgcccccggggctgccgcgattctctgcctggttccagggctcgctgggtgcgttcacgtgacacctcgcgagagccccgtgggtgtaggtgtcattggctcattttacaggtagtggtcctggccctcttctttcgacctagaccttctgccttaatgatctcatccagtcccgtggctttaaatgacatttatatggctatgagccccaggtttgtatttccggagcgaacagcttctctgagttccagactcatagccagctgcccactctgcgcatccagtgggtgtcagatgggcactgcagaggactcggcccaaaaacccgctcctgatcgtcagccctacctctgctcccttgccaccccatctcagctgctcaagccaaaaccttggagcctggctccatccctccctctcccttcctccccacctcaggactcaagctagcggtgtctccaggtctcctgcataggaccatttctcaccacctccagtcatggcacctggtctcggcaccatcagcttacccggacaatggcagcagcctccgaggctccctactttgcctccaaagtctttctttctataccagccaatgttcttctcaaaacaaagctcaggttgtttacacaccttctttggccactctctcctcatccactgctcttcggccacagtgcccttctttctgtcccccaaacataccaagctcattcctgcgacaggcccttggcactggctgtctggtcttctgttcacttgcctgactctttctcatctttcacgtcagcccggatgtcactgcctcagagagacatttcctgaccaccctggttaaagcagtcttcacctctgaatttttttttttttttcgagacagggtctcactctgtcacccaggctggagtgcagtggcacaatctcggctcactgcaacctccttctcctggactccagccattctcccaccttagcctcccaagtagctgggaccataagcacacaccaccatgctaggttcattttttgtatttttttttttttttttttttttttttttttgtagagacagggttttgccatgttgcccaaactggtctcaaactcctggactcaggcaatccacccacgctggcctcccaaagtaatgggattacaggcgcaagccaccgcacccagccttgaaatttgttcttatattatcttaatacttctgtagggtgtttcatcatttatgtatgtgagtgctggttattgtctgtcttccccaaccagaatgtatgttttatgaaggcaggccttgcttctttttctttttctttttttttttttgagacagagtctcactctgttgcccaggctggagtgcagtggcataatcttggctcactgcaacctccgcctcccaggttcaaggaattcagccccccagtagctggactacaggtgagtcaccatgcccagccaggctggttttgaacccctgacctcaggccacccacctcggcctcccaaagtgttgggattgcagacatgagccactgcgcctggccaggcttatcttgttcaccactgcctgcccagtgcctggagtagtgcttggcacatagtaggcccacagtaaatacatgttgaaggaatacatgactggaggctcagagaggtgaaggtgactttctaaattcactcagctaggaagtacaagcactggaattggtatccaggtctgaatgattcctggcccagatgtttgggggtacatcgcaaccaggggaggagggccacataaacatgaggggtgtgcgccgtggtgggaagccccacccaaaagagatggctttggaggccacgtgcggggtggatgttgctgttcatcccctgctttcctttgctcatgatgttcccactgcctgaaattccatcgctcccacagtccctcctgtgaagccgacatcatggcacttactccactgtggagggcatagggcctctccaaatgggtaggcctctatgtggcaccctgatcaccagtaaggatccccactttcctttttttttttttttttttgagccggagtctcgctgtgttgccccaggctggagtgcagtggcgcgatctcagctcactgcaagctccacctcccgggttcacgccattctccagcctcagcctcccgagtagctgggactacaggcgcccgccaccgcgccctcctaattttttttttttgtatttttagtagagacggggtttcaccgtggtgtcgatctcctgacctcgtgatccacccgcctcggcctcccaaagtgctgggattacacgcgtgagccaccgcgcccagccccccactttccttgatgtagcaaattcgatttcagcgcccttgtcttgctttcctgcctctgtgccttggtccaccagacactatggcttctttccgttccctcccacaggctgtgggtttggtatgcaaattggcccactagtttcccaagtgaccaaatgttgaggcagctttgtctagcactcaaaaggatctctaaaaaccaattgctcagtcctctccatgtgcatagcagaaagagccacctaggttaacctttggggtaggaaagttctcagttttagaaactgcacaatggtgagttgtctattttctctaccccccaccccctttaaaaccaaaaccaaaacaaaacaaaacagggtcttgccctgttgcccaggctggagtgcagtggcatgatcatagctcactgcagccttgaacttctgggctcaagcgatcctctcacctcagcctcccgagtagttgggactacaagtgtgcatcactgtgcctggataatttttctattttttgcagagatggaggtctcaccatattgcataggttgatcttgaacccttggcctcaagccttccttctgcctcagcctcccaatctactcccttttttatgagcttctcaagagctggggccacacctggaacactgtaggtgctcagctagtgagtgaattctcagtggacctgaacaacactcctggacaccatgctgcctagatcctttactcccatccccagcctgccagaacaagggggtcagtgcctcattatccaccctgcagggactgcttcccatagacatagctccctttctggtcaagatcaagggccatggtgcaatgtcctatttaaaagtgggagctcaggctgggcatggtggctcgcacctgtattctcagcactttgggagaccgaggcaggaggatcacttgagcccggagtttgagaccagcctgggcaatatggcgaaatcttgtctctattaaaaaaagaagaggaagaaaaaaaaaaaagaaatgaccatcaggcagccaccatagtaatcatgggttgcagcaagaatcaccaatggatatgaaagcttgatgagaaagtatttacatagtttcaagttatttacccacaagatgataattaattatggaaggaaaaataataactctgcagtggagaaatttggcagacacaaccttcgctaagtgatcaaagttaatatcaccagtaaggggcaaattgccacggagtttgtagatgaggtaattactgcatggatgcccaacttcctggcttcaatgcttgtcctgtggtcatagaagagaatgtgtccttgattttaggaaatatacactggagtatttatttatttatttatttatttatttttttgagatggagtcttgctctgtcacccaggctggagtgcaatggtgcgaccttggctcactgcaacctctgcctcctgggttcaagtgattctcctgcctcagcctcctgagtagctgggattacaggcacccaccatcatgcccggctaaattttgtatttttgtagagacgggggtttcaccatgttggccaggctagtcttgaactcctgacctcaggtcatctgtctgcctcggcctcctgaagagctgggattacaggtgtgagccaccgtgcctggcccactagagtatttagaggtaaaaggcatcatgtttgcaatttactctgacatggttctgaaaataatacatatagatagatagtgttatgggtggaatttcataatgttaaaatgtgtatgttgaagtcctaatgcctaaaaatctcagaatgtgactgtatttggagataaagttttaaaaggcataagtaaattaaaatatatacggtaggccctaatccaatctgaccagtgtccttataagaaaagaaaatttggccaggcgcagtgtaatcccagcacgttgggacgccaaggcaggcagatcacttgaggtcaggagtttgagaccagcctggccaacatgcaaaaccctgtctctacttaattaaaaaaaaaaaaattagtcgggagttgtggcacatgcctataatcctagctactcaggaggctgaggcaggagaattgcttgaacctgggaggcagaggttgcagtgagccgagatcacgccattgcactccagcctgggcgacagagcgagactgtctcaaaaaaaaaattgttttttgaaagtagggactctcaagtcagcctgtcgggttcagatcctggccccacgcctcatcagctgacgtcatctccaccctctataaaccgggctaatagtgcctcctttgcaggctgtgaaacaacataatgtgtttgcacttataagcctctggcacagcgcttagtatataataaaagatcaataatatcaggttagagagaggagtcctctacagcaggggtccccaaatcgcaggctgaggaccagtactgtttgtccgtggcctgttaggaaccagcgggctgagtgagcgtcaccgcctgagctccgcctcctgtaggatcagcactggcattggagtctcattaggagcgtgaaccctattgtgaactgcgcttttgagggatccaggttgtgtgctccttgtgagaatctaactacggccagatatgcctgatgacctgaggtggaacagtttctttttttttttttttttttggagagagtctcgctctatcccccaggctggagtgcagtgtagccatcttggctcactgcaacctccgccttttgggttcaactgattctcccacctcagcctcccccaagtagctgggactacaggcacgcgccaccacgcccatctaatttttgtatttttagtagagacggggtttcaccatgttggccaggctggtctcaaactcctgacctcaggtgatctgccccgctcagcctcccaaagtgctgggattacaggcgtgagccaccgcgcctggccactggaacagtttcatcccgaaaccatcccccacccacactccccactctccacccccaccccaccctcatctgtggaaaagttgtcttctacgaaatggtccctggtgtcaaaagcagaggaaatggacagagtgatcagttcgcccagaggccaagggaccacaccctggatgccaggtgtggtgctcccgtgtatcaggtcacactcaatcctctccatgtcttagcacttagctattatcatggccatgttgcagatgaggaaatcgagaccgtggcaggtgaggaatcttgcccagtattgcacagctagtccctggcagagaaggacttaaactcaggctggtccgactcgagggctgcgctctctcctgctgcccccgccggaatgatttgctgggttttgttctggagagattcgatatttcacgtgggccacttcagagtctgacgataattagagcacacgccatttctccgcgtgggcacccccgggtgggatcctggaggaaccttgtgccctcctccccttcttcctcctcttcccttccctctactttgtcaatcctaaggcaaaccgggcagggcctggcagagggtgactcttgaccagggccactttctgcaaatacaagggtcctgagtctgggctggagatgtgattgttcagcagagagaaaaaaggtttgagcaaacccaaacaattgggccgggcgcagtggctcatgcctgtaatcccagcatgttgggaggccaaggtggatcacttgaggccaggagttcgagaccagcctggccaacatggtgaaactctcgtctctactaaaaaatacaacaattagcccagtgtggtggcatgcgcctgtagccccagctactccggaggttaaggcaggagaatcgcttgaacccaggaggcggaggttgcagtgagctgagatctcaccactgcactccagcctgggcgacagagcaagactgtctcaaaaaataaaaataaaaataaatccaagcaaccccagtacctactgttactgtttttgttttgagacggagtcttgctctgtcacccaggctggagggcagtggcccgatctcggctcactgcaagctccacctcccgggttcccgccattctcctgcctcagcctcccaagtagctgggactacaggcgtattattgcttatgaatcacatttatgtgcctaagagctgtcatctcacaaaattctatgaagtatctgtatcatccccactttatagatgaggaaaccgaggctaggagggctgaagccatttgctaagggcccttcccacccacatgtgaatatgaacctttcgtctccacttcaccaacactgggagttttcattgtctaagctctgctaatttcctaggcaaatgacgttattgtatttaaatttgcatttctctgaataggaatgagcttgaacacattcccatttgcttgttaaccagttgggttttttcttcttttgttcgtgtgctttgcctattttagagaatacatttttatgtttgcaaactgatattttaggaacctgaaacagtactgcacatgctccatttttccccagccctccatcattttccctctaaaacctcccccccctccccacccccagcagcttcaatatacctggagatgtgccagccctggtctgagtccttttgtgccaagcctgtaaaaccatcgctggggcactgctgctccgtgcacttcactcctgcatgccagctgctctggcttctggagagaagccaccatcgcgaccacaaccaccactgcaacaacagctgcggtcacgacaaggtcatcttctccagtcacagccagatcctcagagctgccaggaatccctggagtactcgcctttctccttcatccgcaggccttcatcctcatctccatcgaacctgctctcctgccacttccagaggaagcagaggccatgtgataggcactgcctcgaccctctgcacctgcccttccctctccctcccagtcccttcagaggctgtcctttgtcttgccctaaacctacctctcctccttccagaatccccatgcccacaccccagtccccatcccctccctctgaagcaaatggcttcagccctcctagcctcggtttcctcatctataaagtgggggtgatacagatacttcatagaattttgggagatgacagctcttaggcacatcaacgagattcataaacaataataacagtaggtactggggtcgtctggattttttttttttttttttactgagacagtctcgccccgttgcccaggctggagtgcagtggcaagatctcagctcactgtaacctctgcctcctgggttcaagtgattctcctgcctcagccttctaagtagttggggctacaggcacctgccaccacactggagatgggactgaaatgtctccaagtggctgtcatctctagcagccacccctgaaccccacctttcactccaccctcaccctaacacccacccttgttttttcttccctttgtgggcaaacctcaagtcatccccactcattgcctctgggttctcactgcctctcattcccaatccctcacgggctgagggctgccctcaagaaacctctgaagggactctggccggggtcccagtggcctctttgttactaaatccaggtccaattttagccctaatctgtcttgacctttgacagcatgcaatggtgttgcaatctcccttccttttaatttttttcctctttttttttgaaatggagtcttgctttgtcatcaagggtggagtgcagtgtcaccatctcggctcactgcaatctctgcgtcctgggttcaagcgattctcctgcctcagcctcctgagtagctggaattataggtgcctgccaccacgaccagctaatttttttttttttttttgagacagagtctcgctctgtcacccaggctggagtgcagtggcgtgatctcagcaagttctgcttcctgggttcacgccattctcttgcctcagcctcccaagtagctgggactacaggcccccgccaccacgcccggctaattttttgtatttttagtagagacggggtttcaccgtgttagccaggatggtctcgatctcctgacctcacgatccacccgcctcagcctcccaaagtgttgggattacaggcgtgagccactgcacccggcatttttgtatttctagtagagacagggtttcaccatgttggccaggctggtctcgaactcctgacctcaggtgatccacccacctcggcctcccaaagtgctgggattacaggcatgagctactgtgcccggcctattcttcccctctttttggaaacactgttttctccttggtgtttttgtctttgttttgagacagggtctccctcccttgcccaggctggagtgcagtagtgccatcatagctcactgtaaccttgaactcctgggctccagccatcctcccgtctcagcctcccgaatagctggggttacaggcatgcagccacatgcctacctccccttgccttctaaagctcagatttccctcctatcttttcagctttcatccctggccctccatcttggcctcttaattcttagcgaggctcagagctttagcctttgccctcttttcttattgctggggaaccttatccctacctcaagatttcaggtgccacctgatgttgaggactcccagatctctattttgggctcccagctgtctctcatggaccagatctgcttaagcaactgcatggatgacatgtattttcccctgcccttccctggcacgtctaactccacgttgtctcagtggagcttagcgccaccctccccacctaatttctccaacaggttgatgatgccacctcctccccagtcaccctggagagaaaccaggccatcatgctcacctcaccctctccctccctcccacagcaaacaagtcaccaggcttcagtgatctcatctccttaacttctctccagcctctctcttccctcagccatggcctctgttcaagccacagcacctggctccaggacaattgcagcagccttctgcctggtccccctgcctctagcctccatgcagaggatagagagagctttctaaaacctaaacttggccaggctactgctctgctcacaacccttccatggctccccagtgctgtcaggacaaagtgtaaactctttccataagcctcctcgatctggcctctgcctgcttccaccacctcctctcagctgcagccaccgtgaactctgtcctcatacccatcattctcttctactgcctcgtgctttcaatcttcccagtccttcttcctggaactccctccccggcttgtgcttcagtccccagctcagatgccactttgttcagcaggcttcccagatcatccccaggctgactcaggttcctgtgtacaaggtaggaaacctaccagtgtatccctcatgatagcactttcctctctgactcggtgttctgtgtcttcatggctgtcttctcttaacccacatgctttttgaggaccaggattacatcctttcatttttgtgtctccagagctttgcccgggccatggcacatagcagaagcatgatcaatgtttttctttcttcttttctttttttctgagacacagtcctgcactgtcacccaggctggagtgcagtgtcgtgatctcggctcactgcaacctctgcctcctgagttcacgcgattctcacgcctcagccgcccaagtagctgggatgacaggcgtgcatcgccacgcctggttaatttttttttttgtattttttattttagtagagatggggtttcactctgttggctaggctggcctcgaactcctggcctcaatgatttgcctgcctcagcttcccaaagtactgggattacaggcgtgagccaccatgccctgcctaggccaccgtgcctacgctgggagcatgatgaatgttaatgggatgaatggaggagttgtccttgttccactgggccttgtcctaggctcaagcaagagggtcaggctgtggcgagacagggaggaaggaagagagtatcattagtttctaagaacaggggtccctaacccctggtctgggtcgatggcctgttaggaactcggctgcacggcaggaggtgagcggcgggcgggtgagcgagtgaagcttcatcgatatttacagcatatttacagccgctgcccattgctcactcacattgccacctgagctccactttctctcagatcagcggcggcattggattctcataggagctcaaaccctattgtgacttcgcatgcgaaggatctaggttttgcattccttatgagaatatgatgatctgtctgcctgatgatctgtcactgtctcccatcacccccagatgggaccatctagttgcaggaaaaccagctcagggctcccactgattctacattgtgatgagttgtataattatttcattatgtattacaatgtaataataatagaagtaaaatgcacaatcaatgtaatggacttggatcattcccaaaccatcccccggctccgtggaaaaactgtcttccacaaaaccagtccctggtgccaaaaaggttggggacctcggtcctacaatgtcctttggctccctgacagtggggactgtgtttatatcactgattgccctcatgccctgtgtaacgctatggcagggcagccaaacacggattgattctctggagatccctgcaattccgtttcattaccattgcatcctgggggcacagtgattcagcctactcatgaatgtgtgatttgcagtagaatttcaggagcccctgggacataaaagaggattatcagggctgggtgtggtggctcacacctgtaataccaggactttgggaggccaaggcaggaggattgcttgagcccaggagttcaagaccagctggggcaacatagcaagccccatctctacaaaaaaaatttttttaaattaaccaggtgtggtggtgctctcctgtggttccagctacttgggaggctgaggtgggaggattgcttgggcccaggaaatggagggtgcagtgagccacgtttgagccactgcactccagcctgggtgacaaagcaagactctgtctcaaaaaaaaaaaaaaaaaaggtaggggctgggcacagtggctcacccctgtaatcccagcactttgagaggctgaggtaagcagatagcttgaggtcaggagttcaagaccagcctggccaacatgatgaaaccccatctctactaaaaatacaaaaattagctgggcttggtggtgggcgcctgtaattccagctactcggggaggcagaggcaggagaatcgctcgaacccgggaagtggaggttgcagagagccgagatcatgccactgtactccggcctcggcgatggagcaagactctatctcaaaacaataaaaaataaataaaaagtattttggggtgatacacacattcagaccatagaacatgcgatgatatggaaaaatatatttgcctttatattccagtgctttttcacaataaactattatctgtatatctgagacaagtttgtattaaattgtgagccccaaggacaagaatagagatgtctttagtgtccccaccatactaagagtaaggccggccaggcatggtggctcatgccagtaatcccaacactttgaaggccgaggtgggcggatcatgaggtcaagagattgagaccatcctggccaacatggtgaaaccccgtctctactaaaaatacaaaaattagccgggtgtggtggcacgcgcctgtagtcccagctgctcaggaggctgaggcaggggaatctcttgaacccaggaggcagaggttgcaatgagctgagatcgcgccactgcactccagcctggcaacaaagcgagactttgagtcaaaaagaagaaaagaaaagaaaaagagtaaggtcatgcacatagcaggtatttcataattaatggctgacaaaacataaatgaggacgagaagcacaagagaagggacaaagggattaagagcttgcacactctgaccctcaagaactccacattagattcccccatcgtgagaggcttggcacacaccctgcatctttgcctgaaatacccctgctcagcctctccaaatcctcatgtccttcgccatccttcaccatccctcaccatccctaaccatcccccaccatccctctccatccctctccatcccccaccatccctcaccatccctcaccatccctcaccatccctctccatcccccaccatccctcaccatccctcaccatccctcaccatccctctccatcccccaccatcccccaccatcccccaccatccctctccatccctctccatcccccaccatcccccaccatccctctccatccctcattatccctatccattcctctccatccctctccacccttctccatccttcaccatccttcaggactcaggtttaagccagcttccttgtgaagctccctggttccctgttcctgagaaccagcttctcctcagcccgcagtctgtcctgtgaacccctgagctgggctgaggtccccccagagtagggaaatcctgcccttcctgaccaggcctggcttttgcccttgggatgggaacacacttggctgctgcctcacagctcagggtcacctcctgaggagcccacttccctcctgtggagggcacaagccctgatgtcccactcagcaagtcagaagccatgtaattagcatcatcatgcacagctgccgtgtgggctccgcaccctcccatcacctctcccaaggcagcagaaggatttttccacattgcttcctggccccaaccttccagggcacccactgcttgtgggacaaggtctgcatccttggcctggaactcaaaactctttctttttttttcttttatatatattttttgagacggagtctcgctctgttgcccaggctggagtgcagtggcatgatgtcagctcactgtaacctccgcctcccgggttcaggcgattctcgtgcctcagcgtcccaagtagagtagctgggactacaggcacccgccaccacgcccagctaattttttgtagctttagtagatacaggagtttcaccatgttgcccagctggtcacaaactactgacctcaagtgatctgcctgcctagcctcccaaagtgttgggattacaggcgtgagccaccgcaccagccctttttttcttattttgagacagggtctcactaagttgcccaggctggagtgcagtggcacaatcatagcttactacaacctcccttcccttgggaggctggggctcaagcaatcctcctgccccagccttctgaagtagctgggactacaggcatgcaccaccatgcctggctaatttttaaaatttttgtagagatgagagtctcgctatgttgcccaggctggttttgaactcctgggctcaagcgagccagccgttttgtgctcccaaagtgctgggattagggggagactctttctagatggcctctggggactgttctcctgctcacacaccaggtttcagcagtgctcaaccccttgccggtccccaaacaatccacacaatctcatggtattgacttttgctcacacagttctttccacctagaatgttctctttcctaatccagccggcaaactcctacttaacctttgacatccaatttaagatcagtggtgggtaaatttttttttctgtaaagggccagagagaaatattccaggctttgtgggccatgaggtatctgtcatgattactcaattctcccactgcagaaagcagaaacgtgtgtaaacaaatggcgtggctgtgttccaataacacttgtttacagaaacaggtggcaggcaggatagtttgcccactgctgctcaagaataatctcacaaagcttcccacaggaaggagtttgacaatgccttctagcaatggcttacgtattttatcgtaacacaaacttggactgtaacgtacctatagctgtgatgattaaatgggctggtggtcagaccatcatctctcacctggatttctttttctttctttctttctttctttctttttttttgagatggagtctcactctgtcacccaggctggagtacagtggcactacctcggctcactgcagtctctgcttcccgggttcaggcaattctctgcctcagcctcccgagtagctgggattacacgtgcccgccaccatgcctggctaatttttgtatttttagtagagacgggggtttcaccatcttggccaggctggtcttgaactcctgacctcgtgatctgcctgcttcagcctcccaaagtgttgggattataggcatgagccaccatgcccgaccatggatttctacaatagcctcctcactggtctcccagcctctgccttcccttacactctattctcactgaacagacataagctgttaaagtgtaaattcattctggtcactcctctgcttaaaaacctctcatggttccctattgccctgatattgaaagccaaagtcttaaaatggtttccagtgtcctacaagttctactcccaatatccttttaacctcaacgttattgcctactacacccccactggctctctactccaaaacaaagctataatagcctctttgcttttcctcttaaaacaagccaggcgggcttctgcctcagggcctttgttcttgctccatctggaacactcttttcctggttgtgcacatagctcactccttcgcctccatcaggtctttatttaattatctcccttctaacgcttttcctggcccatctagttaaaactgtgaccctccccggtctctccttcctgtgtttactccccagcattcctcaccctctaactcactatatattcccccaactttttgttttgttttgttttgttttgttttgaggcagagtctccttctgttgcccaagctggcgtgcagtggcaagatcttggctcattgcaacctctgccttccgggttcaagcgattctcctgcctcagcctcccgagtagctgggattacaggtgccagctgtcacgcccagctaatttttgtatttttagtagagacggggtttcaccatgttggccaggctggtcttgaactcctgacctcaagtgatctgcccgcctcggcctcccaaagtgctgggattacaggcatgagccactgtgcccagcttcctccaactttttaattataaaaatgttcaggccaagaacagtggttcatgcctataatcccagcactttgggaggctgaggcaggcagattgcttgaggccaggagttcgagaccagcctaggcaacatggcgaaaagcagactctaccgaaaaaaaaaaaaagcatagtggcctgaacctgtagtcccagctactcaggacactgagatgggaggatcgcttgagcccaggaggcagagattgcagtcagccaagatcaccccactgcactccagcctgggtgagagagccagaccctgtctccaaaaaaaaaaaaaaaagaaagaaagaaagaaaaagttcaaacacacagataattggaggactagtgcaaaggtattcaaatagacatgcccagatcccacagttaaggtgctttgaatgtaagatgctaacatgatgacaccctcactcaaagacattagcaaaacacactctctgtttccttctctatctagtttattctccgtctttccccaccaggatgtgagcagcacaaaggcagggatttttgtccattttgttcagtgcctgggattacacgtgcaccaagaacactgcctggcacataatgagtgctcctagagtttggagagagaaaagacaagacaggtgctgattctggttctgcctctcgttgacactggcaactggcactgcctctcattggcaactctggggataattttcccttgtggaacctcattctcttcatctacaaagtggggatggcagtactatatcacagggctgttgcaaggataaaaaagtaagaagtcggctgggggtggtggctcacacctgtaatcccagcactttgggagactgaggcgggtggatcccctgaggtcaggagtttgagaccagcctggccaacttggtgaaacctcgtttctattagaaatacaaaaattagccaggcgtggtagtgcacgcctgtaattccagctactcgggaggctgaggcaggagaatcagttagaacctgggaggtggaggttgccgtgagccaagatcgcgccactgcgctccagcctgggtgacagagggagactctgtctccaaaaaaaagtaaaaggtgtgatattgcactgttagcatgttagttagatttccatctagctccttgaaggaaaagattagtctagtctgaccctctgtgctctgggctcttagagggcagacgccctccctgatgtatgggaggagcctagcacaacacctcaggagaagttcttttgactttaactgctagcagctccatctgctagcactacagaacacactccctcgtgcttacttgccccatccctttacttgctcattcaatgctacctaataatcccctctattccatcttttgatttatctactcattaaatggtttccaccagaaatacctagggaagggatacttaacttcatcaggtactgagattctattttgtgaatgtcttctgtggatctttgactgtttccagcaattgatccagcctctcttggccttttctgcattttattatttatttatttattgagatggggtcttgctctgtcgcctaggctggagggcactggtgtgatctcagctcactgcaacctccacctcctgggttcaagagatttttctgcctcagcctccccagtagctgggattacagttgcctgccaccacgcctgactaatttttttgtatttttttgtagagacggggtttcaccatgttggtcagaatggtctcgaactcctgacctcaggtaatccacccgcctcagcctcctaaagtgttgggattataggcatgagccaccacacctggcccttgtctgcattttagattcacctgtgtatctgcatttccaaatgtgctttgcaaaatcctgaatgcaagggtgggtgtttgttgaagaatgggacacctcatgttgcccctgtgggttttctcaggaaggaaagattgcttggcagtgcgtggaatgcatggccttttgcaagctccttgataaccatcgctctaactttgcttgtttggggtgtggaggcaagatattttcattgagaattctgagtctttatccttttctctccacttcaagctgaaacttttttttttttttttttgagacatggtctcgctctgtcacccaggctggagtgcaggcgatcttggctcactgcatccttgaccccccggcctcccctgcacagtagctgggaccaaaggcatgcaagaccacacctggataatttttgtattttttttaaagacgaggtttctccatgttgcacaagctggtcttgaactcctgagctcaagtgatctgcccacctcggcctcccaaagtgttgggattacaggcgtgagccactgtgcgcagtcaagctgaaactcttaagcaaattttaaatcttactttaaggaacaatttcctcacctgtaaaatggggacacgaggatatgatggaagtgaagtcactttgtaactggtaaagctctgtacagatattagttaagatggttaatttcattaacctgtgaagattcttaactaaaccttgcgcaagttgcattggctgccctgtctaggcactaatatctttagacggactaaggaggaaacacactttttttttttttgagacagagtctggctctgtcacccaggctggagtacagtggcatgatcttggctcactgcaacctctgcctcctgggttcaagcaattctcctgcctcagcctcctgagcagctgggactacagactatggccagcacacccagctaattatttgtatttttagtagagatggggtttcaccatgttggtcaggctggtctcaaactcctgacctcaagtgatccacccgcctcagcctcccaaactgctgggattataggcgtgagccaccgcacccggcctacacgcttcttttcacaagaatgacacccgcaactatacttcccacgtaaatggagagcagtctggcagattcatctagacctagggttgggtgattattagggaaagaaaaggtccaaccaagccagtgggctgaagagaggacatgacctgctcagtccgaagcagatgtgtgactaaagtctagtctcctggcttctctgcaaaatacctcattatcggcattattaaccctaacaactgccatttattgaaatcccactatgtgcacgaatggggaccaatttacttctagatattacaacaatcttgtattactgtgcccacttcctggatgatgggtctgaggttcacagagatcatttgcccaagttcctactgaaagtgctaaggtatttcctgagactggctcagggtgtgttgccagacaacaatgcacacatttttaacacaatactaaacttagtatattatacttatgttaaaaatttcggagccgggcgtggtggctcacgcctgtaatcccagcacttcgggaggctgaggcgggcagatcacttgaggtcaggagttcgagaccagcctggccaacatggtgaaaccccgtctctactaaaaatacaaaaaattagctgggcgtagtggcgggcgcctgcaatctcagctacgcgggaggctgacgcaggagaatcgcttgaatccgggaggcggaggttgcagtgagcgagatcgtgccactgcactccagcatggtcgacagagcgagacttgtctcaaaaaaaaaaaaaaaaaggacatgtggtaattcccctagggaatttggccttagttgtgaaaaataaaaaagctataatcaatttctgttctatcggaaaaaaatgtattggctgtttagctgaaattcaaatgtaacttaacatcccgtattttttatatgctacatctggcaaccctggcttgaggctacctggcaaaaatcaaaacaggttcctccttgttatgccctatgcctctgttgcctttatttttatctttacgagcaatcattaacagtaacttcagactccaggctctggtcgctttaggaggcggaaggcggactagggtaggactcctggccctcatcaacaggactgccaagaagccgggcaccttctgccccgcacaaacatggccgcgcctcgccgccgaggattggctcccgccgaaagctcgtcctcctggctaagggagccccttccattgggcagttaaaaaaaatggcggaccccgcctcccgccgtcctcgggcgcgggggcggagcctagaggaggcctgggacagggccaccagtgattggcggagagcggtggtcaggccatcacgtggcccgaggcccgtttgtttgcggaagtaggaggaagtagaagtgctgagtaagccgaggtgagtgacctcgcgggtgggcggggcctgggggtccgttccccaacttcctcggcgctccggactcccaagtctccgccggaccctcctttggatattcctcgtgtctccgattctgaggcatgtcctccattaacccttatgtgactccctgagtgcccccaccttccatcttttcatccccctgcgtccccaattcccatcccgagaccgcccgtgtctcatctcgaacttgtggaccccagggaccccagcttcgaccctgagtttctcccctgaaccccagtctcctccgtgtgtctccctcagtatccctaacttcccgagtcaatccatctcttctctttccccgaccctcagtgcctctttaggccccattggccgtcctaattttccttcctgtgctcctctaagtgctcacttgattccccacttcacgtccgtctccacctttcgtggtgcctctactcatttctcactccctgcttctcctgcctttcctccctgctttttttccttgcctttcctctctcgcgtgcctccagacctgcccccgacatgctccctccttcccctcagcctggccaccccagagtctcccacccctaatcctgtgtccacctcctgctcccacagatgacttggaagctggtgacagggagcatgtgaccagggtgatcatgggactgggtcggggcaagcctgtgggtgtgggacagggagggcacagggcaaggggacctgtggccgtatttttaatgggctacccacatgaccccaacgaatacctccccctagcttctgggtctttccctcacctgcctcttacccgcccaacaggatgtcaggcaggttcggtttggcaacgttgaggctgcacccttgggctgaatgcattgtttttgaatgcattgtttttgttagagtttctgcctggagtttggaacctgttttctgtccaagtctcagtttcctcatctgtgacaggggaactgtacctcctgccctcgtaagtctgccatgaggttcaaaatttgaatgagaaaatgtagaaggtaaagctttataaccagtatggccctgtacaaatacatgattttactgttgggtcataggcagaattgaaaggagtggaaagggaaagggctagaatgagaagacaaggagagaaggatgagcaggaggtcccttgtctttcagtgtatcatttggcagtgtttgttcatcacctcttgtgagtcaggctcttctgtatatgttctcttcaccattcattcagtcatcgtttatctaacaaatatttacggactgtctgatgttctaggctacccttggtgtggccaatgatattctcacttcacatgagaaaaagagggcgcatgagttgcttgaggtcacaccgatgaggttgaagctggaatctgacaccagagcctgtgtgattgtcctgatgtgtaaggtttgctactgtttaggacacttcttgttccttccgtggattactttcttgttacatgagagactccccaaaagggagtttccctcttactcagcagaatgacatcactaagagatacagaaaggagaaatttaaatactctgtgtgtgtgtgtgtgtgtgtgtgtgtgtgtgtgtgtgtgtgtctgcagacatctattgggtgtgtgtgctgggggaagtaggtaggcaaggagtaaggggccgtagtgaagagtgtgttacaaacttcactttgtagagggtggctccctgggagaatatgttctgtgtctttcacagtggattttgatagggtcatgtcttaaatgcctcttctcgttttcggatggtgatctcatccagtcttatttctttaagtgccgtctctattctgtcagcccacaaatttatatccccagtccagtccagacctttccctggaatgacatactcaaatctagttgcttactcagcacctcaaacttaggcttttcaaacttgaagtatttatttattgatttatttattttttgagacagagtctcactctgtcacccaggctggaatgcaatggcacgatctcggctcactgcaacctccacctcctgattctcctgcctcagcctcccaagtagctgggattacaagcatgcgccatcatgcccaactaatttttgtatttttgtagaggcggggtttcaccgtgttggccaggctggtctcgaactcctgatctcaagtgatccacctgccttggcctcccaaagtggtgggattacaggtgtgagccaccgcgccaggcctcaaacttaagagtttagaattgagctcctgttagttctgccctccatccctgaccccactcttcaccaaaacatgtccctcccactctctttctcatcttaggacataggagtattgttcattcagttgctcaggtcaaagctgtgagattatctatgatgcctctctgtttcttaccccacacccagccagagtgatcttgttaaaatgttgtttctttgcagtggcctctcctctcatggcacatgcctggccccctgttgcctctctgatgtcactggcttccttgcttttcctggaactcgctaaacatgttccagccccatggcctttgcacacgctctctttgcctagctattcatatgactttcatctctctccatcaggtatttatttaagatcaatttcttggtgaagacttctctcctcacccaatctaaaatttcactctccacctcagcacttcctatccccattctctggtttttctcctcagtagttaattgtcatctaaaacctttgtaaatatttacctgtttatcttctttattattagtagctctgtctaaaatataagttccaggatgtcagggattttgtggggttttttttggttggttggttgttttggttttgagacagggtctcactctgttgcccaggctggagcgcagtggtgcgatctcagctcactgcagcctccgcctcctgggtttgagtgattctcccacctcagtctcccaggaagctggaattacaggtgcacgccaccacacccagctaatttttgtattttttggtagagatggggtttcactatgttggccaggccggtcttgaactcttgacctcaagtgatccacccgcctcggcctcccaaagttctgggattactggtgtgagccaccgcgcccggccttgttttgttttaagacagggtctcactgtcgctcaggctggattgcagtggcacaatcacagctcactgcagcctcgacctgctagacttaagcaatccccccacctcagccaccttagtagctgggacttacaggcatgagagataccatgcctgggtaattgttaagtttttgtagaggtgaggtctcactatattacccaggctggtctcaaagtcctgagcttaagtgatcctccttccttggcctcctaaagtgctgggattacaggagtgaactgccgtgcctgaccagtctgttttgtttacgattgtatcctcagcggttagaacaatgcctgccacaatccatctcagtaaatatttgtggagtgagtcataacatgggccacactgtaccgtgccaccagcccaaagatctcttaaagtcacccctgtctcatgtgcttgggagctccagtgacagtttcggggcagtttgcttccagctgtggtccagccaagcggagtgaatgaaagagatgctttttccttttgtgaaaggacgttttgctctggctcacgtgagcagcagtgcattttgagacgagggccttggcttttggaatctaagagcctgttgagcaagcctcgctcagccaccttctttcagctttctcctgaaggcagtttgaggattaagagcctgatgctctggattccacctaattgggttcagatcctggcaaactgtgtaacctgtgccccagtttcctgtgtaatgtggagagacctggaccttttcttacaggtgtttggagggttaaatgtggcaattcggccgggcgcagtggctcatgcctgtaaccccagcactttgggaggtggaggtgggcggatcaccggaggtcaggagttcaagaccagcctggttaacatggtgaaaccccgtttctactaaaaatacaaaaaattagccgagtgtggtggtgcgcgcctgtaatcccagctagtctggagactgaggcaggagaatcgcttgaacccgggaggcagaggttgcagtgagccaagatcacgccattgcactccagcttgggcaacaagagtgaaactctgtctcaaaaaaaaaaaaaaaaaaaaagtggcaatttacccgaaactgtggtgaagcgtctggcgccctgtgggtgctgggcagcagtgggtgctgatggggtgtgaggggatgggatcaagccctttcccactaacttaggaaagaggttggaatgagctggggtcagagggaacatttgcggggacattttgccgggaggctgccttggaggttcagaggctcagatgacccctgtgttcattcagtgttttctcacccacagattgagcacctgctgtgtggccagccctttgcctagtgctgttcaagagtcagaggacataggcaggcaatcccccaccacaacctgccaccccatttcctctcttggggccttgatttctccacatgccaaacagggagaatgattgcaccttccttgtttctttttttttttttttgagacagtctcactttgtcatccaagctttagtgcagtggcatgatctcggctcactgcagcctctgcctctcgggttcaaagattctcctgcttcagcctcccaagtagctgtgattataggcacccaccatcacgccaggctaattttttttgtagttttagtagagatggggtttttttctcacacgttggccaggctggtcttgaacttctgacctcaggtgatctgcccatctcaccctcccaaagtgctgggattacaggtgtgagccaccgcgcccggctgcgccttccctgtttctttgtgagcttggaggtggatcacaagtgtgaaaccctttgccaaccgtgaggcatggtggccttgtgagaggacggaggccggtgtgtggtggcatgctcccgtgctgtgtggcacagacggagctacaggaaggaagttggggcagcttggcactctgagtggaccctgagtttccagcctgctctgtcttgactgggtgggaggagggtgctcaggagggtgtcactgctgccaggttctgctgccaggaccatccaacagttgttccaatcatgggacatcctgtcgtcagcagctggggctcgtgaggcctgatttccacctcgggcagttctgtgtgtgctcctggaatcccccacgtggccaagcctgtgaggtctgcttcctggcctgctgcctgtgggttcctgtcacgcacctctcgggcagctgtccggctcctctgctctcggcttagtcaagaaggaagcagaaggcttggagtctttcctgcttggactaggagtgagctcagcctaagtgccctgactatatataaagctgaactttccagaccgaagcctggggatggatcagtccgatcacttagggccgctcctgaaggagtgcaggtgctagatacaggttctcccggtggaggagcgaaccccttgtgggccgttagctactggtgggatttgagcatggtatttccctatccgttgtggagaggagcatggcagctcagagtgggtgggaacagtgtgtggtccctgttatcaccttcaagggaataaagtgtgtctgggggcttcagaggtgctggccccatgggcttataggtggttcattcattcattctcattcattcattcaccaaacttattaaacacccactgtgagtcaggaacatcatgccaggtgcttagggaaacaaatcaaagcgggttgggtgagcagcccaagccaacagatgcacccccattctcacatggtgtgtgttcctgtgggctgggccctgggtggtgtggggtgctggggagaagaggaaggcacaccaggctgcagggcggaggtgcgggtatgaattttcagaggagatggcacctgagctgtatcttcatggataagaagagatttgttcatttgtcctttgtggagcacacattcaggttaagaaagtggggaggatgggctacgctgatggagcgtatgtgtggtatccccaagtgcactgagacacgagtttgacgtgttctgggaagatcgatggtgcggcgtggctggagtagaggtgagggatgagttggaggggtgagttgggccagctctcatggatgctggagtctgggctttccctgggaggtcatggggcgccactggccagggtcagcagggagacctgcagctggatttgcatcgtacagtgggcatggaggggtgtcaggctgggttgggaaccgtgcaggctggaagggcactctggtgctctgagcattcagagggggcagctgggccttgaaggatgagcaggggctccagcaggaactggagagcgcattccagggaggacgcaagtgcaggcccctttcactacagaaaagcagttttcacacagaccttccaaaggggaggagaggggactgcctgggcctggcagctgcggcaggtagcagcaatcagagggcagggaccgctcctcccgtgcctgagacctgcccagggtccttcagggaattcgtagctgaggaggaaccagatttttgggactgagttctccctcaccacccgctctgagccaccctcttggtcccttgtcctctactgcacttcttccggggcttggctcctcgtcatgagaggagcttccctgggcatggcgaggggcgtgactgacatagcagccctggacaagtggctccaggtgacctgtgttcacgttgatcacagcactaaccacggcccctcctctcagcaccttcccctctcgagccgtccagtcccagtgaaaatgctcaccgttcatgggtgggctgagcaagcccctgatctctgccttcctccgtgttctgatctgcttcatctgctgtgaaggcctctcgccatttcccccgctggcaaactcctgttcttcctggaaagttcagctaaaaagtcatcccctttaggggtccttccctcaggggaccgtgcacttggcgagacagggactggtcttgggtctctctgttgactgttttatgaacccaggtagtcacttccagggaactcatcagagatgctaccattggctccaatctccctctgttcccactcgaggttttttgtttcttcgtttgtttttctttctttctttttttttgagacagagtctcgctctcgcccaggctggagtgcagtgacatgatctcggctcactgcaagctccgcctcccgggttcacgccattctcctgcctcagcctcccgaatagctgggactacaggcacccgccaccacgcccagctaattttttttgtatttttagtagagacggggtttcaccatgttagccaggatggtctcaatctcctgatttcgtgatccgcccgccttaacctcccaaagtgctgggattacaggcgtgagccactgcgcccagcccgtttgtttttgttttttggtggacatcaactttaatttgccctttgttttgttttgtttttgaggcagggtcttgctctgtctcccaggctggagtgcagtagtgcaatcttggctcactgcagtctcgacctcaagaggatcaagcaatcctcttgccttagcctcccgagtagctgggaccacaggcgcacaccaccatgcccagctaattttattttatattttgtagagacagggttttgccatgttccccaggctggtctcaaattcctgggctcaagcaatccgtctgcctcagcctcccaaaatgctggaattacaggcacgagccactgtgcccggccttaatttgccctttgaacatgtacaattcagggcctctctgggcctcagtttcttgatctctgagatgggaagatgggataataatacttgttcctcccgtccttcagctcctccaggggaccctcacaccagcacactctctgtcagtcttccctcaatgaacccagcaggcaagcttggttttgacagaggatgggtgagcagagataaggaaaacggccagaaatatctggcttccctcagcaggggcaccaaaattggtacctggaaattgcctggcttggacaggcagaattgtcactgtcaacccccaccaccaaaggtcttgggtctttgtctttctgcttgtggtgtttgagagagctgcttgacacagccgaggtgcggtctgtgtcaggtgacctgggcatcctgggggtgcagggagaagcccaggtaaggaggaggaggggccggtcatcagtggggaaaagtgattgtctaccccacgggaaggtcaagggtaggacgctgtgagaagccagggggagagatgaagtgaggcatgatgcggggggccctcatccaccatccccctcttgcagctgtgctgggaagagcctaggctccagggtccaaggtggcagggacagaaggaagcacgtgtgagcactttctccctgctggcccgccttcctggttggcaatgccgtgagtgttccaggatgtggccccgtggctgtcatttcctttcttccacctagtgataacaatggccactgtttgtgtgcccacagtcggcctgtgtcccagacaccttccctccattgcgtcatctcgtcctcctgcctaccctgaaggctggatgccagccaagcctgtcgtttctgtggccatgctgtcgtgggtgtgtggggggcatcccctagccccaggctctggtggggggtacacaggctgggccattgacgaaggggtgtgtggaatctttctttgatttcactgcacccctggtgactttctccctcaatctgaggctcatgggtgctggatgctcttgactctctgcccttcctgggcgcacccctccgcgtccctgtgggcccgtcctcggggtagcctctctgcgctcttccaggccaggcctgagtcccacaggtccccatcttcccggctgcagcccccagaggctcagcctatactgctacttcctttgaaaactataatcgctttacatagcatctggaaaatagggaaaaggaaaaaacaaaagcccataaacccagcaccctcatctactcaatggcatgttttctgtcagtctatcttggtttgttttctatcaggctttgttttttctatgcataatatttactcagttaaatttttgttttgacaaactttctgtgagccaagcttgtggacggagatgaaaagacgagcagctgcctttgagaaactcagactctgggccagcccatctgggtgccagctttcactgctccacccactagctgggtgaccctgggcccgtgactttacccctctgttctttggtgttctcatatgtaaaatgaggataataatagtaaccagttcatagagtggttgtcagacagaatgattaatgtacgtaaagctttcaggatggtgccagcaagatgcacaggagtgtttggtaggaggatgacgaagcttaccgtctggcaggaggggcagttgtaacatgctgggctgtgatagtacagatgtgtttaaagtgagggagagcccagagcaaggagagagaacctggcatctggtgatggtgtatcaagaacattttaggccagacacggtgactcacacctgtaatcccagcactttgagaggctgaggcaggcagatcgcttgaacccgggcgttcgagaccagcctgagcaacgtggtaagaccctgtctttataatttttttttttttttttctgagacggagtcttcactctgtcacctaggctggagtgcggtggtgctatcttggctcactgcaacctccacctcccgggctcaagtgattctcctgcctcagtctcccaagtagctgggattataggtgcccaccaccatgcccagctaatttttttatatttttagtagagacggagtttcaccatgttggtcaggctggtctcaaattcctgacctcaagtgatctgccctcctcagcctcccagagtgctgggattacgggcatgagccaccatgcctggcctctataaaaattgtttggaagaaattacctaggcctggtgatacacacctgtagtcctagctactcaggaggctgaggtggaaggaggtagaggctgcagtgagccatgattgagccactgtactccagcctgggcaacagagccagaccctgtttcaaaacaacaacaacaaaaacatttttaaggaggaggctgagaaccacgagaaccaagcttggatttgaagaaggatcagggctttctcagacagaaaaggagaggaagaacattccagatagacatcattgagagatggcactgagccttgtaatgggacactgcgaacttttcttcagttgttatgatctttttttttttttttttgagacggagtttcgctcttgttgcccaggctggagtgcaatggcgccatctcagctcaccgcaacctccgcctcccaggttcaagcgattcttctgcctcagcctcccaagtagctgggattacaggcatgcgccaccatgcctggctaattttttgtatttttagtagagacggggtttctccatgttggtcaggctggtctcaaactcctgacctcaggtgatccgcccgagtcggcctcccaaagtgctgggattacaggcgtgaaccaccgtgccttgttggtataattattagtattgatcttttttccttttcatgtgcctcttagtgggccccttgcttttgtcttccttctgtccccagggttgatcctgtgctcagcacataggccagggaagaatgtggctgtgacccagtgtccactcagatgtcctctctcccccagggcacccatactctgtccttagtgtcttttgtctggtgacatcttggcacagaggcagagggcggcctccgtctgattggcgcctggctttggtgacagtaccttaggaaggcagtgtattttctgggaacctaggaaataacaaggtatctaattccatcatcaacactggggacaatttccatggcagaaactatgactctgaatatgcagcgtaaagttaccacccagacactgctgctcctgagtctcgaatggcatcttctgcaggggctcccccacctgcccctgcagaaggtgcagttcgttcatttccaaggagcttgcttttgtgtgctgtctctcggagctctttgggaaacctgtggtagcaggaaacaaaggatttagaccaatgccgatgatccccttgctccgatagagtgtgacatgatgctggtcaccttttggtatctaggaggggggacattgattttgtttgcggaagtgaaatgatccatgctggcctctttttttttttttttttttgagacagagtcaccctatcgcccaggctggagtgcagtggcgcgatctcagctcactgcaacctctgcctcccgggttcaagtgattctcctgcctcagcttcccgggcagctgggactacaggcgcctgccaccacatctggctaatttttgtatttttagtagaggcagggtttcgccatgttggccaggctggtctcgaatttctgacctcaaatgatccgcccgcctcagcctctcgaagtgctgggattacatgcctgagccactgtgtctggtccatactagcctctttgagtgctgaaaggttatctctgtaacttatttagtgagaaccctccatttgcccagggcattactgcctataatgtatgttcacatgtgctatctcctttggtcaataccacacactacaggtgaggaaactgagtctctgctgggacactgggtcaggaagcaggcagttaaggtcacctgtgcacagtggcagcacagggggacagccttctaggtagccagcctggcctgagggttctgtcacttttacctcccactcagtgttgtttctctttctttcccctccttttaagatccctccaggcccaggatctggggacaacgctggtggggagtgatctgggtgtctgtgcaggaaaccgctgcactgggtgagatgggcatgggagactgtgcctggctgaccagagacctcgttttcttccagacagagggggaagacggtggggcctccccacctgccccgcagaagatgcagttctttggccgcctggtcaataccttcagtggcgtcaccaacttgttctctaacccattccgggtgaaggaggtggctgtggccgactacacctcgagtgaccgagttcgggaggaagggcagctgattctgttccagaacactcc

SEQ ID NO: 15722 - DNA, 70219 bp, Homo sapiens
tttgcggaagtaggaggaagtagaagtgctgagtaagccgaggtgagtgacctcgcgggtgggcggggcctgggggtccgttccccaacttcctcggcgctccggactcccaagtctccgccggaccctcctttggatattcctcgtgtctccgattctgaggcatgtcctccattaacccttatgtgactccctgagtgcccccaccttccatcttttcatccccctgcgtccccaattcccatcccgagaccgcccgtgtctcatctcgaacttgtggaccccagggaccccagcttcgaccctgagtttctcccctgaaccccagtctcctccgtgtgtctccctcagtatccctaacttcccgagtcaatccatctcttctctttccccgaccctcagtgcctctttaggccccattggccgtcctaattttccttcctgtgctcctctaagtgctcacttgattccccacttcacgtccgtctccacctttcgtggtgcctctactcatttctcactccctgcttctcctgcctttcctccctgctttttttccttgcctttcctctctcgcgtgcctccagacctgcccccgacatgctccctccttcccctcagcctggccaccccagagtctcccacccctaatcctgtgtccacctcctgctcccacagatgacttggaagctggtgacagggagcatgtgaccagggtgatcatgggactgggtcggggcaagcctgtgggtgtgggacagggagggcacagggcaaggggacctgtggccgtatttttaatgggctacccacatgaccccaacgaatacctccccctagcttctgggtctttccctcacctgcctcttacccgcccaacaggatgtcaggcaggttcggtttggcaacgttgaggctgcacccttgggctgaatgcattgtttttgaatgcattgtttttgttagagtttctgcctggagtttggaacctgttttctgtccaagtctcagtttcctcatctgtgacaggggaactgtacctcctgccctcgtaagtctgccatgaggttcaaaatttgaatgagaaaatgtagaaggtaaagctttataaccagtatggccctgtacaaatacatgattttactgttgggtcataggcagaattgaaaggagtggaaagggaaagggctagaatgagaagacaaggagagaaggatgagcaggaggtcccttgtctttcagtgtatcatttggcagtgtttgttcatcacctcttgtgagtcaggctcttctgtatatgttctcttcaccattcattcagtcatcgtttatctaacaaatatttacggactgtctgatgttctaggctacccttggtgtggccaatgatattctcacttcacatgagaaaaagagggcgcatgagttgcttgaggtcacaccgatgaggttgaagctggaatctgacaccagagcctgtgtgattgtcctgatgtgtaaggtttgctactgtttaggacacttcttgttccttccgtggattactttcttgttacatgagagactccccaaaagggagtttccctcttactcagcagaatgacatcactaagagatacagaaaggagaaatttaaatactctgtgtgtgtgtgtgtgtgtgtgtgtgtgtgtgtgtgtgtgtgtctgcagacatctattgggtgtgtgtgctgggggaagtaggtaggcaaggagtaaggggccgtagtgaagagtgtgttacaaacttcactttgtagagggtggctccctgggagaatatgttctgtgtctttcacagtggattttgatagggtcatgtcttaaatgcctcttctcgttttcggatggtgatctcatccagtcttatttctttaagtgccgtctctattctgtcagcccacaaatttatatccccagtccagtccagacctttccctggaatgacatactcaaatctagttgcttactcagcacctcaaacttaggcttttcaaacttgaagtatttatttattgatttatttattttttgagacagagtctcactctgtcacccaggctggaatgcaatggcacgatctcggctcactgcaacctccacctcctgattctcctgcctcagcctcccaagtagctgggattacaagcatgcgccatcatgcccaactaatttttgtatttttgtagaggcggggtttcaccgtgttggccaggctggtctcgaactcctgatctcaagtgatccacctgccttggcctcccaaagtggtgggattacaggtgtgagccaccgcgccaggcctcaaacttaagagtttagaattgagctcctgttagttctgccctccatccctgaccccactcttcaccaaaacatgtccctcccactctctttctcatcttaggacataggagtattgttcattcagttgctcaggtcaaagctgtgagattatctatgatgcctctctgtttcttaccccacacccagccagagtgatcttgttaaaatgttgtttctttgcagtggcctctcctctcatggcacatgcctggccccctgttgcctctctgatgtcactggcttccttgcttttcctggaactcgctaaacatgttccagccccatggcctttgcacacgctctctttgcctagctattcatatgactttcatctctctccatcaggtatttatttaagatcaatttcttggtgaagacttctctcctcacccaatctaaaatttcactctccacctcagcacttcctatccccattctctggtttttctcctcagtagttaattgtcatctaaaacctttgtaaatatttacctgtttatcttctttattattagtagctctgtctaaaatataagttccaggatgtcagggattttgtggggttttttttggttggttggttgttttggttttgagacagggtctcactctgttgcccaggctggagcgcagtggtgcgatctcagctcactgcagcctccgcctcctgggtttgagtgattctcccacctcagtctcccaggaagctggaattacaggtgcacgccaccacacccagctaatttttgtattttttggtagagatggggtttcactatgttggccaggccggtcttgaactcttgacctcaagtgatccacccgcctcggcctcccaaagttctgggattactggtgtgagccaccgcgcccggccttgttttgttttaagacagggtctcactgtcgctcaggctggattgcagtggcacaatcacagctcactgcagcctcgacctgctagacttaagcaatccccccacctcagccaccttagtagctgggacttacaggcatgagagataccatgcctgggtaattgttaagtttttgtagaggtgaggtctcactatattacccaggctggtctcaaagtcctgagcttaagtgatcctccttccttggcctcctaaagtgctgggattacaggagtgaactgccgtgcctgaccagtctgttttgtttacgattgtatcctcagcggttagaacaatgcctgccacaatccatctcagtaaatatttgtggagtgagtcataacatgggccacactgtaccgtgccaccagcccaaagatctcttaaagtcacccctgtctcatgtgcttgggagctccagtgacagtttcggggcagtttgcttccagctgtggtccagccaagcggagtgaatgaaagagatgctttttccttttgtgaaaggacgttttgctctggctcacgtgagcagcagtgcattttgagacgagggccttggcttttggaatctaagagcctgttgagcaagcctcgctcagccaccttctttcagctttctcctgaaggcagtttgaggattaagagcctgatgctctggattccacctaattgggttcagatcctggcaaactgtgtaacctgtgccccagtttcctgtgtaatgtggagagacctggaccttttcttacaggtgtttggagggttaaatgtggcaattcggccgggcgcagtggctcatgcctgtaaccccagcactttgggaggtggaggtgggcggatcaccggaggtcaggagttcaagaccagcctggttaacatggtgaaaccccgtttctactaaaaatacaaaaaattagccgagtgtggtggtgcgcgcctgtaatcccagctagtctggagactgaggcaggagaatcgcttgaacccgggaggcagaggttgcagtgagccaagatcacgccattgcactccagcttgggcaacaagagtgaaactctgtctcaaaaaaaaaaaaaaaaaaaaagtggcaatttacccgaaactgtggtgaagcgtctggcgccctgtgggtgctgggcagcagtgggtgctgatggggtgtgaggggatgggatcaagccctttcccactaacttaggaaagaggttggaatgagctggggtcagagggaacatttgcggggacattttgccgggaggctgccttggaggttcagaggctcagatgacccctgtgttcattcagtgttttctcacccacagattgagcacctgctgtgtggccagccctttgcctagtgctgttcaagagtcagaggacataggcaggcaatcccccaccacaacctgccaccccatttcctctcttggggccttgatttctccacatgccaaacagggagaatgattgcaccttccttgtttctttttttttttttttgagacagtctcactttgtcatccaagctttagtgcagtggcatgatctcggctcactgcagcctctgcctctcgggttcaaagattctcctgcttcagcctcccaagtagctgtgattataggcacccaccatcacgccaggctaattttttttgtagttttagtagagatggggtttttttctcacacgttggccaggctggtcttgaacttctgacctcaggtgatctgcccatctcaccctcccaaagtgctgggattacaggtgtgagccaccgcgcccggctgcgccttccctgtttctttgtgagcttggaggtggatcacaagtgtgaaaccctttgccaaccgtgaggcatggtggccttgtgagaggacggaggccggtgtgtggtggcatgctcccgtgctgtgtggcacagacggagctacaggaaggaagttggggcagcttggcactctgagtggaccctgagtttccagcctgctctgtcttgactgggtgggaggagggtgctcaggagggtgtcactgctgccaggttctgctgccaggaccatccaacagttgttccaatcatgggacatcctgtcgtcagcagctggggctcgtgaggcctgatttccacctcgggcagttctgtgtgtgctcctggaatcccccacgtggccaagcctgtgaggtctgcttcctggcctgctgcctgtgggttcctgtcacgcacctctcgggcagctgtccggctcctctgctctcggcttagtcaagaaggaagcagaaggcttggagtctttcctgcttggactaggagtgagctcagcctaagtgccctgactatatataaagctgaactttccagaccgaagcctggggatggatcagtccgatcacttagggccgctcctgaaggagtgcaggtgctagatacaggttctcccggtggaggagcgaaccccttgtgggccgttagctactggtgggatttgagcatggtatttccctatccgttgtggagaggagcatggcagctcagagtgggtgggaacagtgtgtggtccctgttatcaccttcaagggaataaagtgtgtctgggggcttcagaggtgctggccccatgggcttataggtggttcattcattcattctcattcattcattcaccaaacttattaaacacccactgtgagtcaggaacatcatgccaggtgcttagggaaacaaatcaaagcgggttgggtgagcagcccaagccaacagatgcacccccattctcacatggtgtgtgttcctgtgggctgggccctgggtggtgtggggtgctggggagaagaggaaggcacaccaggctgcagggcggaggtgcgggtatgaattttcagaggagatggcacctgagctgtatcttcatggataagaagagatttgttcatttgtcctttgtggagcacacattcaggttaagaaagtggggaggatgggctacgctgatggagcgtatgtgtggtatccccaagtgcactgagacacgagtttgacgtgttctgggaagatcgatggtgcggcgtggctggagtagaggtgagggatgagttggaggggtgagttgggccagctctcatggatgctggagtctgggctttccctgggaggtcatggggcgccactggccagggtcagcagggagacctgcagctggatttgcatcgtacagtgggcatggaggggtgtcaggctgggttgggaaccgtgcaggctggaagggcactctggtgctctgagcattcagagggggcagctgggccttgaaggatgagcaggggctccagcaggaactggagagcgcattccagggaggacgcaagtgcaggcccctttcactacagaaaagcagttttcacacagaccttccaaaggggaggagaggggactgcctgggcctggcagctgcggcaggtagcagcaatcagagggcagggaccgctcctcccgtgcctgagacctgcccagggtccttcagggaattcgtagctgaggaggaaccagatttttgggactgagttctccctcaccacccgctctgagccaccctcttggtcccttgtcctctactgcacttcttccggggcttggctcctcgtcatgagaggagcttccctgggcatggcgaggggcgtgactgacatagcagccctggacaagtggctccaggtgacctgtgttcacgttgatcacagcactaaccacggcccctcctctcagcaccttcccctctcgagccgtccagtcccagtgaaaatgctcaccgttcatgggtgggctgagcaagcccctgatctctgccttcctccgtgttctgatctgcttcatctgctgtgaaggcctctcgccatttcccccgctggcaaactcctgttcttcctggaaagttcagctaaaaagtcatcccctttaggggtccttccctcaggggaccgtgcacttggcgagacagggactggtcttgggtctctctgttgactgttttatgaacccaggtagtcacttccagggaactcatcagagatgctaccattggctccaatctccctctgttcccactcgaggttttttgtttcttcgtttgtttttctttctttctttttttttgagacagagtctcgctctcgcccaggctggagtgcagtgacatgatctcggctcactgcaagctccgcctcccgggttcacgccattctcctgcctcagcctcccgaatagctgggactacaggcacccgccaccacgcccagctaattttttttgtatttttagtagagacggggtttcaccatgttagccaggatggtctcaatctcctgatttcgtgatccgcccgccttaacctcccaaagtgctgggattacaggcgtgagccactgcgcccagcccgtttgtttttgttttttggtggacatcaactttaatttgccctttgttttgttttgtttttgaggcagggtcttgctctgtctcccaggctggagtgcagtagtgcaatcttggctcactgcagtctcgacctcaagaggatcaagcaatcctcttgccttagcctcccgagtagctgggaccacaggcgcacaccaccatgcccagctaattttattttatattttgtagagacagggttttgccatgttccccaggctggtctcaaattcctgggctcaagcaatccgtctgcctcagcctcccaaaatgctggaattacaggcacgagccactgtgcccggccttaatttgccctttgaacatgtacaattcagggcctctctgggcctcagtttcttgatctctgagatgggaagatgggataataatacttgttcctcccgtccttcagctcctccaggggaccctcacaccagcacactctctgtcagtcttccctcaatgaacccagcaggcaagcttggttttgacagaggatgggtgagcagagataaggaaaacggccagaaatatctggcttccctcagcaggggcaccaaaattggtacctggaaattgcctggcttggacaggcagaattgtcactgtcaacccccaccaccaaaggtcttgggtctttgtctttctgcttgtggtgtttgagagagctgcttgacacagccgaggtgcggtctgtgtcaggtgacctgggcatcctgggggtgcagggagaagcccaggtaaggaggaggaggggccggtcatcagtggggaaaagtgattgtctaccccacgggaaggtcaagggtaggacgctgtgagaagccagggggagagatgaagtgaggcatgatgcggggggccctcatccaccatccccctcttgcagctgtgctgggaagagcctaggctccagggtccaaggtggcagggacagaaggaagcacgtgtgagcactttctccctgctggcccgccttcctggttggcaatgccgtgagtgttccaggatgtggccccgtggctgtcatttcctttcttccacctagtgataacaatggccactgtttgtgtgcccacagtcggcctgtgtcccagacaccttccctccattgcgtcatctcgtcctcctgcctaccctgaaggctggatgccagccaagcctgtcgtttctgtggccatgctgtcgtgggtgtgtggggggcatcccctagccccaggctctggtggggggtacacaggctgggccattgacgaaggggtgtgtggaatctttctttgatttcactgcacccctggtgactttctccctcaatctgaggctcatgggtgctggatgctcttgactctctgcccttcctgggcgcacccctccgcgtccctgtgggcccgtcctcggggtagcctctctgcgctcttccaggccaggcctgagtcccacaggtccccatcttcccggctgcagcccccagaggctcagcctatactgctacttcctttgaaaactataatcgctttacatagcatctggaaaatagggaaaaggaaaaaacaaaagcccataaacccagcaccctcatctactcaatggcatgttttctgtcagtctatcttggtttgttttctatcaggctttgttttttctatgcataatatttactcagttaaatttttgttttgacaaactttctgtgagccaagcttgtggacggagatgaaaagacgagcagctgcctttgagaaactcagactctgggccagcccatctgggtgccagctttcactgctccacccactagctgggtgaccctgggcccgtgactttacccctctgttctttggtgttctcatatgtaaaatgaggataataatagtaaccagttcatagagtggttgtcagacagaatgattaatgtacgtaaagctttcaggatggtgccagcaagatgcacaggagtgtttggtaggaggatgacgaagcttaccgtctggcaggaggggcagttgtaacatgctgggctgtgatagtacagatgtgtttaaagtgagggagagcccagagcaaggagagagaacctggcatctggtgatggtgtatcaagaacattttaggccagacacggtgactcacacctgtaatcccagcactttgagaggctgaggcaggcagatcgcttgaacccgggcgttcgagaccagcctgagcaacgtggtaagaccctgtctttataatttttttttttttttttctgagacggagtcttcactctgtcacctaggctggagtgcggtggtgctatcttggctcactgcaacctccacctcccgggctcaagtgattctcctgcctcagtctcccaagtagctgggattataggtgcccaccaccatgcccagctaatttttttatatttttagtagagacggagtttcaccatgttggtcaggctggtctcaaattcctgacctcaagtgatctgccctcctcagcctcccagagtgctgggattacgggcatgagccaccatgcctggcctctataaaaattgtttggaagaaattacctaggcctggtgatacacacctgtagtcctagctactcaggaggctgaggtggaaggaggtagaggctgcagtgagccatgattgagccactgtactccagcctgggcaacagagccagaccctgtttcaaaacaacaacaacaaaaacatttttaaggaggaggctgagaaccacgagaaccaagcttggatttgaagaaggatcagggctttctcagacagaaaaggagaggaagaacattccagatagacatcattgagagatggcactgagccttgtaatgggacactgcgaacttttcttcagttgttatgatctttttttttttttttttgagacggagtttcgctcttgttgcccaggctggagtgcaatggcgccatctcagctcaccgcaacctccgcctcccaggttcaagcgattcttctgcctcagcctcccaagtagctgggattacaggcatgcgccaccatgcctggctaattttttgtatttttagtagagacggggtttctccatgttggtcaggctggtctcaaactcctgacctcaggtgatccgcccgagtcggcctcccaaagtgctgggattacaggcgtgaaccaccgtgccttgttggtataattattagtattgatcttttttccttttcatgtgcctcttagtgggccccttgcttttgtcttccttctgtccccagggttgatcctgtgctcagcacataggccagggaagaatgtggctgtgacccagtgtccactcagatgtcctctctcccccagggcacccatactctgtccttagtgtcttttgtctggtgacatcttggcacagaggcagagggcggcctccgtctgattggcgcctggctttggtgacagtaccttaggaaggcagtgtattttctgggaacctaggaaataacaaggtatctaattccatcatcaacactggggacaatttccatggcagaaactatgactctgaatatgcagcgtaaagttaccacccagacactgctgctcctgagtctcgaatggcatcttctgcaggggctcccccacctgcccctgcagaaggtgcagttcgttcatttccaaggagcttgcttttgtgtgctgtctctcggagctctttgggaaacctgtggtagcaggaaacaaaggatttagaccaatgccgatgatccccttgctccgatagagtgtgacatgatgctggtcaccttttggtatctaggaggggggacattgattttgtttgcggaagtgaaatgatccatgctggcctctttttttttttttttttttgagacagagtcaccctatcgcccaggctggagtgcagtggcgcgatctcagctcactgcaacctctgcctcccgggttcaagtgattctcctgcctcagcttcccgggcagctgggactacaggcgcctgccaccacatctggctaatttttgtatttttagtagaggcagggtttcgccatgttggccaggctggtctcgaatttctgacctcaaatgatccgcccgcctcagcctctcgaagtgctgggattacatgcctgagccactgtgtctggtccatactagcctctttgagtgctgaaaggttatctctgtaacttatttagtgagaaccctccatttgcccagggcattactgcctataatgtatgttcacatgtgctatctcctttggtcaataccacacactacaggtgaggaaactgagtctctgctgggacactgggtcaggaagcaggcagttaaggtcacctgtgcacagtggcagcacagggggacagccttctaggtagccagcctggcctgagggttctgtcacttttacctcccactcagtgttgtttctctttctttcccctccttttaagatccctccaggcccaggatctggggacaacgctggtggggagtgatctgggtgtctgtgcaggaaaccgctgcactgggtgagatgggcatgggagactgtgcctggctgaccagagacctcgttttcttccagacagagggggaagacggtggggcctccccacctgccccgcagaagatgcagttctttggccgcctggtcaataccttcagtggcgtcaccaacttgttctctaacccattccgggtgaaggaggtggctgtggccgactacacctcgagtgaccgagttcgggaggaagggcagctgattctgttccagaacactcccaaccgcacctgggactgcgtcctggtcaaccccaggaactcacagagtggattccggtgggtgatgctcagcgggaacatacttctctcctttcactcccccacgtctcggattggaggtcttattggccgagaagcagtttctttgagtctctgtctgaggggtctggagaggggtgggagagaggggagactgtactcttggaccagagggaagggcttccgagactccacacttctggcccatcagtgtcccagcacgaggctgaggatggaagcctgggttgtttctggcctggaggctcgacctatatggacaaagggaagaaggaaggacagggagactgagagtgtccacatcagataaggcccatggggagaacctttagccctggctctttatttttggttttggtttttgttttttgagacagtcttgctctgttgcccaggctggagtgcagtggcgcaatctcggctcactgcaacctctgcctcccaggttcaagcgattctcctgcctcagcctcctgagtagctgggattacaggcacccaccaccacgcccagctgatttttgtatttttagcagagacggggtttcatcatattggccaggctggtctcaaactcctgacctcaggtgatctgcccaccttggcctcccaaagtgctgggattgcaggcgtgagccactgcacctggcctagccctggctctttaagggcatggccgttctcataggggctgcccagggtttgcttaggaaggctggacagagctgttgcctcttggggcatgctgggactcccctgggcctgaagagaaggctcaaaagccaggacaggcctgagggaaccgggccaacggcagagctggttgggaaaaggggagaagcagccaaggttccaaatgcaggccccagcagtgcttggcagactggcatctagttgggctcagacagatatccctgtttccgctcacctatccatctggctgtcctgtcagccatccattcaacatgcaccaagcacctccagtgtctccagagtcctgggcttcgggccagtcctggctggcctgtgagatgacaaacatgtcctgtgtctttaaggaacgtacagtctggtgggggaggtccggtgcaaacaggcgtcatagcaccccttgaggagtgctgtgacagagggagagcctaggaaacagtgtggatcacaaggaggtgattgagagctactctgcgtctggaagagtgaggaggagcctgtgtggcagaacaaaatggataaggtcgttccagccgtgcagaagtgtggaggtgtgagcctgcaggcaggtggctctggttggatcccaggtgcatgcagggctttggtgagagtgaggctgaaggaagcagctggggactcattctgactaaagaggcatggcaggaggggtctctgaaagtgtcaggctgggggccaggggctgccaccaacagaagagcaaggcaggtatcagggccccatccaatcaggtgagaattcagagcctggctccacaaggaacctgaggcagaggcacccacagcaggtgcttgggctaaatgcagctcagtggccagtgcaggcaccagttttaatacagtggggccattccagattctgagtgcagatggggctgagcagaccgccttccagctggactcgatcaggactgaccctggacggggcaggcttgcacttgtagcttcagagctccactgcaggcacagctgaccagggcagcgggtccactccttggagagctggacagccccacttttgaggtacacggccctggggataccactaatctccacgtaccaataatcaccaagttctgtcagttgtaaaatcccttgacaggattccagatttgtctcagccagcttaagccccagtgtgggcagacctccatcccaggaggatttagtcctttgtcagcagcttcttagctacacgtaagctattctgtggtactttatagtttacaggattttttgttttcttttttttttttttttgagacagagtctcgctctgtcacccaggctggagtacagtgacgcgatctcggcttactgcaagctccgcctcccaggttcacgccattctcctgcctcagcctcccaagtagctgggactacaggcacccgccaccacgcctggctaatattttgtatttttagtagagatggggtttcaccatgttagccaggatggtctcaatctcctgacctcgtgatccgcctgcctcggcctcccaaagtgctgggattacaattttacaggatgtttttaagtatgttgggttagcacattctctgccaatccgtggaggtgggcaaggaaggcagtattccattttatgcatgagaaaatagccttgggatgataagtgattcatcccacttatacacaggaagcagtgaagaaacagaatcagtgtcttctggttcccaattcatttctctgtgctgctgtgttgtttccatgtatgtatgtatgtatttatttttttgagacgttaagtcttgctctgttgcccaggctggagtgcagtggcatgatcttggcttacagcaacctctgcctcctgggttcaagctattcttctgcctcagcctcccgagtagctgagactacaggtgcgtgccaccatacctggctaatttttgtgttttttagtagagacagggtttcactgtgttagccaggatggtcttgaactcctgacctcgtgatctgcctgccttggcctcccaaagtgctgggattacaggcatgagtcaccatgcccggctttgtttgtcttatttctaaattttattgatttatttattttcacagtcatagctctggagtcttttttatcttctcccctctaacctgctcccacccgaacctttccatttcagcagatagcatcattgcaacgggctgtgccagatccagccatcacatccacctttccagccaaagggagggtggaagggcaggatgcagaaggtcaatctccccctcctcagggacatttcatggaagttgcacgcattggccagaacccggtcacatggccacagctaactgcaaaggatgctgggaagtgttgcctgtgttgcagacagccacgtgccagtcgaaaatcagaggttctttctccctccgtcttgctgctggctcgcttctccagaccacagtcattgtgcacgtgtctcctgctgctccggctgtggcctgcactcctctcatcctcttccaagctgctgtcacagcgctgtttccagagggcaaatctgattggtcactcccctgctttactccccaagggcttcctgttttcttttatttttatttttattttcattttttgagatggagtctcgctctgtcgctcaggctggagtgcagtggcacaatgtcagctcactgcaagatctgcctcctgggttcatgccattctcctgcctcagcctcccaagtagctgggactacaggcgcccgccaccacgcccagttaattttttttgtatttttagtagagacggggtttcaccatctactcttagccaggatggtctcgatctcctgaccttgtgatctgcccgcctcagcctcccaaagtgctgggattacaggagtgagccaccgcgcccggccagcttcctgttttcttaacacatcaggtgcttaatgacttaaaagggcccagtgtgatcaagtttctgcctctgtgttctcagctcatgccgccttgtgctcctggcctttgcccaggctcttgctgtggcctggaatactcccctttctttgcctgccttccttcctcttgccctcccctgacctgcaggctggattaggagtttctgctgggcatcccatggcacccgtccctgcactggggatcctgctttcctggtaggccacagaccttgtgaggggagggactgtgtctgttgggttcatgacagtgtgcccagcccccagcaggtgcctggcgtagatcaggtttgtggaacaaatgaatgtgatatattaatttagctttagagtattcattgagggctgctgtgtgccaggccctctgtgccacctgggtggagggtggaggactgttgcattgagggcagttgaaggagtgagctgggaagtgggaggtggaggatggggactgggatgcagggtttgaggttatcaggggtcccagaagcagtaatgccaaggcctaggctgtgacctggagtgagggctgcgatggggtggggtggggtcgaggctgtggaggagggtcatcagggcactgctggagccctggggttctccagggccgggggtggtcattgcagtgttctcccagctcctctcaacaccctgcggtctgtggagagcaggcctggtgcactggacttgcctctggccagggctgagtttctgccttctaaacgatcttcctcctgtgttgccctagaggcctctggactgtcctgagtacttgacgcgtgttagagtgagcatgggctgctagccttccgctccaggtggaggagtttctgttgttcttttgctgctgttgctgcagtgagctgccaggctgagcttctggatggacctgggggatggaattaggagcttctgaattcttgggttgtataacctaaggccggagagtcccacagcactgctgctgggcggagagactggaccctgctgatacagacagcgacagcagcaggagcatctgcagtttcccagcaggtcctgcatgcctgggcttggcactagtctaagtagtaactcatgttatcctcacgacagtcccacgaggtggggtcattactgacctcctattacagatgaggaaacagaggcttgcagaatttgagatcacacagctggtcagcgtagcgattattcagaccctgtcacctggctccagaacccactcgtttacctttcttacatcagggctgctttgtagtgtggcgagctgagtggagctccacccgcctgggctgatcctggcccttcctgcctgacctatggtgcgggggccctggctctccccgtgtgagcccccaggggtcacttgtaatatgcctgtgtacactatgatagcatagatacttctgttcctggtacagattaatcatttacggctggcattgacttgtaacagatgacatttgatgaaatcaaccagcctctcactggtatctcagcagaaacagggctgtacctcccaggcatcctgggaaggatgatagaagtgtgtgatctgtgcttccctaccgggagctgacttttgaggctctctggactgggactttgccataaaactgcttatcagaaacctcagataagtggagtgccctgtgtcctggccacgtactctggggccagctcctccatccattcagtcctcccacatcccatcttcaccaagcagagtggaaagcggcaggtctctgcgagaaaaggaggctctgtacccagccttcagtgagataactttagagtggggccttgtattccctacacaggccttgtccccgacacggcctctttgcccttgcttctccttctgctaagaatgctccttcccaactccttggctggacacacggctcctgctctgtgggcctgtcctgttcccactcagagcctcagcaccccccatgtggccaagacacagcccctcttgccttaggttgccgtgggtctgtttccacatctgtttcccctccagactgcagggctcctgagggacagggcctggggccaagtctcctctgcgttcctgatgcctggtggtgtgccacgctctccgtgggtgcacggtaaatatctgccgagtggctagatgtatccatggttgctgaaggccaagtgtgttgaccagagggcgtgggaaaggctccactggggtggctggggtagagatagaccttaaggggtccagaagactccaccagctggagggaaaggccctacagagacaaggtactaggaaaggcccagaggacagaggaggggccctgtggggagcctgtgggcaggaagggcctgtgctgggctttgaaactggggactcaggtactgctctagcgtgagggtccttggcattttttttggtccaggaccccctgaggtccctggggaatgagaacaggctcacacagccactttcaagaggtttgcaggtcccctgaggcttagccacagacccctcccaccccagcagagacacagcagaggcttctgagtggaggccaggtggcttcagcctggggttctagaagggagggaagagacacacccccgtgtgtcctccagagcctcagccttctccctgaatctcccctttgcctcctcactgtaacccacacctggctctccttgaaggacccgcttgccccgcagcctcctgagagttttctctcccagtccctctcccactgggcctggaggtggggtagggtcctccttgcccccagccttgaatcttctgtcaccctacaataccacttgctgtcaccccggtgataggtatctacgagcctggggtgctcccccacatcctcaaagatgtgagcccctgactcagcgttgcctctggttcctgaccctccacattcacatgaccacgcgctggcctttatcatcgccagtgacagcagctctcccgtaaatacaagtttcaagcaccccactttccagtctctgccttctgtctttccagttcattccctctagtcctccacccacacagtgcttttccccattgacagggaattgctcctggccgcttttcccagccccatcccgttcatgtgccttgctttgtacccagcatggactccatggcctgtcattgtcactccttcacctatacttcctgcctccttgcttctctctctcttcgtcatcctggcatcaccaccccagaactgcttggtttcagttctccaccatggctaggggaacatacctttttgctgactgctctcactttctttttttttttttttcttttttttttttttgacacagagtctcgctctgttgcccaggctggagtgcagtggcacactctcagctcactgcaacctccacctccggggttcaagcagttctctctgcctcagcctcctgagtagctggtattataggcacccgccaccacacccggctaatttttgtattttttttagtacagacagggttttgccatggtggccaggctggtcttgaactcctgacctcaggtgatatgcctgccttggcctcccaaagtgctgggattacaggcatgaaccaccctgcccggccctattgctctcactttgaaatcacgacatgagccacagtgagcctatgatgtggtttgacgtctttctgcatttctctgttcacccctctcccagaaggcatgcctccttccctcccctcagcctgcagccccttcccctccacgcttactctcagctgatagccctgctgctgtctcgctgagaaaatagaaatagccagaggagaattccctctaccccatgcacacacctctgtccccgcctactccacattccctgttgtcagcaccgatgtgtttagctgagggtggtccccccattcaaggccatcatctcctgtcatctacttcttgacaccatttgaacaattatctcccctctttcctacataacactttccccttttctactatatattttttgctatggattgaaagtatccccccgaaatcatatgttgaagccccaatccctcgtgtgatggtattaggaggtagagcactatgggggtgattaggtcatgaggatggagccctcatgaatgggattagtgcccttagacgaagaggcaagaaagagatgatctgtctctgccatgtgagggcacaacgagaagatagccatctgcaaaccaggaagtgaaccctcatcaggaactctatcagccagcaccttgatcatagacttcctagcctctagaactgtgagaaataaaggttgtttaagcctcccagtctgtagttttctgttataatgtcctgacctaagttattttccatcgctatacaatgggttatttttttctttaaaaaaaaattatttcttgactctactttttcctccagagactgcttatattccactgtcttcattcttctcctcctgttttctctctttaaacttttcaaaaatagcaaaatataacacatatagagaaaatgatatacagctcagtgatttatcacaaacacctgtgtaaccaccactcgaatctagagataggacattacagcaccccagaagccctccttttgtcccctcttcccaaagaagggtaaccaataacttgccttttatgataaaggctttttttttttgagatggagtctcactgtgttgcccaggttggagtgcggtggcgcaatctctgcttactgcaagctctgcctcctgggttcacgccattctcctgcctcagcctcctgagtagctgggactacaggtgcccgccaccacgcccggctaattttttgtattttagtagagacgaggtttcaccgtgttagccaggatggtcttgatctcctgacctcgtgatccacctgcctcagcctcccaaagtgctgggattacaggcgtgagccaccgcccccggccaagataaaggcttttctatctggcttctttgttagcattttgttggcgagattgatacgttttgtgtgcagctgtctgtcattttcattgcaatagaattccattgtctactatatcacagttactcattctactactgatgaaaatttgggttatttctagtttttttggtgcatacatgcatacatttctggtagacatacctagaagtgaactggctgcattatgggccataacttgtcttcaacgttagtaaataataccgcccgtctgttttccaagcagcagtaaatggcactttctgttacttcatatcttctgttacttggtactgtcaggttttaaaattttagtcattctgtcgggtgtctagtagtatgttattgtggttttattttgcatttgcctgattgcaaatgaagttgagcactttttgatacagtgattaaccatttggatatcctcttcagtgaagtatcagctcaattctcttgactatttaaaaaataaagttgtttatctttttcttacagagttttaggaggagttttttggtacatgtgcagtccaaatacacaccttttgtcagtgatacgtgttcagctgcacacacggtgttttgcctttttattcttttaatggtatctattgataaacatgagttcttagttttaatgaagtcaaatttgttcatcttctttacggtgtactttttgtgtcttgtttaaggaagtccttctctatcttaaagctttgagaagcattccttctttctcctattttctaaaaattgttgaagatctccttccttccttccttccttccttccttccttcctttcatctatctctctctcacccaggccaaacttcagtggcatgatcatggctcactgcagcctcaacttcccaggctcaagtgatcctcctgcctcagcctcctgagtagccaggactacaggcacgcaccaccatacctggctaattttaaaaattttttgtagagacacggtctcatcaagttacccaggctggtcttgaactcctgggctcaaacaatcctcccacctcagcctcccaaagtgctgggattacaggcatgagtcacatgtctagcctgtattctttctttcttaaatgtttggaagaattcatgggtaaaaccatgtgaccctggagtttatttgtgggaagcttttaaaacatggattcgatttctttaacaaatataggactatgagattttcatctcatgtcggtttgggtatgttgtgttttcaaggaatttttctattttatcgaagttgtcaaatttgtctgcaggtccccttatttcctttttaatgtatggaggatctgaagggatggtactttgtgttgtctctatttcttgtttggttttgctagtgatttgccaatttaaaaaatctttccaaagaaccaacttttggctttgtttattttttgaaaacctgagtagctgggattacaggcgcccaccaccacacccggctaatttttttatttttagtagaggtggggtttcaccatattggccaggctggtctcgaactcctgacctcagatgatccacccgcctcggcctcccaaagtgctgggattacaagtgtgagccagtgtgcctggcaagccgctttttaaatggcaccaatcccattcatgagggcagagccctgatgatcgaattacctcctaatggccccatttcttaatactatcacactgagaattaagttttaacataagaattttaggaagacacaaacattcagaccatggaacatatataaaacagttgtcctaccaactaacagaatacacattcttttcaagaacacctatataaaaattatagacactgacctatgctggccataaagcaaatatgaacaaatttcagatacctgaagagatttagactatgttctccaactacagtgcaattaagctagaaatcaatagcaaaaatgtaactataaatgagcccgtatgtttgaattttaagcaagatatatgtaaattatctatggttcaaaaaagaagtcacagtgaaatttagaaaatatcttgacgtggcgggttgcagtggctcacgcctgtaatcccagcactgtgggaggccaaggcgggtggatcacctgaggtaaggagtttgagaccagcctggccaacatggtgaaaccctgtctctactaaaaatacaaaacattagccaggcgtggtggtgggcacctgtggtcacagctacttgggaggctgaagcgggagaatcacttgaacccgggaggcagaggttgcagtgagccgagattgcaccactgcactccagcctgggcaacatgagtgaaacttcatctcaaaaaaaaaaaaaaaagaaaagaaaaagaaaatatcttgacccaatgatgatgcaaatactacgtatcaaacttgtaggatgaacttccacttctggccatgacagaggagcctgtatcagactagccttcctatttatatatttatttttgagatggggtgtcgctctgttgcccaggctggagtgcggtggtgcaatctcagctcactgcaacctccacctcctgagttcaagtaattctcctgtcccagccttccaagtagctggaattacaggcgcccaccaccacacccagctagttttttatatttttagtagagacggggtttcaccatgttggccaggctggtctcgacacctgacctcaggtgatccacctgcccctgcctcccaaagtgccgggattacaggtgtgagccactgcgcctggccgtgagtgacctttttaatgtgttgttgaatttgatttgctggtattttgttgagaagttttgcatcaatatccatcagggatactggcctgtagttttctttttttatatgtctttgtctggttttggtgtcagggcaatactggcctcatagaatgagtttggaagttttctctcctctgtttttcataatagtttgagtagggttggtattagtttttgtttaaatgtttggtaaaattaagcagtgaagccactgggtcccaggcttttctttgctgggagacttttcattacagctttgatctcattacttgttattggtctatttaggttttggatttcttcacggttccatcttggtaggttgtgtatgcctaggaatttatccatttcttctagggttttcaatttattggcatataattgttcacagtaacctctaataatcctttgagtttctgtgatattggttgtaatatctcttttgtcatttctgatttttttgtttgggttttctctctttttttgttagtctagttaaagatttattgattttgtttatcttttcaaaaaactttattttgttgatcttttgtattgttttgtttcaatttcatttatttctgctatgatctttattatttcttttcttctactaattttgggtttggtttgctcttttctagttctttaagagacatcattagattattttgaagtttttctacttacttgatgtaggtgcttataggtacaactttcctcttagtacttctttccctgtatctcacaggttttgatatgttgtgtttccattatcatttgtttcaggatgtttttaaatttccttcttaatttcttcattgaccattcaagagcatattatttcatttccatgtgttcgtatggtgtgcaaaataccttgtttttgatttgtagttttatttcattgtgatcacagaagatacttgatatgatttcaaatttaaaaagtaatttggctgggagaagtggctcatgcttgtaatcccagcgctttgggaggccgaggcaggcagatcacgaggtcaggagatcgagaccatcctggctaacacagtgaaaccccgtctctactaaaaatacaaaaaattagccaggcatggtggcaggtgcctgtagtcccagctactcaggaggctgaggcaggagaatggtgtgaacccgggaggcagagctggtagtgagccgagatcgcgccgctgcactccagcctgggtgacagagcaagactctgtctcaaaaaaaaaataataacaataataataatttaagacttgttttgtggcctaccatatggtctatccttgagaatgatccatatgctgaggagaagaatgtgtattctgcagccgttggatgaaatgttctgtaaatatctaataggttcatctgatctatactgcagactaaggctggtgtttctttgttgattttctgtctggatgaactgtctaatgctgaaagtggagtattgaagtctccagctattattgtattgaggtctatctctctctttagctctaagaatacttcctttatatatctgggtgttccagtgttgagtgcatatgtatttaaaattgttacattatcttgctgaattgacccttttatataatgaccttctttgtctctttttatagtttttgtcttgaagtctgttttgcctcatagaatagcatagctattcctgctcttatttggtttccatttgcatggaatatctttctccatccctttagtttcagtctatgtgtgtctttacaggtaaagtgtgtttcatgtaggcaacagatcactgggtcttgtttttctatccgttctgccactctgtgtcttttgattggagagtttagtccatttatgttcaatgttattactgacaagtaaggacttactcctgccactttattaattattttcttgttgctttgtgatcttctttctttccttcctgttctccttttagtgaaggtgattttctctggtggtatgttttaatttcttgctttttatttttttgtgtgtatctgctgtatgttttttgatttgaggttaacatgaggcttgcaaataatatcttataacctaatattttaaactgatgacaccttaacactgattgcataaacagacaaacaagcaaagagaaaactaataaaaactctacattttaactttgtccccccactttttaacttattgtactgtttatgtctgaaaagttgtagttattatttttgattggttcctcttttagtctttctactcaagatatgagtggtctacatatgacagtgttataatattctatatgtttctgtgtacttgctattaccattaagttctgtactttcaagtgatttcttattgctcattaatgtccttttctttcagattgaaaaactccctttagcatttagcagtatgtgaactgcatttttcaagtccagaatttctgcttgattcttttttttttttttgagatggagtcttgctctgtcgcccaggctggagtgcagtggcgcgatttccgctcactgcaagctctgcctcccgggttcacaccattcttctgcctcagcctcccgagtagctgggattacaggcgcccgccaccacgcctggctaattttttgtatttttagtagagatgggatttcaccatgttagccaggatagtctcgatctcctgaccttgtgatccgcctgccttggccttccgaagtgctgggattacaggcgtgagccactgtgcccagcctgcttgattcttttaaattatttcaatctctttgctaagtttatctgttaggattctgaattccttctctgtgttagcttgaatttcactgagttccctcaaaacagctattttgaattctctgtctgaaaggtcacatatctctgtctctccagaattggccactggtaccttaattagttcatttggtgaggtcatgttttcctgtatggtcttgatgcttgtgatgttcgtcagtgtctgggcattgaagttaggtatttattgtagtctttgcagtctgggcttgtttgtatctgttcttcttaggaagactttccaggtaataaaagggacttgggtattgtgatctaagtttttggtcactgcagccatatctgcattagggggcaccccaagcctactaatactatggctcttgcagactcgtaaaggtaccacttgggtggtcttggataagatctggaagaattctctggattaccaggcagaggctcttgttctcttcccttactttctcccctaaaagtggagtctctctctctgtgctgggccgcctggagctaggagaggggtgacacaggcacctctgtggccactatcactaggactatgctggctcagacctgaagccagcacagcactgggtctcacccaaggcctacagtctccactgcctggctactgcctacgtttgcttaaggcactagggctctacagtcagcaggtggtgaagccagtgagattatgtccttcccttcaaggcagcaagttccccctacccccatcctgggaaggtccttagatgccatctgggaggcagggcctgcagtcagaaaccttagtaatctccccagtgctctattctattacagcctggctgatacccaagccataaggcaaagtccttcctgctcttccctcccctttccacaagcagagaagtctctctccatggccaccactgccccagccctgtggcagtgctgccaggccactgccaacgttcattcagggcctaagggctcttgaagcaactgaacactgccaggcctgggactctccctttagggtagtgggctcccctctgacccagggcaggtccagaactgccaccccacagccaacacttagaatctgggaccccaagagccctcttggtgctctgccacactgtagctgagctggtacctaggctgatttttgctttttatgaaggtacttttttgtgtgtatagttcaatttggttttcctccagggaggacaattggtggaggtttctatttgggcatcttttttttttttttttgagacggagttttgctctttcacccaggctggagtgcagtggcgcgatctcggctcactgcaacctctgcctcctgggttcaagcgattctccagcctcagcctccccagtagctgggattacaggtgcctgccaccatgcttggctactttttttttcaattaaaaagtaaactttaatgtcgaaaatgcaaacttggggaaggcagaaagatcacacacaaggctgtcgcttcacacttggaaggttgcacggcggccaggagaggcactcctcacttcccagacagggcgggggccgggcagaggcgctcctcacttgccagacggggcggcggccacatgcctggctaatttttgtatttttagtagggacggggattctccgtgttggccaggctggtctcaaactcctgacttcaggtgatccacgcacctcggcctcccaaagtgctgggattacaggcatgagccaccgcgcccagccctatttggccatcttgctttgcctccaccttcatttgataacagaacacccccatgtaaccaccaccacaatcaagatataagacatttctgttattctccaaatttccttcaccctcctttatagtccatggcacccaccccatccctgggcaacacctatgtgcttcctttttttttttccccgcaggaggacgtcttcctatacctatgtgcattccatcactgctgcttttaatcatatagcgtgtagtcttatgagtctgactttttcacttagcataatgcttttgcaatttgtgattgagcgttttcatatgattctgttttttctgtctcttagcttggaagttatacactttttagtagtaactgttgggagatcgttctccaagagtctctctcatatttccatacatcctgctagcagagacattgactacctgtttttgtctgtttagtgttgctataaaggaatacctaagtctgagtattatacatagaaaagaggttttatttgtctcatggctcctcaggccatacaagaaacatggtgccagcatcttaccagtgtcacatggcaagaaaggaagtgaggaagagaaaataagttgttaactggttgttaaaaagtgccaggcacgggccaggcacagtggctcgtgcctgtaatcccagcactttgggtggccaaggcgagtggatcacctgaggtcgggagttttgagaccagcctgaccaacatggagaaaccctgtctctactaaaaaaaatacaaaaaaattagctgggcatggtggtgcatgcctgtaatcctagctactcgggaggctgaggcaggagaatttcttgaatccaggaggtggaggttgcagtgagccaagatcacctgggcgacaagagcgaaactctgtctcaaagaaaaaaaaagtgccaggctctttttaacaaccagttcttacaggaactaatagagtgaaaactcactcacccccaccccacagggagggcattcattcatgagggatccacccctatgacccaaacacctcccattagccccccacctccaacattggaatcaaaatttaacatgaggtttggggggcagaaatccaaattatagcactacctttgttccaggctaccttcaaaggatgtttatacagcaaacagccttggaaaatagagttagggtctccttgtagagcacagggtaagtttgcttacttttcagcataatcaagattgtgtcttcttctggagcaaaactttgacaacaacaagcggggcaaagtctgaaaccttttgcacatcttgacagaaccttagagattacgagatttatctctgccttactcaaggtccattagtatcttccagaacaataagttggtcttagaatcctttagctatgtattcccttccaggcttcgatgctgtgtgctgttgttttatttagtttttattttaaacccaacaagacgctataccatcaatacttatttagatccccccacatatttaacttgccatggtgcttcattctttcatgcctctttaagcatccatctaggatcgtgttcattccacatgaagagaaagcttttggcccagcacgatggctcacacctgtaatcccagcactttgggaagcctaggcgggaggatcgcttgagcccaggatttccagaccagcctgggctacgtggcaaaaccctgtctctactgaaaatacaaaaaattagccaggtgtggtggttcacgtccctgctactcgggaggctgaggtgggaggattacttaaacctgggaggttgaggctgcagtgagcgttgattgcaccactgcactccagcgtgggtgacaggagtgagaccatgtctccaaaaaaaaaaaagaaggaaagaaaaagcttttgtatttcctttcgtgtaggtctgctaatgacaaagtctctgggttttttgtttgactagagaaatgttttaattttaaccttattcttgaaggttttgtttttgttttcattttgttttgtgtgctaagtacagaattctcattggcatttatttatttagagacagagtcttgctctgtggcccaggctagagtacagtggcacgatctccgcctcccaggttcaagcgattctcctccctcaacctcctgagtagctggggctacaggcatgcaccactacacctgactaatttttgtatttttagtagagacggggtttcaccgtgttgcccaggctgatctcaaactcctgagctcaagtgatttgcctgccttggcctcccaaagtgctgggattataggcatgagccgccgtgcctggccagcatttattttcttttcagctctttaaggaagtcattccattatctctgggttccattgttgagaagccagctgtcattctaatggttgccctttgaagataacttttttccctctgctattttaaatatttcctccttgtattttattttcaacaggtgtaatgtggcacatatatcagcaattgttatgttacatacaatacatattgtgcaacatatgtatcattatcagttattgctgtgtaacaaactactccagaacacagtggcttataaaaggaatcatttatttagtccttaaatctgcaatttgagcagagctcagtgggaaagcctcagctttactttatatggcaccatataaggtaactcgcaactggcaagttggtgctggctgttggctggtagttcattcagggctcagggcccaggaccaagagtcgtcaccatggcttgcttcagcctccttgaggcatgatggctgggtcccaagagaagagaaatagaaacttccagtctcttaaggcattggtctggaagctgggacggcatcacttttgccatattctgttggtaacgcagttacatcgccagattaaagggtaaagagatacaaattcccactgctcagtgcaaggaatatcagtgattttagggggccctgttttaaaacccctacaaggtgctaagcgtggatttctggggctttcttgttttttgtttttttctatgtgtttttttttttttttttggtggtggggtcagggagggcttatagggtatgttaaatcagcagaataattttatttatttatttggagatggagtttcactcttttgcctaagctggagtgaagtagcgtgatcagagatggagtttcactcttttgcctaagctggagtgaagtagcgtgatctcggctcactgcaacctccgccccgctggttcaagcaattcccctgccttagcctcccaagtagctgggattataggcacccaccgccacgcccggctaatttttatatttttagtagacatggggtttcgccatggctagtctggaattcctgacctcaggtgatccacccaccttggcctcccaaagtggtgggattacaggtatgagccactgtgcctgacctataatgttttttaaaaatcagttttggaaagtttgcagacattaacttttcaaatgtagcttccatttgattctttttctactctgcctctgatcctccacttatgtatgtatgctagatcttttattagatagtctgtgtctcttatgtactctactatattttgtattcttctgtctctccatgctttattctgtttactctttcctgattatattttttaattttgtaatttccatttgatgcttttttgatcattcaaaactcttcaccaaaattctaaatttccttttttaacctctcgaatgttatcacagttactttaaagtctattttggataacttaaatatttacagtcccctcacagatatgtttcttttgtatattgtttctgttggttttctttcatgtcttatctccacatatgcctggtgagttttgattatgtgttggtcattgtatttgcaagtatgctcgtagaaataatctggaatggccgggcgcagtggctcatgcctgtaatcccagcactttgggaggctgaggcaggtggatcacgagatcaggagatcaagaccatcctggctaacatggtgaaaccccatctctactaaaaatacaaaaaattagctgagcatggtggcacgttcctgtaatccctgctactcgggaggctgaggcaggagaatcacttgaaccaggaggcagaggttgcagtgagccgagatcacgccactgcactccagcctgggtgacagagcgagactccgtctcaaaaaaaaaaaaaaaaaaaaaaaaagaaataatctagagcctagtttgatgtttccttacaaagaatgaatttatttttgcttctcccattgcaactaggataacctcagtctagtttctggaactgaaatcacttgaggctgaactgtggtctctgtgagagcgtgtctgtgtatggctcacccttattcctaggctacgtagttctttaggaccctaacccaaagtaagagatgttcatcagggctctcctcttggcagacgcctgggctccagtccctgtgtcctgagccccatgaggctgttactggtgctgctcgtctgcccatcctctccagtaacagccacctgaacactgcaattcctgggtttccatcattccttccagcctggtgagtcatcagtgtcttttgaggtatccagtgcctgccagcagatgttttttaataatttgtccagcatttctggctgtcctcagtaggtggtctgtttcacattccctagtctgctgttaatggaaagtggaagttctgagagagaatcatcgttcccgtcagcattcaaatgcctgattacactttccccattcgctatcctttcctttatttgctcctcaccacagcaaaactcctcaaaaatatctatctttgcaatcttcagattctcacattgtgtccttaaacccactttaatcaggccttggttccctccattccactaaaagtaatgttgtcaaggtcgtgcatgcctccgtgatgctaattccagtgatgagttttcagttgtcattctctgacatatcggcaacacttgatgtggagtaccctgatgttgagaggctggtgagatgaaggaaaaacccagccaagggcaatgaggaatggcttccttccgcctcctccttccctatctttgttgtggtttttgttgtttctgtaacactgattacgttatagtttatttaatgtacttccttattctatgtttttactttagtcattttgttgatctcctccataataacataggctcgggccaagcacagtggctcacgcctgtaatcccagcactttgggagaccaagatgggtggatcacttgaggtgaggagttcgagaccagcctggccaacatggcgaaaccctgtgcctactaaaaatacaaaaattagctgggcgtggtagcaagcgcctgtaatcccagctactagggaggctgaagcaggagaattgcaggagaatcacttgaacccagggggcagaggttgcagtgagctgagatcgcgccactgcactccagcctgggtaacagagtgagactctgtctcaaaaaaaaaaaaaaaaaaaaggcttcaggagggcagagcattttatgcaattgttcattaattgacccctccatttggcacagatcacatgcccagtagttaactgttaatcaacgcactctctgtggaacaacaggctggtcccgttgagccaacactctctgggcactgccttcactagactctggctggctgctgcgcttgtagaggtatgcaagacaaaaccttttggtatgttaaaagccctggtcagaactttaagtaaccatcactgacatataatggttatggttttgaaagtgcttttatagtggtttttcatctgtcctcacagcacctctgggaggtaggtaggacaggtacagttagtctcatgtttcaaatggggctcagagagggaaaaggatttcccaagatcacacagcaccttagtagcaaaacttggactcaacctcaacacttaaaaatgaacaaagctggccgggcgcagtggctcatgcctgtaatcctagcactttgggaggcccaggcaggcaggtcacctgaggccaggagtttaagatcagcctggccaacatgacaaaactctgtctcttctaaaaatacaaaaaattagccgggcatggtggcgggtgcctgtaatcccagctactcaggaggctgaggcaggagaatcacttgaacctgggagatggaggctgcagtgagccgagatcgtgccattgtactccagcctgggcaacaagaatgaaactccatctcaaaaaaaaaaaaaagaaaagaaaagaaaaagaaaagtttccctttttttaaatatctcattttaatgactgcataatagtttattacatagttataccataatttatataatattttgttgctgtacatttaggttaaacaatacttacttagttcctactatgaagaggggccaagtactcgaggctggagctctcacatgtggcaatgaaattagaaagtggatatggcagggctgtggtaaaataaaatataaaaataataaatgatattaccaaagaaaaggaaagtttttcaaaataaaggaaaatctagacaagcatagtggctcacacctgtaatcccagtacttttggaggctgaggcaggaggaacacttgaggccaggagttcaagaccagcctgggcaacatagcaagaccccctgtcaacaaaaataaaaaaaaattaggccaggcacagtggctcacggtggctagtgcctgaaatcctagcactttgagaggctgaggggggtggattgcctgagctcaggagttcgagaccagcctgggcaacatggccaaaccccatctctactaaaaacacaaaaaattagccaggtgtggcagcacacgcctttaatcccagctactctggagactgaggtaggagaattgcttgaacccgggaggtgaaggtcgcagtgaggtgagattacaacactgcactccagcctgggtgacaaaatgagactctatctcaaaaaaaaaaaaaattagctgggcatggtggtgcatgcctgtaatcccagctactcaggaactaaggtaggaggatcccttcagcccaggaattcgaagatgcagtgagtcatgatcacaccaccgcaccccagcctgggttacagagcaagaccttgtctctaaaaaacaaagaaagtctaacctaaacgccattatgtcatttacatgtgtataggggtgtgtgtgtgtgtgtgtgtgtgtgtgtgtgtgtgtgtgtgtgtgtgtgtttgcttgggaggggagtcgggctggagctggccaggccgcagcctggggaccttctgattccagcagggatgtgggccgagggtcccgccttactcatttcgggtcttgctcctctgtcctggctctacagactcttccagctggagttggaggctgacgccctagtgaatttccatcagtattcttcccagctgctacccttctatgagagctcccctcaggtcctgcacactgaggtcctgcagcacctgaccgacctcatccgtaaccaccccagctggtcagtggcccacctggctgtggagctagggatccgcgagtgcttccatcacagccgtatcatcaggtgagcaagggaacaagaccatttggacaacgtgtgtgtacctgcttgtgtgggcagtgggggccgcaggcctcggttcccctccatagtttgacttaaaaaggagcagggcctggcatggtcgctcactaacgcagtcccagcactttgggaggctgaggagggaggatcacttgagactaggagttcaagaccagcctggcaaaatagcaagaccttgtctctacgaaaaaattaaaaaattagcatgtgtctatactcctagctacttgggatgctgaggcaggaggattgcttgagcccaggagttagagtttacagtgagctatgattgcaccactgcacttcagcctgggtgacagaatgagaccttgtctctaggaaaaaaaaaaaaaaaaaaaaaaaggtgctgcgttgctaccagattaaaatgtaagaaggacaatgtaatgtttccagagtccggagtgctcaccaggtgccaggtctgtgggagctgatttctacccaccatgaaattgaattttcccaacccccacaaggtatcgtcattttattttactttattttattttattttattttattttattttattttattttatgttacgttatgttattttattttgagacggagtcttattctgtcacccaggctggagtgcagtggcgcgatcttggctcactgcaccctctgcctcctgggttcaggtgattctcctgcctcagcctccggaatagctgggattacagtaatgtgccatcatgcccgggtaattttttttttttttttttttttttttgagacggagtctcgctctgtcgcccaggctggagtgcagtggcgcgatctcggctcactgcaagctccgcctcccgggttcacgccattctcctgcctcagcctcccgcgtagctgggactacaggcgcccgccaccacgcccggctaatttttttgtgttttttagtagagacggggtttcaccatgttggccaggttggtctcgaactcctaacctcaggtgatctgccctccttggcctcccaaagtgccgggattacaggcgtgagccaccatgcccggcccaggtatcatcattctagagagagctaacaggacttgtgcaggtcactcagccagagagggtgaaagaggggcttggatccttggtgtctgcccaggctgctcttctggaagctgaaggcctccttttgtgaatccattcagccagcagatggagcagctgttgcccctggtgagggcactgtccccacccttgcacagggcaccagttggccatcttgtgcagaggtagccacacctcctctgagtctctatcctagatagctcagttaagctcccaggcccagaactcaaaacctcactgctggccgggcgtggtggctcacacctgtaatcccagcactttgtgaggccgaggcgggtgtatcacttgaggtcaggagtttgagaccagcctggccaacgtggtgaaaccccgtctctactaaaaatacaaaaaattagcaaggcgtggtggcgcacgcctgtaatcccagctactcgggaggctgaggcaggagaattgcttgaacccagaggcggaggttgcagtgagccgagattgtgtcactgcattacagcctgggcaacaagagtgaaactccacctcaaaaaaacaaaacaaaacaaaaaccctcactgcactttagtttccaggcgtgcttttggacagcactgtctcatctcaccatcactctgtccatttcctggggcaggcacagcagcttgtgtcgataaggatattgacgcccagaaaggttaagtgaattgcctgaggctagtgagatatccgtgttctgtgaccctttcctgtgccaccaccctgcccacttcctgctggtgtggccctggggcccatctcttgtacgagtgagcaaactgaacagaaacctgatacaggtcacatcagatataattacattcaaatcagcccaactagctgagtggcgggaatgctcttgagctcaaataaaccagaaagtccgagtttccgagtgcacttccctgcatgtgcacttaggtccccctgccaccttgtaccacacctgctcacctctgctcaccctggccctctcctgcagctgtgccaattgcgcggagaacgaggagggctgcacacccctgcacctggcctgccgcaagggtgatggggagatcctggtggagctggtgcagtactgccacactcagatggatgtcaccgactacaagggagagaccgtcttccattatgctgtccagggtgacaattctcaggtgctgcaggtgagcagggggaggggcagggtgactggtactgatacctcccggtgtccacggttccctttgggcccctaggctcaggtgtcactctcaggcctctcactgtcccccattggtccttgaggcctgagctccttcatggagggtgcagacccctccctggctcttccctcccagcccttttccaggagccacgtcctcagtctctttgcttgataaacctggggacggcctccaacccagcaaaataaaccccaaaaaaggcccagctccagtcagttagttcagttccacttttcctgagcacaaactgtgagccagatgcctgcctggaggggctcgtgggccagcgggacctgggcttaaccttttgcaagcttgtccaatctgtggccctgcaggctgcatgcagcccaggacggctttgaatgtggcccaacacaaattcacaaactttcttaaaacattatgagatccatgcatggaccttttttttagatcagctgttgttagcgttcatgtattttatgtgtgacccaagacaattcttctgatgtggcccagggaggccaaaatattggacaaccctattttacaggaattcaaaccaagcaaaccaaactgtctccagttcctgtaggcatttgtgccagaggccctcctgttaacgtttttgattacctgggcaaaagatgtgattttttaattgtgggcaagcagatggggtgatactattaaatagctatttcatatattagattgaacagaaaaggcaggatgttggattatgttttattgtctagaattagaaaattcttctaaagatcatgttctctctgccttggcatcagaatgcaactacgttataccagaaaatgtggattcctttttttttttttttttttttttttttgagacagagtttccctatgtctcccaggctagagtgcagtggtgcgatctcggctcactgcaacctccacctcctgggttgaagtgatgctcgtgcctcagcttcctgagtagctgggattacaggcatgtgccaccatgcctgggtagtttccgtatttttagtagggatggggttttgccatgttgcccaggctggtctccaactcctggccttaagtgatccacctgcctcagcctcccaaaatgccgggattacaggtgtgagccactgtgcccggcccagaaaatgtggattcatatcttatgcttcttgctctcagggaagggaattctccacccactgttgaactccactttcaccgagaatcctctgcgcacccagcatggtgccgcgcagaccctgcctccatgcgggggtgtgcacacccgcttctcgatagtcatgcacgactgcagctgtcctttatccggtgctgattggtgcctgaccttgaactgagtgttgtatgtgttccagttaattcttagaatacactcatggggtggaggtcattattcccctttcctctccgaagaaactgaggttcagtgttgttaattaagaagcgtgcccagggagggccacaaagctgagagagtggggcttgaccttacattggcctcgatgccagccctttgctcttcctgctgtgtctctggcctgccttcaggtccagtgggactgctgtgaggtgaccctggtgtcacatgggtacactgtggttgtaatgaacctcatggggacagcactgagccaaaagtgagacagtaaaaccctcctagcactttcttttttttgagacagcatctagctctgtcgcccaggctggagtgcagtggtgtgattgtggctcactgcagcctcaacctcctggactcaggtgatcctcccacctcagcctcctgagcagctgggactacaggctcgtgccaccacatgggctaattttttttttttttgagacggagtcttgctctgtcgcccaggctggagtgcagtggcgcgatcttggctcactgcaagctctgcctcccgggttcatgccatcctcctgcctcagcctccagagtagctgggactacaggcgcccgccaccacacccggctaattttttttgtatttttagtagagacagggtttcaccgtgttcgccaggatggtcttggtctcctgaccttgtgatccgcctgcctcggcctcccaaagtgctgggattacaggcgtgagccaccacacccaggccacgccagctaatttttaaaatttttttggtaaagatggggtctccctatgttgccgaggctggtatcacactcttggtctcaagtgatcctctcacctcccagtgtgttggaattacaagcatgagccactgcgcctggcccctggctctctttttaatactgctgttctttcattgaaaacatagtacctgcatgtagaaaaaaatcagtcaggacagaatgaaaagcaagaatcattcccacctggacccccagtgcccatcctgagatacagctaccttttaagttccttgactcagaaatgtttcatgtgagccacagtcatgccaggtcgaccccttccctcccatccacactggcacttggctttcctggtgcttctctttacgttctttttttttagacagagtttttgctctattgcccaggctagagtgcaatgatgcaatctcagctcactgcaacctctgcctcctgggttcaagcgattctctttcctcaggttcctgagtagctgggattacaggtgcctgccaccatgcccggctaatttttgtatcgttagaagagacgacatttcaccatgttggccaggctggtctcaaactcttgacctcaggtgatccacccaccttggcctcccaaagtgctaggattacaggcatgagccactgcgcccggcctctttacgttcttatcagcatcctatggagtcaaacttcccttcctctttcatcagctccttggaaggaacgcagtggctggcctgaaccaggtgaataaccaagggctgaccccgctgcacctggcctgccagctggggaagcaggagatggtccgcgtgctgctgctgtgcaatgctcggtgcaacatcatgggccccaacggctaccccatccactcggccatgaagttctctcagaaggggtaagacctcctcccctccccatctgctggcctgctgggctccagctctcctgtcacctgtcccgtgcctgaggcaagcagtatccaccatagatcttagcatctccagcctcagagcagaggccccgggttcacaagcctcattaggccccgcctggcccaaagaaggtgctccatcattgtatcatgggtaggaatctcggttcacaagttcagctgtgcaaggaggagactttaaaatttttctggctgggcgcggtgtctcacgcctgtaatcccaacactttgggaggctgaggtgggcagatcacctgaggtcgggagttcgagaccagcctgaccaacatgaagaaaccccatctctactaaaaaatacaaaattagctgggcgtggtgacacatgcctgtaatcccagctacttggaaggctgaggcaggagaatcggttgaacccgggaggcggaggttgcagtgagccgagatcgcaccgttgcactccagcctgggcaataagagcgaaactgtctcaaaaaataaataaataaataaataaataaataaataaaaataaatttatttaatgtaccttaattcctaggagtgaatctccctctataaaactggagacaaccaatcttagccctctttggggtctcctctttccagctcccctccaggtggtgctccagttctggagtctgatgcaaccccaaggcccacctggcccctcctctaacccagcccagcctgatctgaacagccccccgatggcttcagtgctccttggtttcttgtgtgcccagctcaaagcctgggaaatgcttggtaaggtggccgagtgcccgtccacctagatgcctctttcctttctggctggtggcacgttgggaggcaggtacaggctcatgttttgggagcctgggaacccctggtgtcaggaaaattgtcttcaaaggggtaggggatgagataaaaagataaatgaatatctcaaatctcaaaatactatctaggccaggcgcggtggctcacacctgtaatcccagcagtttgggaggccaaggtgggtggatcacctgaagtcaggagttcgagaccagcctgaccaatatggtgaaaccctgtctctactaaaaatacaaaaattagccaggtgtggtggtgtgtgcctgtagtcccagctactcaggaggctgagacaggagaattgtttgaaactgggaggcagaggttgcagtgatttgagattgtgccacagcactccagccagggcgacagaacaagactccatctcaagaaaaaaaatactatctaacaggaacaacatctagaatgaatgaatgagccaatgagtccttcgatcctggcactgtgctaaagcaccagcctcaccgaaatgaataagccactccaggacaggagacaccccagccacccagaatctcatagcgcagtgccagacaagcagtgagaaggcatggacgggcagcactcaggcagggaggctggcacttgtgcctgtcctcaggttgttccttcctctgggagctgcatccaccttgctagccccatggggcattgctagcccttctaagggctggaccaagcctggacaaaccctcctttccttgaatctcccaagcacagccagaatgagctagagctttcagaaatacttgaccaaacagagaagataccaacacccccagccccgcagtcaggttccccatttgcaggttgtgacctgagtggacaccaggtgatgctcttctctacccagagggctggcacatggccccactcttgcttgtctccagccaccctgagctgtactgggcaggagctgtaattgaccagttttctctctcttcaaacaacctcagccctcaccggtccctctgtccccacacaggccatcctgggtgggtccagcgtcccatcacataagaggatctttgcacagaagacaaaggaagaggctcctaccttgagtggagcagggagatcccttatcgacttggcagccagcacagccctactccaagaatcccacggcctcagtgttactgacaagtggttccctcacagctcagactaggagctccctcgctgtttttctttttcttttcttttctttgttttgtttttgagacagagtttcactctgtcacccaggctggagtgcaatggcatgatcttggctcactgcaacctctgcctcccaggttcaactgattctcctgcctcagcctcccaaggagctgggattacaggtgtgcgccactatgcccagctaatttttgtatttttagtagagatggggtttcatcatgttgaccaggctagtcttgaactcctgacctcaggtgatctacttgcctcgccctcccaacatgctgggattacaggcgtgagccaccgcgcctggccacctctgctgtttttcaatgcagctgacctttcccacaaagctcggtttgtgcctgcggttctcagatggttaagcccctgctgaggaagggaaacagataatcccagacagtgagatggaggctgagactgaggatgcctgggggctgcactaggagctcagagacggcatcaggcagctggagttcagggaaggtttgggggcagcagagcccgagccaagccatggacactagccggagctggccactcgggtgaagacttggggggctccagagggcccagggaaagaagctgggcctgactccatgtgcctagtgctgagcaccaagcgctggcataagggctgtagggagctgggcagcataaatcctgggcctgtgctgggcacccctaataatagagaacagcagctgaacactaacgctgtcccagccaccggcttagccttcatgtgggctatttcactatagcccagagagctgatgtattttattccccctctaaagctgagggccaagtgtggtggctcatgcctctaatcccagcactttgggaggctgaggcaggaggatcgcttgagcctaggagtttgaggctacagtgagctatgatcatgccattgccctccagcctgggtgacaaagggaaatcctgtctcaaacaaacaaacaaaaaacagatgaggaaaccagggcttagagagattaagtaatttgctcaaagtcaggcagtcagtaagtgccagacctgggaattaaacccatgtgggctgtcctagtaattgcactaaaaaaaaaaaaaaaaaaaagctttattgagatatagttcctattccatacaatccacctattgaaagtatacaatgattctgatatattatgtttattttttccaactgtgatagattatatataacataaaatttgccattttaaccacttttgttttttgtttttgagacagagtttcgctctcgttgctcaggctggagtgcaatggtgtgatctcggcttaccgttacctccacctcccgggttcaagtgattctcctgcctcagcctcccgagtagtagctgggattacaggcatgcaccaccatgcccagttaattttgtattttttagtagagacagggtttctccatgttggtcaggctggtctcgaactcccgacctcaggtgatccacccaccttggcctcccaaagtgctgggattacaggcgtgagccaccacacccggcccattttaaccacttttaagtgtacaattcggtggttttaatcacatttacaatgttgtccaaccattacccctttctaaaacttttcttatcacctcaaacagaaactgtaaccattaataactcccgattctcccctccccacagcccccgataagtcccatatcctctctgtctctcagaacttgcctgttctagaacctcgtatcagtgaaatcatacagcgtttgtccttttgtgcctggcttatttcacttagcatgatgtcttcaaggctcatccatgttgcagcacgtatcagaatttcctttctttttaaggcagaatactattttgtttatccattcagtccttcactgatagacgcctgggttgtttccaccttttgtctgttgtgaagaatgctgctgtgtacatgggtctgcaaatgtccattcaagtccctgcattccgtcctttgatacttccgacctcaggtgatccgcctgcctcagcctcccaaagtgttgggattacaggcgtgagacaccgcgcccagccagaaaaattttaaagtcttctccttgcacagctgaacttgtgaaccgagattcctacccatgatacaatgatggagcactttctttgggccaggcggggcctaatgaggcttgtgaacccggggcctctgctctgaggctggagatgctaagatctctggtggacactgcttgcctcaggcaccgagtagaaagcaattgtgctctttcccactctgtcatactgcttcctatagcatgcaggtcactgtgtgactcactgacagtgtggtaaggaggtggagggtggctgtgtgccaggcacagaactgggctctgaaatgcctggtcttccttacaccccagccactcctctcagcactctctccatgttgctcagcttctggaggccaccagtgaggaagctggggcttgacttcaagcccatctgactctaaagccagtaccagggagggtgatcattgctggtggcagcatcaggaaggcttcctggaggagggggttagttgtgccttgaggggctcagtacagccttaaccatggtgagtgtgctggttgggtttgctgaactttgtttgcagtgatgctctctgtaagcagtagatgaagctccaagtcctggcttcatcccacgccacgcagaccctagcttctgctcaccaaccggggcccctctctcaccaggtgtgcggagatgatcatcagcatggacagcagccagatccacagcaaagacccccgttacggagccagccccctccactgggccaagaacgcagaggtgagtggatcctgaggtgggtgggtggggcagggggccgggccccgcaggtcctcagggccctcaggaagcaggttcccgagaggaccctgaggctagcacttgggggctgaccttgcagtgggtgtgcaggcagagaagtccatgaagagctgggatcctggcagggctctgctgctctctggctgggcggggggatccgccctgtgcctcagtttcctcatccatgaattctgctttggcgatgtgatgaagtcagcaaggcagtgtgtgacaaaactcggcacaaattgtaaagtgcttcccaaatagaaggtggcgtgatgatgattgtattattagtcaggattctctagagggccagaactaacaggagatatatatatagagagagaggggggtttatttttttattttattttttttgagacggagtctcgctctgtcgcccaggctggagtgcagtggcacaatcttggctcactgcaagctctgcctcccaggttcatgccattctcctgcctcagcctcctgagtagctgggactacaggcgcccgccaccacacccggctaatttttttgtatttttagtagagacgaggtttcaccgtgttagccaggatggtctcgatctcctgacctcgtgatctgcctgccttggcctcccaaagtgctgggattataggcgtgagccaccgtgcctggcctaaagggggatttattaaggagcattaactcacacgatcacaaggtcccacaataggccatcgcaagctgaggagcaaggaagccagtccaagtcccagagctgaaggacttggagtctgatgtttgagggcaggaagcatccagcacgggagaaagatgtaggctgggaggctaagccagtctagccttttcacatttttttctgcctgctttatattctggccgtgctggcagctgattagatggtgcccacccagattaagggtaggtctgccttcccctactgactcaaatgttaatctccgttagcagcaccctctcagacacacccagggtcaatactttacatccttcaatccaatcaagttgacactcattattaaccatcaagatgatgatgatgatgatggatgatgatggtggtggtggtggtgctgggcctagctgcacacacagggagcctggctgggcatctcctctgagttcttcccctaagctaagctctgtcctcctgggaggatggaggcctctggtctcatcaccaggaagcacagcttgacagagaatgggatgccccagagttcatggcctacttctcaatgtgatgggccaggagggagggcactgccagcctcagggtacctctgcattccaggagccggacaccgagtcaggcccttccgtgtaggtttggtcactcattgtcatcacatgctgtgaggtggggacttgcattcccatcttcacagaagccctgaagtgcacatggctacagtgacccatccaagcgcaggcagctgggatgagtgaagctgggctttgggctcaggtctgtgactccaaagccaggctcccctccctgttcccaaggctctgccagggatgtgcattgccaaggcccagtgagaggtgatacctttgcagggttccagggagggatgcagggagcggggtgcttcaggacaggccccagaggagcctttgcaaggagagtgggttctgttggcactaggaaaggaccagaagcctcttaaaacagtcagcacatctttggctttttgtccctagtcttgggatgctgatgggatgggaggcagtctaggcccccctagaactggggcctgcccctggaatcctcttgctagcgctttccaacatcccagtacctgtaggcctctcagagcagaagtggcagtgcccacgtgtcccggggtgcggcagctccccgagtgcctgtgctaactcagcctgaccgtctcccgcagatggcccgcatgctgctgaaacggggctgcaacgtgaacagcaccagctccgcggggaacacggccctgcacgtggcggtgatgcgcaaccgcttcgactgtgccatagtgctgctgacccacggggccaacgcggatgcccgcggagagcacggcaacaccccgctgcacctggccatgtcggtgagcccaggaccgcgtgtcctgccctgtggggccccggtgggaatgcaggagggctgtccggactggagccctcctccccactgtctccctcctatcgtcagctgctccaaatcatcttcccacccaaagctcagttcagaccctgactcctccctcaggaagccttccaagtccccctctcagcccaaaataacaccacctcctgtgtgctgtggtaccttttccacctgtgcccccatttggcacttgcatggcacgagagggaaaaatgacagctctggccatagactggccctgagcaagccatgtcacctgtcagcctcgatttcctcatctggaaaatggtggtgtcaatacttatctggaagagttgtggaaaagttatggtggacacttggtcaccctctacagaatgtctaagtgacacacgcagtacctggcccgagtgagcatcctgcttcccttcactggtccgcgtgttgctctcatcttccctgggaggctgtaagatcctggcaggcaaagcctgagtgtgcagcccagcagcctgtggcaggtgccaggcatattcgttggtttattatagaacacagttcctgccctcaaagcccttactgtctggttacacatctagagtatgaacatattaaacctagcagaggaggacgttactgtgttacagacatatgtgtgtgcatgtattcttttttttcgagatggagtctcgcactgtcgcccaggctggagtgcagtggcgcgatctcggctcaccacaacctccgcctcccaggttcaagcgattctcctgcctcagcctcccaagtagctgggactgcaggcacgtgccaccatgcccagctaatttttgtatttttagtagagacggggtttcaccacgttggccaggctggtctcgaactcctgtgttggccaggctggtctcaaactcctgacctcatgatccacccgccttggcaccccaaagtgctgggattacaggcgtgagccaccgcgccccaccgtgtgcacgttttctatagcaataccgtatgtacagaagtctgtttactgagtctcagtgacagaacatgagagacccccgggactctaaaagctgattcaggacacattcagagacatcctgttttataccaaaggtcaaaacttggaagagatgttgttgcccaaaaggctgaaactataaatagtttcatttttgaaactgtggacatttttagcactgggtgggcccttggaatgatctaactcagcagttctcaagttttttggcctatttgatccctttatactctgaaaaattattgaggatcacaaagattttttaatcatctggattttctttatctatatttaccattttagaaatttaaagtgtgaaaatttcaaaatattaattcatttaaaaataacaataataaatatatatgcctactatgtacccacaaaaattaaaattaaaaattttttaaaaaacttaaaaaataactggccagctgcagtggctcgtgtacaccagcactttgggaggccaagatggtcagatcacctgaggccaggagttcgagaccagcctggccaacatggcgaaagcccatctctactaaaaatgcaaaattagctgggtgtgagacctctgaaagggtatcacgtgttcacaggggtccccaggtcttactttaagaactgctgatagactttggtcatcttcatcccatcttcacagtttttggcatattcatcaaccacctttacaattatgtacttaatcacctcttcaaattggcttacttttatttatttattttgagacagagtttcgcttttgttgcccaggctggagtgcaatggcacgatcttggctcaccgcaacctctgcctcctgggttcaagcgattctcctgcctcagcttcccgagtagctgggattacgttcatgcgccaccacacctggctaattttgtatttttagtagagacggggtttctccatgttggtcaggctggtcttgaactcctgacctcaggtgttccacctgcctcagcctcccaaactgctgggattacaagcgtgagccaccgtgcccggcctggcttacttttaaactgacttaaatttattttgagagaaatgttgcatcactaccataaatggccatccatccatccagtgccaaccataaaaggtaaccaatgcagggcgcggtggctcacgcctgtaatcccagcattttgggaggccgaggtgggcgaatcacgaggtcaggagttcaagaccagcctggccaacatggtgaaaccctgtctctactaaaaatacaaaaaattagctgggcgtagtggtgggcacctgtaataccagctactctggaggctgaggcaggagaattgcttgaactcggtaggtagaggttgcagtgagctgagatcacgccactgcactccagcctgggtgacagagtgagactccgtctcaaaaaaaacaaaacaaaacagtaacaacaacaaaaaatcacagttaatgctgaaaacacacacatatctgtagccatagaagtcctaatagaatgtgaagaactgtttggaaaaccccattctagacccacagcttcattctctaggcagggaaatcgggtcccaagaagaggaaggtgacaaggccagagcccacagttccaggtggccagtgtgtcctctgaaaccatgccatgctctgcgcccctgcccggcctccaggtgtggaaatgtgtgacgttcttcgtggggacactcccccgaaggctgccattaggggcacgtgtgttcggttacccctcagggatgacaccctggactgggtgggcaagatggccttccctgccctcacccaccctctccttgctactcctgaaagccatcagcagctgacctactgtgtccccatggctcctgggtcggggtcacagatgcactgcatctttggaggcggagctggcagagcaggggcgagtcacttctagtttctgcctgggttcttacaccctcccctgtgggtgcttttaagcctgtttgtcaggtccccagccatcaaatggcagactttggactaccagattgacttgggtgggggtgaggagggttccagtgtctccccgtgctgaggagaggcccgctgggtgagttgacaggttggggctggcagccaggggcccctttgttcttcacttccccggcagttgcacgtcttatcctctctccatctccaacagaaagacaacgtggagatgatcaaggccctcatcgtgttcggagcagaagtggacaccccgaatgactttggggagactcctacattcctagcctccaaaatcggcagacgtatgtgctctgcactctggggctggagtggggtgagggttgggtggatacagggaccgaggaggagggaagtcccaggcatcaggtgccagcatcctgtgctgacccgccctgctcagagctgccaggagcacctcgtactcagagagggggcttccttacccaagcacaagggccctgagcagtagatgcaggcccaccacggggcttgctataccagcatcctctcccgtgcagcgccccccacctcagggagctaagattcccagcaggggtggggacaggagagccagcagcagccttctttccccaccgttggggaattcactgatggaaccactggctagaatgaccaagggtgcatgcactacactgcacgagctctgggcatgcctgtgtgggcagagtgcatggccatgtgctgcacgctcgcacagtgagccttagcttcagagctggacagagcagatcctcctcaccagaggcctggagcccgctctggagggtttcagcagctgtgggggtcactgtgggcaggtacctgatggcagcagtgtgtgtgtgccagtgcacacgtgtgtgtctgcatgcaccgcatctatgacctccttttcagcaatcccatccatcaaatggagtaggtgccccctggctggctcattagtccctttggaaccctgaactatcacttagcatttttgagaatcactgaatgtggccatgggattcctgctttcttggctggagtagaaggaaagaaggggttcccacaggcatcgggcagggtgacactgacctcctcctcccatatcctccttccctggccttaggaagctgcttgggatgtaccagcctgggggcagcactccctgtcagggtgggctgaggcctctggagcagcccacgtgcccagggcctgggagctgggacaggggacggagtgtggaaaggaggggcctctcctttgcatgttgacatcatttctgatcctgtgccatctccccttccccaaaccatgacaagttgtcaccaggaaggcgatcttgactctgctgagaaccgtgggggccgaatactgcttcccacccatccacggggtccccgcggagcagggctctgcagcgccacatcatcccttctccctggaaagagctcagcccccaccgatcagcctaaacaacctaggtaggcctcgcctcccgactccctcttctccagctggttcccaggcccctggatcacagcaggccccaccaaagcaacaggatccctaggacggaagtcactaaaggaagccggggaggatggggccggagttgtcagcctctaggcagccagcaacccacagatcccagaggcctagggtgtccctggctgatgtcccatgctccgttgcccctgagaggatgtgtcctgcacacagtctcaggcctgggcatttccagtggcacccatgaggtggctgctgttactgccctcctgtccccagggcgttcagggtgggcagtgaggagtgctgtcgggggactgggggcccgggccctctggcttcacctgtccctctggcttcacctctatcacactgtttgaatctcggttgggcctgagacctgtgtgcccccttcctggccccgtggtgactttcagacgttgaatgtggccaggcagccagcatctgccccggtgcattccttggtgcccagggagacatccccagactagacaggacccttctctggactttctgtgggctggcccactcagggacctccattgtttgggagcggggtcccctgaacagagggcagccaggagccagtccttggtgagccagacttcactgtggaggcggcagcaccttcagccagggtagcccgaccaagcctggaactctggagaggcaccgtgactgtggcttctagtcctggctccacctctctctcccctcccaggaactccccctccacctcccatctttatctctcaattttgcaggcagtcacccaagccaggccggatggtgggcctggggtgcggcgtcagatgggtaacgccctgggcctggagaggccaccgagcctagccatgcggcattagctctagctctcactccctaatccgtccttcttagctgcgcacacaccacacgccccctcccctgcaccctgtccccggcctctctcagccactcttctgcttcccttgttcactgtggagccgtgtgccctggggagggggagacaccgcttcgcagccctcggttctgctttgctgcttctagactctgcacagtggtggggggctgtcagagttggggtcacgcgggctgctgcaccaggcacctggggactgggctgcttgtcaggaggggcagctagtcagttgggtggacgtcaggcaggccttggacacaaaggaagacatggacagagtggatggtgggcctgatcccggaggccactgggatttccagacctgggatcaggacgagggatgtctcctttcatccatggacttaaaccccgaggaacgtcctgactcagccttttgactaaatgaccttgggtgaattatggaccctcttagagcctcacctgtcaatagggaataagaattcttaggccccaggtggttattgcagcatcggctccgatgcaagaagaagcactttgtctgaagaggacacgcaagggtattcatgccttggggtttcaagaggaagagattgaggggaacctgggagctggctgggcagggtggggagcccttcccagagcagtgggcccccctttccactccagcccatttctctcctgtggcctgtggctcagctttctcctgggacagagtccttcctgtggggaagggacagatgacagggggagtggggggatgagggcgtggccgtgggcgaggcacagcccaggtttgatctagggacctctggggtagcagggcttggggacccacctgaccacagcatgccctgctctgtgcctcacagaactacaggatctcatgcacatctcacgggcccggaagccagcgttcatcctgggctccatgagggacgagaagcggacgtaagtggatcgagatcgggggcagagcggggaacgtgtgcgctttcctgcccctcacccaccccctgttgtgggctcagggctttactctctgcaccctcacagccggcgaagtggctctgctcctagtcttatagttctcagcagagacagaacatggagagcctgtgtcgctcgttcattaatgctgggcggtgcaggctctggagaccagcccagggtgccaggcttcttggacttggtggggctggcgcagtgttctggcctccctccctgatctccttatggctagaagagggggagatgcctgggtcccccctggggagatctcagcagctgcttcccactgctcctactggcttccttaaccacctcccactgcagaatagtggcgtgggctgccttccccagcacctgctgtatacctagtcccattgtaagaggcgggcctgggtgacaggatgcaaagagaagacgcccaggccttgcccttcaggcataatcccgggtgcttgaactcagtgccagctggcacggcaaggtaccaggacaaatgcgtttccagccactgtgctgtcgccacctcccttgattgctgcagttgattcatttattctttattagtctctcatgttcctaatagccttcccagggaggaatttgtaaccttgttttacagatgcagaacctgagcccctgagaggtgaagtgacttgctcaaggtcacacggagtgagtgtcagggtggcaactcacagccgggtcttccgaacccacgtcctttgtgctaccgcaggctctctctgggttctctgtggactctatacctagtgccagccctctgcagggaaagctctcttctcagaatcagaggcagctccactcccagggccaggcagtgatcgtgcagctctgtgggtcctctcacttcgcactcacttccatgctaccctgttgtgtgccctggaggttcccctgccccatcagcattccctcccctgtgccccctgcatgctcttgcacgcgggcacacgcacacacacacgcacacatgcacgcacacacacccacatgcacatgcctgcgggttgcccacatgcatgtgttgcccacatgcaaacacatggacacgcacacacatgcacacatgcaaacacacgtgcatgcacacacatacacatgcgcacacatacacatgcatgcatgcacatggacacccacacacatgcacacacatgtacacacatgcatgtacatacacacacctgtgcaggggctgaggtgaggcagctgcacctgaaggggggacccacatttcccaagggaggaaaagcagattccccagattctggagcctcagaaccctgcctggagcggggctgaggcaagagtcaggagacccctcggtagctccccacttgggccttccaagctacagagccctgcgccctctgggttgatctctgtcgccagccccgcatcttcgggagtttgctttggcctccagcaacagtgtagtctctcccctgccacctctaggcttgctgtggggctgggtacctggtccaggaaaagacccctagaggtgggacccgggcctcctccatttatcagccctcttgggcacctcctgcatccccttgacacacagcgctgcccagagcagaggcggcttctgccctggtggagcttccaggtcagcgcaggagagagtaaaagaaagattgcgaatggaatggaagcagcctccaccaggaagcaggtggagcagcaggcgggctgtgagggagggtctcgatggcatcagggcaggcttctctcagcttcatcaagctgagatgggaagatgagaagatcagaggaaggttccagactgaaccaaccacaaaggcattcccccagggcatggccaatgaggacaggcaggatgtggggagacgtgtcagggcgcgctggagagcatgtgactcaggaggcggcagacctgggtccaggtccagtccgcatccatatgacttggttcccgtcacctaacctctgagctacactccctccgtcactcaaaaatatgcacagagagtaggcgcagtggctcctgcctgtagtcccagctactcgggaggatcacttgagctcagaaggttgaggctgccgtgaactgtgattgcaccaccacacaccagcctgggtgacagagtgagaccctgtctctataaataaataaataaataaataaggctgggcacggtggctcgtgcctgtaatcccagcactttgggaggccgagacaggcggatcacatgaggtcgggagttcaagaccagcctggccaacatggagaaaccccgtctctattaaaaatacaaaattagctgggtgtggtggcgggcacctgtgatcccagctactcgggaggttgaggcaggagaatcgtttgaacccgggaggcagaggttgcggtgagccgagatcgcgttattgcactccagcctgggcaacaagagtgaaactccgtctctaaataaataagcacagggatgtcagggagggtctgcctcagaggcgtttgggacaatgacatgagctaatgctggtagcacccctcccatagcccctggcatgaacctctcccttcctccctgccccctcctcccctgcttcttccaccttgtgtggaggccctgatactctgtcactgcccattcctggcctggctgtagggtccccgcccctccttccccagccttatttaattccaacagactttatcaggcacctgctttggatcaggcctgatactgaccaaaatcaggtgtcccaagttggggagactggccgagatcctgctgggatggcgcctggtcagtgatgctatcccccgaccttcctttccctttctctgttgcactctccagcccctgaaatactagacatttgttcctttactgccctcacccccaccctcgctgtcctgcataggacagaagttcctcgggtccgtctgggtctgtctgccaggacacagctgcaggggacaagggctatgagggtggatgtaaagtactgggctgtggcaggaccctcctctctcccactgctgttcccactgcagccacgaccacctgctgtgcctggatggaggaggagtgaaaggcctcatcatcatccagctcctcatcgccatcgagaaggcctcgggtgtggccaccaaggacctgtttgactgggtggcgggcaccagcactggaggcatcctggccctggccattctgcacagtgagggcggcccctggggatggggccaggcggggctgagacctgtgtcctcaaggggccgagtttgtcttcagggctttgcaaaaagagagtggaggagtagaggagggctataagcactttgaggaggcaggggcggggctgcaggtgctgaggtcccaggctggaaggagaagggctgggcccatgggcttgggtttggggatcccccgccctctggccacagagggtagagctggctgtgtgaaattttggcataggaagcgtttcctatcgactgccttaacccctcctcccctcacccctgcaaagcaggcaccaggggccacacagcctgctgcacataaggaatcccattcccagggtgcacgcagcaggcagtctcaggaatgaggagccactgagcctcaggatgccagagccctcgcctgcacacttcattttactgggaaattttactgggaaattaagttcccaggtggggagggatgacgtgaagtcacatagctcatccatggggtcgctgggctggagcacagtcccctagactcccagcctggcacctcctaggccacagggcactgtgtagtctcctttcactgccgctttgcgaaggcgcctggcttgctggacagatagccgggtggtcagtgttgtgacggctcctctgtggagctgtctgagcttctaggtgctgacaggtggggaggggcactgccagatcagggtcctcagctccccccaaccccctggacattgtcctgggactcaacatgtctgactggtgcccctgcccctgtgctggtcagattccattttctccagagcgcccccacatctggatcctggtcatgcaaagtcttggaggtgcccggggaggactccccaccctagggtgggtatcagggcctgtgggccaggcctgtgttggatgctggggatgcagagctgagccaggcataccccagcctcaggagcagggggctcagccagtccaggaggtgctggggacagagtcccatgggcggaggaggagagtcatctgtcaagttgccgggacgttagtgtccacggcggtttattgactggtatttcatttccttttgatgattctcaccatagccctgcggggtgagcagatggggaaactgagaaccagagaggatcagccagtgaattgggcagtcaggactgggtctccagcagtgtgcccagctctctaccccagcctcagggtcccagcatcccctctctggtcttccacagggtccaagggcgggcacgaggtctgagcaggcagactgggcagagtcctagcttcttctccaaaagggccacgtccttcttcagggaccatttcttccccatccggggtcttgagactcccaggggccatggaggggatttgagaggtctcctggctgatcctccggtgtgggcagatggcctcctttcagctaccctctgcttgtacatccctggccctggggaactcactgcctcacgggggaagtggggcagcttctccttcctggaggtgcagccggccccttggccctgtctgttctgaaggctcaaaggacagggctattccttgttttctgtgacaaacaacgtgggtctagcttttataagcttttactcttgaggggctcttctttaaggaaaataatacaaaatcatgaatacaagatgaagtgcagagccgtggggcttcagtggtttttgagtctctccgttgcccaggctggagtgcagtggtgcatcttggctcactgcaacctccgctcccgggttcaagcgattctcctgcctctcagcctcccgagtagctgggactacaggcgcccgccaccacacctggcgaatttttgtatttttaatagacggggtttcaccatgttgggcaggctggtctcaaactcctgacctcaagtgatccacctgcctcagcctcccaaagtgctgggattacaggcgcgagccaccatgtccagccggaaggaggtttctctctgtctgtctgggaggttgcaaaggaagggcccagaatttgggtttgcttaggcctcggtaaacccgcttcctcctgccacctcctgcgttcaggcgctctgcaggctgttctacgggagccctgcgtgtggccgctgcatctccccgcctctgacccctttgttcctaggtaagtccatggcctacatgcgcggcatgtactttcgcatgaaggatgaggtgttccggggctccaggccctacgagtcggggcccctggaggagttcctgaagcgggagtttggggagcacaccaagatgacggacgtcaggaaacccaagtaagccctggcgcactggggccgtggccgcagctgtgcccactgtggctgttccctggggacagagggctccctgtcctgctgagggagggggaagagcgccccacgcttgaggggagcagagggaacccccttcccagggaggcagagggctggggtgtggctctcacttgggcatgcagacacctgctgagcgcaggaggggcgtggcctggtgggcctggctctgccctgcctggctctgccctgcccggctctgccctgccggctctgccctgcctggctctgccctgcccggccaggggtctggggcttgcctggagagagcctgggccacccttctctgagaccacctgggcagaggctgggtttttgctgcccaggcaaaaggaacccactggcctttcaaatgacacggctaaacattttctcacatttcagacagcactcgctcccaggatcggactactaggttataatcagagggcttcagtcttacctttaatttaaggcctacaagacttgaactaatttaagtcagactgaaggagaaagtcacatttccaggaaacatttgtttgggaagcccaaatcctaggactaagcaatgcatcccgttcggggctggatgaatggtgtgttccaagaggagtgttttgagcatttctgagtgattttttcatattttgaaagtgagtgtcccccagtcttaggggcccggcatcccctctgcggtcttccctagggtccaaggccagggaccttcaatcttttttcccactctgtggcttgtctttctgctctgtggtgtttctaggtttttgttttttgttttttgttttggttttggttttggtggcccatgttcttaatgaggtagataatatttataaatatttttcttcttgtagtttgtgattttttcctttctttctttcttttttttgaaacagggtcttgctgtggggcccatgctggagtatattgctgtgaacacggcttactgcagcctcgacctcctgggttcaagcagtcctcccatctcagccgcctgagtgcctgggactactagcatgtgccaacacatgtattttttgtagagatggggtttcaccatgttgtccaggctagtcttgaactcctgagctgaggcgatcctcccgccttggtttcccattacaggcatcagccaccatgcccagcctagtttgtgctttttatttctcgttcataaacccctttgctgcccccaagcagcacacgattctcctgtgtcgagctggaaagctctctagatctgccttttacattgaggtcttttatcaacctggaattgatttttgtatgagggtgaaatccaagatccaatttaatgttttccacgtgattggccaatttttcccagccccatctgtgaagtctgtccttccctccgcttcctcagcagtgggtcaagcatccctctgctcttggatctgctccaggctgtgttttgttccactggttggaaagctgtctctgtgcccggaccacagagcataaaaaactaccgctgtgtggtgagtcctggtgtctgggtggcagatcctccaccttggccttcttcaaaaacatcatggctattcttgggggcagtagagagaagtggatacaagcatagaccctgaagtttctacctcttctcaaaaataggaatatgccaggcatggtggctcaagcctgtaatcccagctctttgggaggctgaggcaggaggatcacttgaggccaggaggtcgagaccagcctgggcaacatagtgagaccctcatctctacaaaaaatttaaaactaacaattagctgggcatggtggcactatggctgtagtcccagctaattgagaggctgaggtgggaggatcacttgagccccggaggctgaggctacagtgggctgtgatcccatcactgcactccagcctgggcaatagagtgagaccctgtcttaagacaaaaaaaaaaaaacaaaaacaaacaaactcacaaactataaaaagaaaaaatatttataaattctactccattaagaacatgggtccatccaaataaataaataaaacaaaaacaccataaagggagtaaaaagacaagccacagagtgggagaaaagatttcgaatccatacatccatcaaaggactcattttcaaaatatgaaaagatcattcagaaatgctcaaaatagtaaccaccattttactttctcttcctatgagtttaactgctccaggtactgttaagtaaaatttttaggggataattgatttggaccaggattctgtaccaggcccaacagaagaaacgaatatggagtcattcatgccaagtgaacctagttagcttaggcgtatacccatgtaacaaatagctgagttctggttagctacaacagctaagctttaatcaatcatagatggccacctgattcaaacaaggcaaaccaattaagctccacacctcactttggttttcagcccatcaacactgcctgaccacgttgcaggccagagttctttgaacctattctggttttgtggcctgcctgactctcagttcatcaataaaagccaattaacatctttaaatttgttgcaattttatctttgaccgtaccttatgtaagtggaatcatacagtatttgtctttttgtgactggcttatttctttctttttttttttttttgagatggagtcttgctctatcacccaggctggagtgcagtggcgcgatctcggctcactgcaatttctgcttcccaggttcaagtgattctcctgcctcagcctccggagtagctgggattataggcgtgcaccaccatgcccggctaattttttgtattttagtagagacagggtttcaccatgttggccaggccagtctcaaactcctaacctcgtgatccacccacctcggcctcccaaagtgctgggattacaggggtgagccaccgtgcccggccatgactggcttatttcacttggcatccatgttgtagcgtgtgtcagaatttccttcctttttaaggctgaaaaactccattgtctgttggatacacgttttgcttctccattcatccattgatggatattttagttgtaaattgactgctgtcaatgtcggatgtgcaaatacctgtttgaggcctactctctcttactggtgccttctctagagagaattctgatgggttcagtttgatcatattttgtttaagatttttggccaggcgcagtggctcacgcttgtaatcccagcactttgggaggccgaggtgggcggatcatgaggtcaggagatcaagaccacagtgaaaccccatctctactaaaaatacaaaaaattagccgggcgtggtggcgggcgcctgtagtcccagctactcagagaggctgaggcaggagaatggcgtgaacccgggaggcagatcttgcagtgagccgagattgcgccactgtactacagcctgggcaacagagtgagactccgtctcaaaaaaaagatttttgtgtccacgctcgtgggcgaacttgacccgttttttcctattttgggttttgaggaaatatttcctctttttatttttcttggaagagttagtataatagtttattttgaatttatggtagaacttgatagtaaattcttctaggcctggagtttgcttggtgggaggatttttgatgatggaattaatttctatagtggttgtgagactgaccactcggggtttctaaatacctttttgagttagttttggttaagtgaggtttttctaggaatgtgtccatttcatctaaatctttaagcttattggcttagagttgttcaaaatattctgtttttttttttttttttttttttttgagacggagtttcactcttatcgcccaggctggagtgcaatgacgtgatctcggctcactgcaacctctgcctcctgggttcaagcaattctcttgcttcagcctcccaagtagctgggattacaggcatgcgcaaccacacctaatttttgtattattagtagagacggggtttccccatgttggccaggctggtctcgaactcctgacctcaggtgatccacctgcctcggcctcccaaagtgctgggattacagacatgagccaccatgcccagccgattctcctttttctaacgtctgcagtgtgtgttggtgcggcccccttttctttcctgattttgataacagataacagccatgttttatcagtcttgcaacaggtttttccattggattagcctttcaaaaaaaccaacttttgctgaattgtgcccccaaggttggaccaatctgacactcctccagcactgccggagagagcctgttttgcggggatggtgcggggagaagcccacctatcccgaacagaggttggagtgggcactctgctacccaaggccctggggtgtgaattgtggggaaagggaaaggtggatgggcgggtggctcagccgtcctcctgcctcatttctctccagggtgatgctgacagggacactgtctgaccggcagccggctgaactccacctcttccggaactacgatgctccagaaactgtccgggagcctcgtttcaaccagaacgttaacctcaggcctccagctcagccctcaggtttaaaccatgtttgatgcatccatgggaagcgactggcccgagaggctgtggggtggtgggtgggagtcgtgcacttgccatcaggcaccctcaccgtgccaccagcccacccgctgcactggtctttattggctgaggacagggattgcgggggagctgtcaggcccctggcaggttagaaaagtccctggaaagtcctcagctgtacctgccttccaccaggacgaactagccagagagtgtggcttcgtgggtcctgcttctgaagagttcccagcctcccctcttcccgcacccccagcccccaacacgcacaccctgagatctggagtgcatgggttttatgccagtcccttgtgccactgggccgccctccttccccgcccctagaccagctggtgtggcgggcggcccgaagcagcggggcagctcctacttacttccgacccaatgggcgcttcctggacggtgggctgctggccaacaaccccacgctggatgccatgaccgagatccatgagtacaatcaggacctgatccgcaaggtgagtgccgtaggccagagggcctggacccactgctccctggagccaatcctgtgtcagcaaaccatgctagggaccgacccccaggacagcaggtggcttttacacacgcactcattcatatgtgcacacagggcaaattgatctcactggaacctgttccatgggtgggatctgcctgaagcactgtgctaagggggatctgaggaccactgtgctctaagtgtgcatgagtggggagggcggcatgcataccatgaacgtgccactcgagccagcctggggacaggacacatgcttgcccttgagctcacctctgtggatagacagtcccacaggaatgcctgtccccacgggttgccggtgctgtggtggaggaccgtgaggcctctgctaaaaggcctgggggctcggaaagggctccatggaacaggggacccatcctgaggcccttggggacagagcagtgcagaatcagtgatctggaggaagagcagcagccctctctctgcagaggtacagcagaggctggcaggacccagcatgctaggggaggccctgtggcgtggcgggcggtgggtgaccggggtgggcgagcgcggtggctgagctcagaccctggagccagggcgcctctgggggtccccgttctgcctgcactcactgcagctacctaatggggccatcatagcgcctgcctggggaggctgcgaggccttggcatgctgttgtctgtgaaatgttcacagcactgccgggagcctgagctgcatccttgctgctgtggtttcccgaagccccagggcgtcctgggcagcgcagcagaggctctgggcagacagagaagcgccctctaggggccagatcgggcagggcgggcttcctgcaggcggcagagaccgtcagactgtcagacactagccagtctaactctcctattgcgtgcggatggggagcctgggacccagagtgggaggcatcacccaagatcatccagcaaatcggcagcagagcttgttcggaagcaaataagagaggcagcggccgggcgcagcggctcacgcctgtaatcccagcactttgggaggccgaggcaagtggatcatgaggtcaggagatcgagaccatcctggctaacacggtgaaaccctgtctctactaaaaatacaaaaaaattagccaggcgggcatagtggcaggagcctgtagtcccagctactcgggatgctgaggcaggagaatggtgtgaacccaggaggcggagcttgcagtgagccgagatcgcgccactgcactccagactgggagacagagcgagactccgtctcaaaaaaaaaaaaaaaaaggcagcacccagggctcaggttcaagccttagcccctacttccctaccacgtggcccctgcagctgcttcccggcctgagcttcgctgagagccctcatttgcaaactgggtgatcagtgccctctccacagactggctggagattaaatgaagtaatgatgcaaatacctggcaaatcaccaacaccaaggaacaccgtctgcctttcctcccctggccacgacttgacttgggccagcatcagatggggtgggcgggatccttcttgcagctggtgtatgtgtggtcctgttggtacacagatgctgtcctgagcagatggcatgtgatgcccgcaccagccgttctggggtcacgtgcaagaggctggctggaaatcatgccaggcatgctcttgccaccagagacctcttgccctgttctcatgtgccccagagcccagtcttgggcctccccttgacgctccccttcgtgccccctacctgtggaaggtctcttctgactgcccctgtcctgttcccaacagggtcaggccaacaaggtgaagaaactctccatcgttgtctccctggggacagggaggtccccacaagtgcctgtgacctgtgtggatgtcttccgtcccagcaacccctgggagctggccaagactgtttttggggccaaggaactgggcaagatggtggtggactgtgtgagtgtgggcccctcccccaggccacttccctcagggtctgtagcccaggtcgatggcttcccctcatcctgtggggcctttggtgttggaggagacagcagggctctgtccatcgcctttagccagctggagggagagagagtccacagttcagagtctcagtgcggggcagggaccctcagtgaccaccagcaggggggttttcaaacgctttttagctgcggatccctttctgcaaacatagcgcagtgtagaagcccagaatggacaaaggctccagagcgggctgggcgctcaccctgtaatcccagcactttgggaggccaaggcaggcggaccacttgagcacagcagtttgagaccagcctgagcaatataatgagactttgtctctaccaaaaaattaaaaactagctggacatggtggtgtgtgcctgtggtcccagctactcaggaggctgaggtgggaggattgcttaagcccaagaggcagaggctgcagtgagctgtgatcatgccactgcactccagcctgagcaacagaaggagaccttgtctcaaaaagaaagaaagaaagagagagagagagagagaggagggagggagggaaacttcagggagaggggacatggaggcctgtcgactcagccgctaccctttcccccactcatcatccctgaaagggcactgctgagacctctgcccctctgattgcacagctgggacagtccctgcagtcccaggaaggggttttgcccgagccgctctgctgctgtgtggctcagcctgactcgaaagagcctggggctccccaggctggggctccgagagtgcagggcagggccgggcggggtgcgggccgggcggggtgtgggcccggcactcaccaaggctgcttctcaccagtgcacggatccagacgggcgggctgtggaccgggcacgggcctggtgcgagatggtcggcatccagtacttcaggtgagggctcagccgccccagcccttggccccgtgccctggcgtggtcggactcaccgaccttcccctcccagccctagtgtggactttcccttccccaagggtctgctctgttccccaagcccaccctggtcctagctggcgtcccctgcccagcctgagcatcctagggtgaccccctcctccctggcccgaacagattgaacccccagctggggacggacatcatgctggatgaggtcagtgacacagtgctggtcaacgccctctgggagaccgaggtctacatctatgagcaccgcgaggagttccagaagctcatccagctgctgctctcaccctgagggtccccagcctctcaccggccccagctgacctcgtccattcagcccctgccaggccaagcccagccactgccctcccgggcagatctgggcccaggcacctctgagtccatagaccaggcctgggagaatgccaagctgcctgcccgaggctggtcctgaaggcctgtctcccactaaccccgccttccagcactttctgtcattccaggctgggaaagtctagagccccctttggcccctttccctgactgtcaaggacaactgactcccccatcagctcaaacattaagggtacccgggcacaaccgtacccctgcccccagccccagcctccctgagggcctgccgggctgcctctgccccagcccccagcaagggcactcccaggcttcctggtgggtgcagcccactccctctgccctctgctccgttccctgggggctgggactaaagaaatgggtgtcccccaccccatcagctgggaaagcccaggccgcaggagtgggatgcccgttggactttgcccctcacactggcccagcccctcacac

SEQ ID NO: 15723 - DNA, 103025 bp, Homo sapiens
gccacgagcgtggcgggcccgcgggcggcggccacggagcgcgcgaagccctgcagcgcctcgcacttgccgcgcagcgcgtcgagctccaggcgcatggcggcgttctcgcgcgccagcttgtccacctcgcgctccagctccgacttctgcttctgcagctcctccttctggcacacgcgcttcacgcggcagctggcggcgtagccacggtttttgagtgtgcggcgccgctgcttgagccgtgtcacctcctcggcggagagcccgcgcagatgccggttcagctcgcgcaccgacagccccatcagcgcctcgtccgacaggtgcggcgtgttctcgctcagctctcgcttgatctgcgggcatgaggaaactgaggtccaggggactggggacgggcccccccgctccacccgcggtgttcctctttcaccgccttagccgccgaggtggtgggtggacttgatccaaaaccccgaaggggagcaggaatccgggaaggggaaaccgggccagactaggatcgggacacaaaaggaggccaccccggggctcagcctgaattctaacctagcgccaagccctggactcagccagagaaacccaggtcggaaagcacctttgaatgccccaggggacattgacccgatggggaaggaggcctggagagggaagtgacctaccccagggacatgcagcctgtgaccagagcccaggcctcctggtcccagcccatggctgtggcccttccctttggcatcatgaaggcctggtgcctgctgagccacccaggggattccaggaaagaaggggaagttgggatgaggaggctctgcatgggcagggagggagggcttcactgggttgacagaggctgcctcctcacctttagagctttgctggataggggatccacagacatgtttgcagaaggtgccctctgggctgcagacctagggtagaaaggaggtcaaagtcactgttttgtttttggtttcccatttagaataaaatccaaactcactaccttgccattcaaggcctctgctatcttagaactgattcatacctgccaccttcctctctccacattggtccacaggcctccttgaatggctccttccagccgcgggagctgtgcacaggctgtgctctttactgttctagccccatggtgactcctcatcatttaggtctttgcccaatgtcacctcctcaggaggtcctctttgaccattctggctaaacgcctctgtgtcacatcacataaccccgcctattaacccttgtaacagtcacctcttctgcatttctcatgcttggttcctcatctatgatttgtttctccttcccactcctcctccaccaaaacggaagccaatgaaggcagaggccttccctgtctcaccacggcatcaatatgcctaaatcagtgcctggtatatagtagatggctcagtaagtgtgcaccaaatgaatagatgtgcctctcctgaccattcttccacatggggcttggacatgtgcctttgatttgatttttcagaacttttctttctctttttctttctttctttttttttttttttttttttttttgagacagagtctcactctgtcacccaggctggagtgcaggggcgcgatcttggctcactgcaacctccgcctcccgtgttcaagggattctcctgcctcagcctcccaagtagctgggattacaggtgcctgtcaccacgcccagctaattttttgtatttttagtttatttttatttttagagacagggtttcgccatgttggccaggctggttttgaactactgacctcaggtgatccacccgcctcagcctcccaaagtgctggacaggtgtgagccactgtgcccagccaatttttcagaacttttcttaaagtataacctacatacagaaaagtacacacagcatatgtgcaccagtaaatgcctttacacaaagcccatccagcaccccgtaagatacaacatcagccagtcccctctctccccaggcctccttcatctagacctctgttttgggaaagttttcccaacctcctgggggctgccccatactaactcagcatgccctaggcagatggggcagccatccctagaccaatgagggcctctcatctcctaatcctccctcccacaggcctgacagccacatgctccttcaacaactatttattgagctctttgccaaacatgtacttggtaatggggagaaaaaggtgaataaaactcgtggagggtcagtggtcattgctctgggctggagaaggggaccatctcccaaagtcccctttaaagcagcagtcctctctgtctctagctgataggatctactttgccaatcctctcaggttctccgccatgagaacctgagttttctcatctgtctccaaggggagggggcagtgataagaagccaaggaaaataaaggaagataggctgggcgcggtggctcacgcctgtaatcccagcactttaggaggctgagacgggcagatcacctcagttcaggagttcaagaccagcctggccaacatggcaaaaccctgtctctaccaaaaacacaaaaattagcccaggcgtggtggtgcatgcctgtagtcccagctatttgagaggctgaggcaggagaattgcttaaacctgggaggtggaggttacagtgagccgagattgcgccactgcactccagcctgggagcctgggtgacagagtgagactccatctcaaaaaaaataaataaataaaaagaaaacaaaggaagatgctttgtgatctgagctgtagcatcctataaacacgtaccgtatcggaaagagcatcacccagttttgtggacagcagagggcaaaagccagatccaagtcctggttccttgagctgtctacagggttgacctcacgggttggctcagcctctgacacattctggcaggaccggggtgtctcccagggacaaggtgcagaaatggaaagcacatggaccttggtgccagacacacctggggccttttgggggtggtctcgctctctagttgtgtggttctgataggtcagccactctttctgtgcctcactttccccctgggtgacacaggtagctgtgttaagtcagctcatgtcacacctctctcaggaccttcccacggctcactggagtaaagccagagttgtcaccatggcccacaaagtgctgcagaaagtgatccccagtggccgggcgcggtggctcacgcctgtaatcccagcactttgggaggccaaggcgggtggatcatgaggtcaggagatcgagaccagcctggccaacatggtgaaaccccgtctctactaaaaatacgaaaattagccgggcgtggtggcacgtgcctgtagtcccagctacttgggaggctgagacaaaagaatcgcttgaacccgggaggcggaggttgcagtgagccaagattgtgccactgcactccagcctgggcgagagtgagactccgtctgaaaaaaaaaaaaaaaagaaagtgctccccagcatcccttctccaacctcagccctacttggcttccttttgtttcccctgcctcagccacacccgcccttcctcaacacaggatgcacgctcctctccagggcctttgcactggctggtccctctgctggcgtttttgtttttgtttttgttttttatacagggtctcactcactccgttacaggctggagtgcagtgacacgatcacagctcattgcagcctcaaactcccaggctcaagtggtcctcctacctcagcctccctagtagctggaactataggtgcatgccaccacacctggccaatttttgtactttttgtacagacagagtttcatcatgttgcccaggctggtcttgaactccttggctcaagcgatccgcctgcctccgcctcccaaagtgttgggattataggcatgagccacgacgcatggcctctgttggcatccttgttccctagatatccacaaagtttgctccatcacctcctgaggtctcttcaaatctcatgttcactcagtttagaatttgcaacccctgatacacacacggacacacacacacacacacacacacacacacacacacactccctgtgtcccttccccacctcaggtttccccatgtgtaattgtcatcactcacatatatggtggttatttgttcagtgtctgtccctcccaaccccccgattagaatgccagctccatgagggcagaacttatacctgattcaccgcggcctcccccatgcctagaaccgcgcctggcacctcgcagatactcaaggaatccttgctgagttctcagtgtgactcaggccaaggtggggacagtccagggcttctcaggaaactccccagctcctcccagcccacacagtcagggggtctggcagctcacagggaaggaaggagtgggacagaaggaagttggcgcttgcagagatcccctgacaggggcagccactgtggcccttaagcaggagagtcttaggggtcacccaggtttcgctgggggtagctgggtggacccagagtgccaggtcaggacccaggcagctttagacccctgtgcggatccacggtgaagaccagtggcttcatggggtgacccctgagctgcgaccccccactgctgaacatgccggcttagcctgggctctggcctcagtttccctgcctagcactccaaatcctagggggctcaggccctggctgcccacctagctctccttgggggcctctgtgcactcccatcctacctggaaaagtcatatgagatctgctggctaccctgacctttcagatactatctggagacgtttacatgtcaacctcaccgatcctacctttcaatgcaggccttttttttttcccttttttttttttttttttttttgagatggagtctcgctctgtcgcccaggctggagtgcagtgacaggatctcagctcactgcaacctccgcctcctgggttcaagcgattagctctgcctcagcctcctgaatagctgggactacaggcgcctaccaccacgcccagctaatttttgtatttttagtagagacagagtttcaccatattggtcaggctggtctcgaactcctaacctcaggtgatccacctgcctcggcctcctgaagtgccgggattacaggtgtgagccaccacgcccaacccaatgcaggcctcttaagtggtcaccctcaccaccctacacacacctggggaggtcccagcacacctccctgctggtctcagctcattcccacacagcagctggacaatctttgcaccacgcgaatctgaccatgccaccagccagattaaagccttccatggttcggctgggcaaggtggctcatgcctataatcccagcactttaggaggctgaggcgggcggatcacaaggtaaggagattgagaccatcctggctaacatggtgaaaccccgtctctactaaaaaatacaaaaaattagccgggtgtggtggcaggcacctgtagtcccagctatcaggaggctgaggcaggagaatggcgtgaacccgggaggtgaagcatgcagtgagccgagatcgcgacactgcactccagcctgggcgacagagtgatactccatctcaaaaacaaacacaaaaacaaacaagcaaacaaaaaaaaaaccttccatggttccctactatcctaaggatggagtccagacccaccctcccagcaccccaggccctgtgtgtccagccccacgcccatttcccaccactgccacctccactctgtgctccagccacacagaatttctttcacttcctcccacccgcgctttcttgcctctgagccacctcccaccccatgatatttctctcccctcactcccctctactttgtttggcagactcctactcatccttcggccctgggtgcagacatctcctcctccaggaagccctccctgatccctaggacttgttagggacccccacccctgtgtgtaatgggttgtatttccttgctgtctctccaccagacagggagaggctgagtcagctctgggtgcttgaggccacccatctcaagacctggcagggagcaggcactggggaagggtggatggtcagagtctctgacgccatcacccagcttgtcaccaagccgggttccaagccgaaacgtagttcagtacctcctggccctgtctctaattcttcctcctctccagctgcttccttgggcctgttggcagagacagtacagatgctaggcgaatgggaagagagcagaggggatcccatccacgtgactttgggcccaaaggtggggtgtgggaaacagggaaaggagcactggattgggagtcaagcttgggtttaagtcgcatctctgttttctcaggctgtgtgacctggggtgagccactccatctctctgggtctccactttcccatctaaaggatcggaacaatacctgcctcgcagggttttggtggaatcaagtggtatacactgtagaggtcagtgagcagctgggaggttagaattgctgtctgtccaggaggggtcaggcctgtagccagcactggggtctcgctctgatttagcatctcccagctggctggggtcacacagggaactgcaggaaaggcccttagaggccatcaggtcctgcctcctccctttacccaaggggaggtagagacccagagaggggcagcacttgcctgaagtcacacaataggtgtgaatgaatagctgcaaaggcccaggactgaaacctggtcccttcacaccgtcacctccctggttcgcccaaccctgaggtaatgcccagagaggacaatagagtagtccaggctcatacagccagcatggggtagaattcaggcctgagagttcaagaccaacctgggcaagatggctagactccatctccaaaaaataaaaagattagccgggtgcagtggtgcacacctatagccccagctactcaggaggctgaggcaggaggaaccattgagcccaggaattcaaggcggcagtgagctgtgatcccgccactgcactccctgggtgacaaagcaagaccccgcctcttaaaaaaaaaattagccgggtgtggtggtgggcgcctgtagtcccagctactggggaggctgaggcaggagaatggcgtgaacccggagatggagcttgcagtgagctgagatcgcgccactgcactccagcctgggtgacagagcgagactctgtctcaaaaaaaaaaaaaaaaaaaaaaaaaaaaaaaaaaagatggccaagcaaggtggctcatgcctgtaatcccagcactttgggaggccgaggtgggcggatcatgaggtcaggagactgagaccatcatggctaacacagtgaaaccctgtctgtactaaaaatacaaaaaattagctgggcctggtggcacacacctgtagtcccaactactcaggaggctgaggcaggagaatcgcttagaacctgggaggcagaggttgcagtgagccgagattacgcgactgcactccagcctgggtgacagagcaagactccatctcaaaaataataataataataataatagaattcaggcctgaggccacatggagccacacacctcctccctgtgtggccctggcagggcgacctccctgggccctgtttccctagccctgtgaagatgaagctggacttgccagtttccaaggccaccccagctctgattctccaggatttgtgttgggcccgctagggatacgatttgcaagttacagttaagtatccaggcccccttaccagccgtttggggagctggcacgtgcagtgatgcttggccacctgagctacacagaaagacccaatgggagaagggaagcctctccccacgcaagttaatcaactgccctttgggtgttgcggctgatacagaacctcagaggcacagtctggcctcatgcacaagtcatttttcctgagtcctggattccttgctaagtgggaataatcacaataatcttggtgtgtaaaatataaaggcttaggcaaggccaggcgtggtggctcacgcctgtaatcccagcactttgggaggccaaggtgggcagatcatctgaggccaggagttcaagaacggcctggccaacatggtgaaatcctgtctctactaaagaaaaaaaaaaatgcaaaaattagccaggtgtggtggcgcacacctatagtcccagctacttgggaggctgaggcagaagaattgcatgaacccgggaggtggaggtttcagtgagctgagaacaagccactggactccagcctgggcaacagagcgagactccatcaaaaaaaaaaaaaaaaaaaaaggaggcataggcaagaaagatcacctcatctcaccatcatcccactatccacaagcaacagagacatcactaaccacacacagcaccaattcccagtgaggcaggccacagcccctgagtctttctcagcacagaactgttttctcctgagcttggacacagcctagaatcctcaacactgcctccagaccaggcctgagagatggaaccatcagccattccctatccttgataatagcggaagctggctgtgattgtaaataccctcaggtgctaggaaggttttgaacctgctcttcccccactcctccatgccctcctgtccgagcctcagccccctcaaccgcatcctggatgtcagctgaggcacccacgtttgcccaggaatgtcctagctcagcagtcaggcaatcacagggggaaagtcacaagaagggggaactttctggtaacctcaggctttccgctgccaaccccaggccaggggctgccaaggggcctgggtcctctgcctttgccaggctggctgaccctgggcctgagaaatagtagctgatccgatcccctgttcagcacctgaggcaaccaagccactgtttggtagccgtggcggactggaacccaggggtcctctgtcttctatgtcggccaccaccacctctccctggcttcttcccttggaagccagcagagctgacctccagggtctgcaggttcatgacgtcttctggaggcataaggagagaggtgactcttgagggactgacaactgccttgtccagtcagcagccacaaccctccaacgtccccctccctggccccaccagtccactccagagacatcctgtagaaggcccacccgctggcatgggctcctttctggctgctgagccattctgctcgctctgtgaggacagggaaaaaatgtgttttcctagctcttggcagtcagcactgctggagcctcctccctgctggaaggggagcaaggctggaagaaccaagcaccacagagaagcaacggcctggggttccagccccagttcaggtaccctctcacactcgctgtgtggcctcaggtacggcactccctctctctgggcctcagttttcccactatgccaaacgtcctccgagcctaaggtaccttccaacaatgactgtctctgagtttagagtttcagattctggcccagagctccaagaccaccagcagaatggaggtagggaaaggaaagcggtgaaggcttcctggaggtgggggcatgagacacaaactatcagactatcagactagccctcttctccacctgcacagccacagaccacttcctccttcatctggaccatgaccacaaccgcctgctcaccagcctcttgccttgccctccgtctccaatccccatcattgatcctcccccaagagctgtcagaggaatcactactgacacaaacccacgagcctgtccgtgcttggcccatttcaaaaccctgcaatgccagcctccccgcaagccaacacagtagggtcctcaggcctcaaccgtattcctgtccactctctcccaggatcgtatgctaacagatgaatgaacagacagcaaattctactatccctgaatgtttcccaaagggacaagcgggcagtgcatgcctgtgtgtgtgagggaggaagttgcctgagtcctgaaggatttgctcgcttttgggagactgcttcaagattcccccagcccctgccctggcttcctgtttctctggggttcccaggcctttttctccatgtgttgtggagctcttagagggcagggatccagggctcattcattcaatcagcaaacatccaagaagcacctactatgttccaggctctgtgctgggccctggagaccctgaagtgaatcacagctcctgccttcaagggcttcacagacaaccaccactctatcagactcagcacactagtcacctccccagggaagccttccttgattgccctggctaagtcagagcgctgttatgtactttcaaaccacagtgacttctccctcacatcacccatctaagctgtgttttgcatttacttctgtggatcttttttcaagtttgtgtccgctgctgagctataagctcccagagggcagtctctggatctggtctgttcatctcatccctggcatctggtccaggacaagggcccaatggcaatgcagggcccaggggtgattcaatgggaagttaaacttctcagtgctaactttccatctgggactgagtcaaccagccacttcccctcatcccctgaccccaggccctactttgtaatgtttcctgcccagctttgagggtgggcctgtctggttcctgtgctcctggccccaaccctcctgactcaaaccccacctactcttgggtacccccagctcctggcatggggctgtcagccctgctttctcttccacaattcacctggaaaatacgctgtctgcacagacttccagagcttcccccttctacccaccatcctgccatcctggctgttacctagttcccagtggtagatgggaatactgagggtccgggctgctgtagcagagctcacccagggttcaaagatccaaagtcaaaagatcattggttcctcaccctagcaagttcaattgctcccctcccacaattccatagaccgtgggtgggtgggtggagggggaaggtggattaagaccaaggaatctctagcccccagcccatcctgcaggcggctacgacaaacaggtgctttctgcagggctattgggtgagtgggtgggtggcggctaggtcaggccccacccctcactcattaaccctccgtgcagtcagagttctatccccaatgcctactgaccctgcctggcccagggtgagggcactcggggtctgtcggctggctcagagcctcagctagcttccggcgtccagctgtaggtcagtctagtctcaccagtcccacttgtgaactgaaactaccaggagagcggaaaccggctccgccccatcctccacgacctagcaggtacagcctccagaacccggactagctaaaagcctgtggtcctctccctgcgccgcacccttgcagtcaaggttttctggcccttcctgttctcatgggactgaggggatgggcaaccctggggacgaacgagagtcccttggttcttccctccccaggaagccccaaaatctggggacaagaacctgggctccaactcactttgttaccagatccaccggggtgccaagcgggggtggctcacatccctcactcctagctcagctgggtggggtctttgataccttgccccaccctgtggctgcgggcgcgggctctgggcgggagacaaacactggggtcacgtggcggaggccctgggaaactccggggagagccggggacggacagccccgggtagtaggactggggcggcccgggccagaattcccagaccccgtgcgaagacgcacgggtccgcttccttcgctcgggtccttgttccgcgtttactccggtggccggcccagggcacgccctctccgaggtacacactgctggtgtacaggccccagggagcgcgcgcgcggacacgcacacacaagcacaacacacgcacacacgcccccgaggtacacagcgcacgcacgcaccgggcaggatacccaggccgcccgccagggaacacacgcccgccctcggacgtaaacaaaccgcgcacgcaccgcccgcgggcgccgggccagggcctgttcccaccgagtcacgtaggagcacagcgcccccgcccccgccgggcggacgcggagatcgccggcctgcgctgccccttcctcccggcgccgccgcctacccgcccgcgccccgggaaggggccccgtctccacccccactcccccgagctggcctcggccccgtcctcggcgtccccgggacggccgctcccttctccccgccccgagccgtccgggcgatggagctccgggagccccgacggatcgggcccgggcgcccaccccaggcgcatcccgggacgcagaaaccctgccgccttggggtcccgcgcaccgtcctcctggtcccgcgttcctcacccgcttctgggcccgcttggtccggcgcgctcacacacgcgcgtctcgccgctgtcccggccgctgtcccgatccgcgctccggtcagtctcccctccgctctgagccgcaggtcgctctgaaccgggcgcccgggagcgctgcgctgagttttgttgtggggcgggcggcgcagggggccgaggccgcgcggagttgtaaggcgagcttcccggaattactcactcacaggattcctttcattcataaaaacccagtcatgcggtgacgtcaccgacccggccgccctccggccaggagcggccgcttggtccctcggccccgcccccgtatgaccccgccccctggaagccccgcccccggggctgccgcgattctctgcctggttccagggctcgctgggtgcgttcacgtgacacctcgcgagagccccgtgggtgtaggtgtcattggctcattttacaggtagtggtcctggccctcttctttcgacctagaccttctgccttaatgatctcatccagtcccgtggctttaaatgacatttatatggctatgagccccaggtttgtatttccggagcgaacagcttctctgagttccagactcatagccagctgcccactctgcgcatccagtgggtgtcagatgggcactgcagaggactcggcccaaaaacccgctcctgatcgtcagccctacctctgctcccttgccaccccatctcagctgctcaagccaaaaccttggagcctggctccatccctccctctcccttcctccccacctcaggactcaagctagcggtgtctccaggtctcctgcataggaccatttctcaccacctccagtcatggcacctggtctcggcaccatcagcttacccggacaatggcagcagcctccgaggctccctactttgcctccaaagtctttctttctataccagccaatgttcttctcaaaacaaagctcaggttgtttacacaccttctttggccactctctcctcatccactgctcttcggccacagtgcccttctttctgtcccccaaacataccaagctcattcctgcgacaggcccttggcactggctgtctggtcttctgttcacttgcctgactctttctcatctttcacgtcagcccggatgtcactgcctcagagagacatttcctgaccaccctggttaaagcagtcttcacctctgaatttttttttttttttcgagacagggtctcactctgtcacccaggctggagtgcagtggcacaatctcggctcactgcaacctccttctcctggactccagccattctcccaccttagcctcccaagtagctgggaccataagcacacaccaccatgctaggttcattttttgtatttttttttttttttttttttttttttttttgtagagacagggttttgccatgttgcccaaactggtctcaaactcctggactcaggcaatccacccacgctggcctcccaaagtaatgggattacaggcgcaagccaccgcacccagccttgaaatttgttcttatattatcttaatacttctgtagggtgtttcatcatttatgtatgtgagtgctggttattgtctgtcttccccaaccagaatgtatgttttatgaaggcaggccttgcttctttttctttttctttttttttttttgagacagagtctcactctgttgcccaggctggagtgcagtggcataatcttggctcactgcaacctccgcctcccaggttcaaggaattcagccccccagtagctggactacaggtgagtcaccatgcccagccaggctggttttgaacccctgacctcaggccacccacctcggcctcccaaagtgttgggattgcagacatgagccactgcgcctggccaggcttatcttgttcaccactgcctgcccagtgcctggagtagtgcttggcacatagtaggcccacagtaaatacatgttgaaggaatacatgactggaggctcagagaggtgaaggtgactttctaaattcactcagctaggaagtacaagcactggaattggtatccaggtctgaatgattcctggcccagatgtttgggggtacatcgcaaccaggggaggagggccacataaacatgaggggtgtgcgccgtggtgggaagccccacccaaaagagatggctttggaggccacgtgcggggtggatgttgctgttcatcccctgctttcctttgctcatgatgttcccactgcctgaaattccatcgctcccacagtccctcctgtgaagccgacatcatggcacttactccactgtggagggcatagggcctctccaaatgggtaggcctctatgtggcaccctgatcaccagtaaggatccccactttcctttttttttttttttttttgagccggagtctcgctgtgttgccccaggctggagtgcagtggcgcgatctcagctcactgcaagctccacctcccgggttcacgccattctccagcctcagcctcccgagtagctgggactacaggcgcccgccaccgcgccctcctaattttttttttttgtatttttagtagagacggggtttcaccgtggtgtcgatctcctgacctcgtgatccacccgcctcggcctcccaaagtgctgggattacacgcgtgagccaccgcgcccagccccccactttccttgatgtagcaaattcgatttcagcgcccttgtcttgctttcctgcctctgtgccttggtccaccagacactatggcttctttccgttccctcccacaggctgtgggtttggtatgcaaattggcccactagtttcccaagtgaccaaatgttgaggcagctttgtctagcactcaaaaggatctctaaaaaccaattgctcagtcctctccatgtgcatagcagaaagagccacctaggttaacctttggggtaggaaagttctcagttttagaaactgcacaatggtgagttgtctattttctctaccccccaccccctttaaaaccaaaaccaaaacaaaacaaaacagggtcttgccctgttgcccaggctggagtgcagtggcatgatcatagctcactgcagccttgaacttctgggctcaagcgatcctctcacctcagcctcccgagtagttgggactacaagtgtgcatcactgtgcctggataatttttctattttttgcagagatggaggtctcaccatattgcataggttgatcttgaacccttggcctcaagccttccttctgcctcagcctcccaatctactcccttttttatgagcttctcaagagctggggccacacctggaacactgtaggtgctcagctagtgagtgaattctcagtggacctgaacaacactcctggacaccatgctgcctagatcctttactcccatccccagcctgccagaacaagggggtcagtgcctcattatccaccctgcagggactgcttcccatagacatagctccctttctggtcaagatcaagggccatggtgcaatgtcctatttaaaagtgggagctcaggctgggcatggtggctcgcacctgtattctcagcactttgggagaccgaggcaggaggatcacttgagcccggagtttgagaccagcctgggcaatatggcgaaatcttgtctctattaaaaaaagaagaggaagaaaaaaaaaaaagaaatgaccatcaggcagccaccatagtaatcatgggttgcagcaagaatcaccaatggatatgaaagcttgatgagaaagtatttacatagtttcaagttatttacccacaagatgataattaattatggaaggaaaaataataactctgcagtggagaaatttggcagacacaaccttcgctaagtgatcaaagttaatatcaccagtaaggggcaaattgccacggagtttgtagatgaggtaattactgcatggatgcccaacttcctggcttcaatgcttgtcctgtggtcatagaagagaatgtgtccttgattttaggaaatatacactggagtatttatttatttatttatttatttatttttttgagatggagtcttgctctgtcacccaggctggagtgcaatggtgcgaccttggctcactgcaacctctgcctcctgggttcaagtgattctcctgcctcagcctcctgagtagctgggattacaggcacccaccatcatgcccggctaaattttgtatttttgtagagacgggggtttcaccatgttggccaggctagtcttgaactcctgacctcaggtcatctgtctgcctcggcctcctgaagagctgggattacaggtgtgagccaccgtgcctggcccactagagtatttagaggtaaaaggcatcatgtttgcaatttactctgacatggttctgaaaataatacatatagatagatagtgttatgggtggaatttcataatgttaaaatgtgtatgttgaagtcctaatgcctaaaaatctcagaatgtgactgtatttggagataaagttttaaaaggcataagtaaattaaaatatatacggtaggccctaatccaatctgaccagtgtccttataagaaaagaaaatttggccaggcgcagtgtaatcccagcacgttgggacgccaaggcaggcagatcacttgaggtcaggagtttgagaccagcctggccaacatgcaaaaccctgtctctacttaattaaaaaaaaaaaaattagtcgggagttgtggcacatgcctataatcctagctactcaggaggctgaggcaggagaattgcttgaacctgggaggcagaggttgcagtgagccgagatcacgccattgcactccagcctgggcgacagagcgagactgtctcaaaaaaaaaattgttttttgaaagtagggactctcaagtcagcctgtcgggttcagatcctggccccacgcctcatcagctgacgtcatctccaccctctataaaccgggctaatagtgcctcctttgcaggctgtgaaacaacataatgtgtttgcacttataagcctctggcacagcgcttagtatataataaaagatcaataatatcaggttagagagaggagtcctctacagcaggggtccccaaatcgcaggctgaggaccagtactgtttgtccgtggcctgttaggaaccagcgggctgagtgagcgtcaccgcctgagctccgcctcctgtaggatcagcactggcattggagtctcattaggagcgtgaaccctattgtgaactgcgcttttgagggatccaggttgtgtgctccttgtgagaatctaactacggccagatatgcctgatgacctgaggtggaacagtttctttttttttttttttttttggagagagtctcgctctatcccccaggctggagtgcagtgtagccatcttggctcactgcaacctccgccttttgggttcaactgattctcccacctcagcctcccccaagtagctgggactacaggcacgcgccaccacgcccatctaatttttgtatttttagtagagacggggtttcaccatgttggccaggctggtctcaaactcctgacctcaggtgatctgccccgctcagcctcccaaagtgctgggattacaggcgtgagccaccgcgcctggccactggaacagtttcatcccgaaaccatcccccacccacactccccactctccacccccaccccaccctcatctgtggaaaagttgtcttctacgaaatggtccctggtgtcaaaagcagaggaaatggacagagtgatcagttcgcccagaggccaagggaccacaccctggatgccaggtgtggtgctcccgtgtatcaggtcacactcaatcctctccatgtcttagcacttagctattatcatggccatgttgcagatgaggaaatcgagaccgtggcaggtgaggaatcttgcccagtattgcacagctagtccctggcagagaaggacttaaactcaggctggtccgactcgagggctgcgctctctcctgctgcccccgccggaatgatttgctgggttttgttctggagagattcgatatttcacgtgggccacttcagagtctgacgataattagagcacacgccatttctccgcgtgggcacccccgggtgggatcctggaggaaccttgtgccctcctccccttcttcctcctcttcccttccctctactttgtcaatcctaaggcaaaccgggcagggcctggcagagggtgactcttgaccagggccactttctgcaaatacaagggtcctgagtctgggctggagatgtgattgttcagcagagagaaaaaaggtttgagcaaacccaaacaattgggccgggcgcagtggctcatgcctgtaatcccagcatgttgggaggccaaggtggatcacttgaggccaggagttcgagaccagcctggccaacatggtgaaactctcgtctctactaaaaaatacaacaattagcccagtgtggtggcatgcgcctgtagccccagctactccggaggttaaggcaggagaatcgcttgaacccaggaggcggaggttgcagtgagctgagatctcaccactgcactccagcctgggcgacagagcaagactgtctcaaaaaataaaaataaaaataaatccaagcaaccccagtacctactgttactgtttttgttttgagacggagtcttgctctgtcacccaggctggagggcagtggcccgatctcggctcactgcaagctccacctcccgggttcccgccattctcctgcctcagcctcccaagtagctgggactacaggcgtattattgcttatgaatcacatttatgtgcctaagagctgtcatctcacaaaattctatgaagtatctgtatcatccccactttatagatgaggaaaccgaggctaggagggctgaagccatttgctaagggcccttcccacccacatgtgaatatgaacctttcgtctccacttcaccaacactgggagttttcattgtctaagctctgctaatttcctaggcaaatgacgttattgtatttaaatttgcatttctctgaataggaatgagcttgaacacattcccatttgcttgttaaccagttgggttttttcttcttttgttcgtgtgctttgcctattttagagaatacatttttatgtttgcaaactgatattttaggaacctgaaacagtactgcacatgctccatttttccccagccctccatcattttccctctaaaacctcccccccctccccacccccagcagcttcaatatacctggagatgtgccagccctggtctgagtccttttgtgccaagcctgtaaaaccatcgctggggcactgctgctccgtgcacttcactcctgcatgccagctgctctggcttctggagagaagccaccatcgcgaccacaaccaccactgcaacaacagctgcggtcacgacaaggtcatcttctccagtcacagccagatcctcagagctgccaggaatccctggagtactcgcctttctccttcatccgcaggccttcatcctcatctccatcgaacctgctctcctgccacttccagaggaagcagaggccatgtgataggcactgcctcgaccctctgcacctgcccttccctctccctcccagtcccttcagaggctgtcctttgtcttgccctaaacctacctctcctccttccagaatccccatgcccacaccccagtccccatcccctccctctgaagcaaatggcttcagccctcctagcctcggtttcctcatctataaagtgggggtgatacagatacttcatagaattttgggagatgacagctcttaggcacatcaacgagattcataaacaataataacagtaggtactggggtcgtctggattttttttttttttttttactgagacagtctcgccccgttgcccaggctggagtgcagtggcaagatctcagctcactgtaacctctgcctcctgggttcaagtgattctcctgcctcagccttctaagtagttggggctacaggcacctgccaccacactggagatgggactgaaatgtctccaagtggctgtcatctctagcagccacccctgaaccccacctttcactccaccctcaccctaacacccacccttgttttttcttccctttgtgggcaaacctcaagtcatccccactcattgcctctgggttctcactgcctctcattcccaatccctcacgggctgagggctgccctcaagaaacctctgaagggactctggccggggtcccagtggcctctttgttactaaatccaggtccaattttagccctaatctgtcttgacctttgacagcatgcaatggtgttgcaatctcccttccttttaatttttttcctctttttttttgaaatggagtcttgctttgtcatcaagggtggagtgcagtgtcaccatctcggctcactgcaatctctgcgtcctgggttcaagcgattctcctgcctcagcctcctgagtagctggaattataggtgcctgccaccacgaccagctaatttttttttttttttttgagacagagtctcgctctgtcacccaggctggagtgcagtggcgtgatctcagcaagttctgcttcctgggttcacgccattctcttgcctcagcctcccaagtagctgggactacaggcccccgccaccacgcccggctaattttttgtatttttagtagagacggggtttcaccgtgttagccaggatggtctcgatctcctgacctcacgatccacccgcctcagcctcccaaagtgttgggattacaggcgtgagccactgcacccggcatttttgtatttctagtagagacagggtttcaccatgttggccaggctggtctcgaactcctgacctcaggtgatccacccacctcggcctcccaaagtgctgggattacaggcatgagctactgtgcccggcctattcttcccctctttttggaaacactgttttctccttggtgtttttgtctttgttttgagacagggtctccctcccttgcccaggctggagtgcagtagtgccatcatagctcactgtaaccttgaactcctgggctccagccatcctcccgtctcagcctcccgaatagctggggttacaggcatgcagccacatgcctacctccccttgccttctaaagctcagatttccctcctatcttttcagctttcatccctggccctccatcttggcctcttaattcttagcgaggctcagagctttagcctttgccctcttttcttattgctggggaaccttatccctacctcaagatttcaggtgccacctgatgttgaggactcccagatctctattttgggctcccagctgtctctcatggaccagatctgcttaagcaactgcatggatgacatgtattttcccctgcccttccctggcacgtctaactccacgttgtctcagtggagcttagcgccaccctccccacctaatttctccaacaggttgatgatgccacctcctccccagtcaccctggagagaaaccaggccatcatgctcacctcaccctctccctccctcccacagcaaacaagtcaccaggcttcagtgatctcatctccttaacttctctccagcctctctcttccctcagccatggcctctgttcaagccacagcacctggctccaggacaattgcagcagccttctgcctggtccccctgcctctagcctccatgcagaggatagagagagctttctaaaacctaaacttggccaggctactgctctgctcacaacccttccatggctccccagtgctgtcaggacaaagtgtaaactctttccataagcctcctcgatctggcctctgcctgcttccaccacctcctctcagctgcagccaccgtgaactctgtcctcatacccatcattctcttctactgcctcgtgctttcaatcttcccagtccttcttcctggaactccctccccggcttgtgcttcagtccccagctcagatgccactttgttcagcaggcttcccagatcatccccaggctgactcaggttcctgtgtacaaggtaggaaacctaccagtgtatccctcatgatagcactttcctctctgactcggtgttctgtgtcttcatggctgtcttctcttaacccacatgctttttgaggaccaggattacatcctttcatttttgtgtctccagagctttgcccgggccatggcacatagcagaagcatgatcaatgtttttctttcttcttttctttttttctgagacacagtcctgcactgtcacccaggctggagtgcagtgtcgtgatctcggctcactgcaacctctgcctcctgagttcacgcgattctcacgcctcagccgcccaagtagctgggatgacaggcgtgcatcgccacgcctggttaatttttttttttgtattttttattttagtagagatggggtttcactctgttggctaggctggcctcgaactcctggcctcaatgatttgcctgcctcagcttcccaaagtactgggattacaggcgtgagccaccatgccctgcctaggccaccgtgcctacgctgggagcatgatgaatgttaatgggatgaatggaggagttgtccttgttccactgggccttgtcctaggctcaagcaagagggtcaggctgtggcgagacagggaggaaggaagagagtatcattagtttctaagaacaggggtccctaacccctggtctgggtcgatggcctgttaggaactcggctgcacggcaggaggtgagcggcgggcgggtgagcgagtgaagcttcatcgatatttacagcatatttacagccgctgcccattgctcactcacattgccacctgagctccactttctctcagatcagcggcggcattggattctcataggagctcaaaccctattgtgacttcgcatgcgaaggatctaggttttgcattccttatgagaatatgatgatctgtctgcctgatgatctgtcactgtctcccatcacccccagatgggaccatctagttgcaggaaaaccagctcagggctcccactgattctacattgtgatgagttgtataattatttcattatgtattacaatgtaataataatagaagtaaaatgcacaatcaatgtaatggacttggatcattcccaaaccatcccccggctccgtggaaaaactgtcttccacaaaaccagtccctggtgccaaaaaggttggggacctcggtcctacaatgtcctttggctccctgacagtggggactgtgtttatatcactgattgccctcatgccctgtgtaacgctatggcagggcagccaaacacggattgattctctggagatccctgcaattccgtttcattaccattgcatcctgggggcacagtgattcagcctactcatgaatgtgtgatttgcagtagaatttcaggagcccctgggacataaaagaggattatcagggctgggtgtggtggctcacacctgtaataccaggactttgggaggccaaggcaggaggattgcttgagcccaggagttcaagaccagctggggcaacatagcaagccccatctctacaaaaaaaatttttttaaattaaccaggtgtggtggtgctctcctgtggttccagctacttgggaggctgaggtgggaggattgcttgggcccaggaaatggagggtgcagtgagccacgtttgagccactgcactccagcctgggtgacaaagcaagactctgtctcaaaaaaaaaaaaaaaaaaggtaggggctgggcacagtggctcacccctgtaatcccagcactttgagaggctgaggtaagcagatagcttgaggtcaggagttcaagaccagcctggccaacatgatgaaaccccatctctactaaaaatacaaaaattagctgggcttggtggtgggcgcctgtaattccagctactcggggaggcagaggcaggagaatcgctcgaacccgggaagtggaggttgcagagagccgagatcatgccactgtactccggcctcggcgatggagcaagactctatctcaaaacaataaaaaataaataaaaagtattttggggtgatacacacattcagaccatagaacatgcgatgatatggaaaaatatatttgcctttatattccagtgctttttcacaataaactattatctgtatatctgagacaagtttgtattaaattgtgagccccaaggacaagaatagagatgtctttagtgtccccaccatactaagagtaaggccggccaggcatggtggctcatgccagtaatcccaacactttgaaggccgaggtgggcggatcatgaggtcaagagattgagaccatcctggccaacatggtgaaaccccgtctctactaaaaatacaaaaattagccgggtgtggtggcacgcgcctgtagtcccagctgctcaggaggctgaggcaggggaatctcttgaacccaggaggcagaggttgcaatgagctgagatcgcgccactgcactccagcctggcaacaaagcgagactttgagtcaaaaagaagaaaagaaaagaaaaagagtaaggtcatgcacatagcaggtatttcataattaatggctgacaaaacataaatgaggacgagaagcacaagagaagggacaaagggattaagagcttgcacactctgaccctcaagaactccacattagattcccccatcgtgagaggcttggcacacaccctgcatctttgcctgaaatacccctgctcagcctctccaaatcctcatgtccttcgccatccttcaccatccctcaccatccctaaccatcccccaccatccctctccatccctctccatcccccaccatccctcaccatccctcaccatccctcaccatccctctccatcccccaccatccctcaccatccctcaccatccctcaccatccctctccatcccccaccatcccccaccatcccccaccatccctctccatccctctccatcccccaccatcccccaccatccctctccatccctcattatccctatccattcctctccatccctctccacccttctccatccttcaccatccttcaggactcaggtttaagccagcttccttgtgaagctccctggttccctgttcctgagaaccagcttctcctcagcccgcagtctgtcctgtgaacccctgagctgggctgaggtccccccagagtagggaaatcctgcccttcctgaccaggcctggcttttgcccttgggatgggaacacacttggctgctgcctcacagctcagggtcacctcctgaggagcccacttccctcctgtggagggcacaagccctgatgtcccactcagcaagtcagaagccatgtaattagcatcatcatgcacagctgccgtgtgggctccgcaccctcccatcacctctcccaaggcagcagaaggatttttccacattgcttcctggccccaaccttccagggcacccactgcttgtgggacaaggtctgcatccttggcctggaactcaaaactctttctttttttttcttttatatatattttttgagacggagtctcgctctgttgcccaggctggagtgcagtggcatgatgtcagctcactgtaacctccgcctcccgggttcaggcgattctcgtgcctcagcgtcccaagtagagtagctgggactacaggcacccgccaccacgcccagctaattttttgtagctttagtagatacaggagtttcaccatgttgcccagctggtcacaaactactgacctcaagtgatctgcctgcctagcctcccaaagtgttgggattacaggcgtgagccaccgcaccagccctttttttcttattttgagacagggtctcactaagttgcccaggctggagtgcagtggcacaatcatagcttactacaacctcccttcccttgggaggctggggctcaagcaatcctcctgccccagccttctgaagtagctgggactacaggcatgcaccaccatgcctggctaatttttaaaatttttgtagagatgagagtctcgctatgttgcccaggctggttttgaactcctgggctcaagcgagccagccgttttgtgctcccaaagtgctgggattagggggagactctttctagatggcctctggggactgttctcctgctcacacaccaggtttcagcagtgctcaaccccttgccggtccccaaacaatccacacaatctcatggtattgacttttgctcacacagttctttccacctagaatgttctctttcctaatccagccggcaaactcctacttaacctttgacatccaatttaagatcagtggtgggtaaatttttttttctgtaaagggccagagagaaatattccaggctttgtgggccatgaggtatctgtcatgattactcaattctcccactgcagaaagcagaaacgtgtgtaaacaaatggcgtggctgtgttccaataacacttgtttacagaaacaggtggcaggcaggatagtttgcccactgctgctcaagaataatctcacaaagcttcccacaggaaggagtttgacaatgccttctagcaatggcttacgtattttatcgtaacacaaacttggactgtaacgtacctatagctgtgatgattaaatgggctggtggtcagaccatcatctctcacctggatttctttttctttctttctttctttctttctttttttttgagatggagtctcactctgtcacccaggctggagtacagtggcactacctcggctcactgcagtctctgcttcccgggttcaggcaattctctgcctcagcctcccgagtagctgggattacacgtgcccgccaccatgcctggctaatttttgtatttttagtagagacgggggtttcaccatcttggccaggctggtcttgaactcctgacctcgtgatctgcctgcttcagcctcccaaagtgttgggattataggcatgagccaccatgcccgaccatggatttctacaatagcctcctcactggtctcccagcctctgccttcccttacactctattctcactgaacagacataagctgttaaagtgtaaattcattctggtcactcctctgcttaaaaacctctcatggttccctattgccctgatattgaaagccaaagtcttaaaatggtttccagtgtcctacaagttctactcccaatatccttttaacctcaacgttattgcctactacacccccactggctctctactccaaaacaaagctataatagcctctttgcttttcctcttaaaacaagccaggcgggcttctgcctcagggcctttgttcttgctccatctggaacactcttttcctggttgtgcacatagctcactccttcgcctccatcaggtctttatttaattatctcccttctaacgcttttcctggcccatctagttaaaactgtgaccctccccggtctctccttcctgtgtttactccccagcattcctcaccctctaactcactatatattcccccaactttttgttttgttttgttttgttttgttttgaggcagagtctccttctgttgcccaagctggcgtgcagtggcaagatcttggctcattgcaacctctgccttccgggttcaagcgattctcctgcctcagcctcccgagtagctgggattacaggtgccagctgtcacgcccagctaatttttgtatttttagtagagacggggtttcaccatgttggccaggctggtcttgaactcctgacctcaagtgatctgcccgcctcggcctcccaaagtgctgggattacaggcatgagccactgtgcccagcttcctccaactttttaattataaaaatgttcaggccaagaacagtggttcatgcctataatcccagcactttgggaggctgaggcaggcagattgcttgaggccaggagttcgagaccagcctaggcaacatggcgaaaagcagactctaccgaaaaaaaaaaaaagcatagtggcctgaacctgtagtcccagctactcaggacactgagatgggaggatcgcttgagcccaggaggcagagattgcagtcagccaagatcaccccactgcactccagcctgggtgagagagccagaccctgtctccaaaaaaaaaaaaaaaagaaagaaagaaagaaaaagttcaaacacacagataattggaggactagtgcaaaggtattcaaatagacatgcccagatcccacagttaaggtgctttgaatgtaagatgctaacatgatgacaccctcactcaaagacattagcaaaacacactctctgtttccttctctatctagtttattctccgtctttccccaccaggatgtgagcagcacaaaggcagggatttttgtccattttgttcagtgcctgggattacacgtgcaccaagaacactgcctggcacataatgagtgctcctagagtttggagagagaaaagacaagacaggtgctgattctggttctgcctctcgttgacactggcaactggcactgcctctcattggcaactctggggataattttcccttgtggaacctcattctcttcatctacaaagtggggatggcagtactatatcacagggctgttgcaaggataaaaaagtaagaagtcggctgggggtggtggctcacacctgtaatcccagcactttgggagactgaggcgggtggatcccctgaggtcaggagtttgagaccagcctggccaacttggtgaaacctcgtttctattagaaatacaaaaattagccaggcgtggtagtgcacgcctgtaattccagctactcgggaggctgaggcaggagaatcagttagaacctgggaggtggaggttgccgtgagccaagatcgcgccactgcgctccagcctgggtgacagagggagactctgtctccaaaaaaaagtaaaaggtgtgatattgcactgttagcatgttagttagatttccatctagctccttgaaggaaaagattagtctagtctgaccctctgtgctctgggctcttagagggcagacgccctccctgatgtatgggaggagcctagcacaacacctcaggagaagttcttttgactttaactgctagcagctccatctgctagcactacagaacacactccctcgtgcttacttgccccatccctttacttgctcattcaatgctacctaataatcccctctattccatcttttgatttatctactcattaaatggtttccaccagaaatacctagggaagggatacttaacttcatcaggtactgagattctattttgtgaatgtcttctgtggatctttgactgtttccagcaattgatccagcctctcttggccttttctgcattttattatttatttatttattgagatggggtcttgctctgtcgcctaggctggagggcactggtgtgatctcagctcactgcaacctccacctcctgggttcaagagatttttctgcctcagcctccccagtagctgggattacagttgcctgccaccacgcctgactaatttttttgtatttttttgtagagacggggtttcaccatgttggtcagaatggtctcgaactcctgacctcaggtaatccacccgcctcagcctcctaaagtgttgggattataggcatgagccaccacacctggcccttgtctgcattttagattcacctgtgtatctgcatttccaaatgtgctttgcaaaatcctgaatgcaagggtgggtgtttgttgaagaatgggacacctcatgttgcccctgtgggttttctcaggaaggaaagattgcttggcagtgcgtggaatgcatggccttttgcaagctccttgataaccatcgctctaactttgcttgtttggggtgtggaggcaagatattttcattgagaattctgagtctttatccttttctctccacttcaagctgaaacttttttttttttttttttgagacatggtctcgctctgtcacccaggctggagtgcaggcgatcttggctcactgcatccttgaccccccggcctcccctgcacagtagctgggaccaaaggcatgcaagaccacacctggataatttttgtattttttttaaagacgaggtttctccatgttgcacaagctggtcttgaactcctgagctcaagtgatctgcccacctcggcctcccaaagtgttgggattacaggcgtgagccactgtgcgcagtcaagctgaaactcttaagcaaattttaaatcttactttaaggaacaatttcctcacctgtaaaatggggacacgaggatatgatggaagtgaagtcactttgtaactggtaaagctctgtacagatattagttaagatggttaatttcattaacctgtgaagattcttaactaaaccttgcgcaagttgcattggctgccctgtctaggcactaatatctttagacggactaaggaggaaacacactttttttttttttgagacagagtctggctctgtcacccaggctggagtacagtggcatgatcttggctcactgcaacctctgcctcctgggttcaagcaattctcctgcctcagcctcctgagcagctgggactacagactatggccagcacacccagctaattatttgtatttttagtagagatggggtttcaccatgttggtcaggctggtctcaaactcctgacctcaagtgatccacccgcctcagcctcccaaactgctgggattataggcgtgagccaccgcacccggcctacacgcttcttttcacaagaatgacacccgcaactatacttcccacgtaaatggagagcagtctggcagattcatctagacctagggttgggtgattattagggaaagaaaaggtccaaccaagccagtgggctgaagagaggacatgacctgctcagtccgaagcagatgtgtgactaaagtctagtctcctggcttctctgcaaaatacctcattatcggcattattaaccctaacaactgccatttattgaaatcccactatgtgcacgaatggggaccaatttacttctagatattacaacaatcttgtattactgtgcccacttcctggatgatgggtctgaggttcacagagatcatttgcccaagttcctactgaaagtgctaaggtatttcctgagactggctcagggtgtgttgccagacaacaatgcacacatttttaacacaatactaaacttagtatattatacttatgttaaaaatttcggagccgggcgtggtggctcacgcctgtaatcccagcacttcgggaggctgaggcgggcagatcacttgaggtcaggagttcgagaccagcctggccaacatggtgaaaccccgtctctactaaaaatacaaaaaattagctgggcgtagtggcgggcgcctgcaatctcagctacgcgggaggctgacgcaggagaatcgcttgaatccgggaggcggaggttgcagtgagcgagatcgtgccactgcactccagcatggtcgacagagcgagacttgtctcaaaaaaaaaaaaaaaaaggacatgtggtaattcccctagggaatttggccttagttgtgaaaaataaaaaagctataatcaatttctgttctatcggaaaaaaatgtattggctgtttagctgaaattcaaatgtaacttaacatcccgtattttttatatgctacatctggcaaccctggcttgaggctacctggcaaaaatcaaaacaggttcctccttgttatgccctatgcctctgttgcctttatttttatctttacgagcaatcattaacagtaacttcagactccaggctctggtcgctttaggaggcggaaggcggactagggtaggactcctggccctcatcaacaggactgccaagaagccgggcaccttctgccccgcacaaacatggccgcgcctcgccgccgaggattggctcccgccgaaagctcgtcctcctggctaagggagccccttccattgggcagttaaaaaaaatggcggaccccgcctcccgccgtcctcgggcgcgggggcggagcctagaggaggcctgggacagggccaccagtgattggcggagagcggtggtcaggccatcacgtggcccgaggcccgtttgtttgcggaagtaggaggaagtagaagtgctgagtaagccgaggtgagtgacctcgcgggtgggcggggcctgggggtccgttccccaacttcctcggcgctccggactcccaagtctccgccggaccctcctttggatattcctcgtgtctccgattctgaggcatgtcctccattaacccttatgtgactccctgagtgcccccaccttccatcttttcatccccctgcgtccccaattcccatcccgagaccgcccgtgtctcatctcgaacttgtggaccccagggaccccagcttcgaccctgagtttctcccctgaaccccagtctcctccgtgtgtctccctcagtatccctaacttcccgagtcaatccatctcttctctttccccgaccctcagtgcctctttaggccccattggccgtcctaattttccttcctgtgctcctctaagtgctcacttgattccccacttcacgtccgtctccacctttcgtggtgcctctactcatttctcactccctgcttctcctgcctttcctccctgctttttttccttgcctttcctctctcgcgtgcctccagacctgcccccgacatgctccctccttcccctcagcctggccaccccagagtctcccacccctaatcctgtgtccacctcctgctcccacagatgacttggaagctggtgacagggagcatgtgaccagggtgatcatgggactgggtcggggcaagcctgtgggtgtgggacagggagggcacagggcaaggggacctgtggccgtatttttaatgggctacccacatgaccccaacgaatacctccccctagcttctgggtctttccctcacctgcctcttacccgcccaacaggatgtcaggcaggttcggtttggcaacgttgaggctgcacccttgggctgaatgcattgtttttgaatgcattgtttttgttagagtttctgcctggagtttggaacctgttttctgtccaagtctcagtttcctcatctgtgacaggggaactgtacctcctgccctcgtaagtctgccatgaggttcaaaatttgaatgagaaaatgtagaaggtaaagctttataaccagtatggccctgtacaaatacatgattttactgttgggtcataggcagaattgaaaggagtggaaagggaaagggctagaatgagaagacaaggagagaaggatgagcaggaggtcccttgtctttcagtgtatcatttggcagtgtttgttcatcacctcttgtgagtcaggctcttctgtatatgttctcttcaccattcattcagtcatcgtttatctaacaaatatttacggactgtctgatgttctaggctacccttggtgtggccaatgatattctcacttcacatgagaaaaagagggcgcatgagttgcttgaggtcacaccgatgaggttgaagctggaatctgacaccagagcctgtgtgattgtcctgatgtgtaaggtttgctactgtttaggacacttcttgttccttccgtggattactttcttgttacatgagagactccccaaaagggagtttccctcttactcagcagaatgacatcactaagagatacagaaaggagaaatttaaatactctgtgtgtgtgtgtgtgtgtgtgtgtgtgtgtgtgtgtgtgtgtctgcagacatctattgggtgtgtgtgctgggggaagtaggtaggcaaggagtaaggggccgtagtgaagagtgtgttacaaacttcactttgtagagggtggctccctgggagaatatgttctgtgtctttcacagtggattttgatagggtcatgtcttaaatgcctcttctcgttttcggatggtgatctcatccagtcttatttctttaagtgccgtctctattctgtcagcccacaaatttatatccccagtccagtccagacctttccctggaatgacatactcaaatctagttgcttactcagcacctcaaacttaggcttttcaaacttgaagtatttatttattgatttatttattttttgagacagagtctcactctgtcacccaggctggaatgcaatggcacgatctcggctcactgcaacctccacctcctgattctcctgcctcagcctcccaagtagctgggattacaagcatgcgccatcatgcccaactaatttttgtatttttgtagaggcggggtttcaccgtgttggccaggctggtctcgaactcctgatctcaagtgatccacctgccttggcctcccaaagtggtgggattacaggtgtgagccaccgcgccaggcctcaaacttaagagtttagaattgagctcctgttagttctgccctccatccctgaccccactcttcaccaaaacatgtccctcccactctctttctcatcttaggacataggagtattgttcattcagttgctcaggtcaaagctgtgagattatctatgatgcctctctgtttcttaccccacacccagccagagtgatcttgttaaaatgttgtttctttgcagtggcctctcctctcatggcacatgcctggccccctgttgcctctctgatgtcactggcttccttgcttttcctggaactcgctaaacatgttccagccccatggcctttgcacacgctctctttgcctagctattcatatgactttcatctctctccatcaggtatttatttaagatcaatttcttggtgaagacttctctcctcacccaatctaaaatttcactctccacctcagcacttcctatccccattctctggtttttctcctcagtagttaattgtcatctaaaacctttgtaaatatttacctgtttatcttctttattattagtagctctgtctaaaatataagttccaggatgtcagggattttgtggggttttttttggttggttggttgttttggttttgagacagggtctcactctgttgcccaggctggagcgcagtggtgcgatctcagctcactgcagcctccgcctcctgggtttgagtgattctcccacctcagtctcccaggaagctggaattacaggtgcacgccaccacacccagctaatttttgtattttttggtagagatggggtttcactatgttggccaggccggtcttgaactcttgacctcaagtgatccacccgcctcggcctcccaaagttctgggattactggtgtgagccaccgcgcccggccttgttttgttttaagacagggtctcactgtcgctcaggctggattgcagtggcacaatcacagctcactgcagcctcgacctgctagacttaagcaatccccccacctcagccaccttagtagctgggacttacaggcatgagagataccatgcctgggtaattgttaagtttttgtagaggtgaggtctcactatattacccaggctggtctcaaagtcctgagcttaagtgatcctccttccttggcctcctaaagtgctgggattacaggagtgaactgccgtgcctgaccagtctgttttgtttacgattgtatcctcagcggttagaacaatgcctgccacaatccatctcagtaaatatttgtggagtgagtcataacatgggccacactgtaccgtgccaccagcccaaagatctcttaaagtcacccctgtctcatgtgcttgggagctccagtgacagtttcggggcagtttgcttccagctgtggtccagccaagcggagtgaatgaaagagatgctttttccttttgtgaaaggacgttttgctctggctcacgtgagcagcagtgcattttgagacgagggccttggcttttggaatctaagagcctgttgagcaagcctcgctcagccaccttctttcagctttctcctgaaggcagtttgaggattaagagcctgatgctctggattccacctaattgggttcagatcctggcaaactgtgtaacctgtgccccagtttcctgtgtaatgtggagagacctggaccttttcttacaggtgtttggagggttaaatgtggcaattcggccgggcgcagtggctcatgcctgtaaccccagcactttgggaggtggaggtgggcggatcaccggaggtcaggagttcaagaccagcctggttaacatggtgaaaccccgtttctactaaaaatacaaaaaattagccgagtgtggtggtgcgcgcctgtaatcccagctagtctggagactgaggcaggagaatcgcttgaacccgggaggcagaggttgcagtgagccaagatcacgccattgcactccagcttgggcaacaagagtgaaactctgtctcaaaaaaaaaaaaaaaaaaaaagtggcaatttacccgaaactgtggtgaagcgtctggcgccctgtgggtgctgggcagcagtgggtgctgatggggtgtgaggggatgggatcaagccctttcccactaacttaggaaagaggttggaatgagctggggtcagagggaacatttgcggggacattttgccgggaggctgccttggaggttcagaggctcagatgacccctgtgttcattcagtgttttctcacccacagattgagcacctgctgtgtggccagccctttgcctagtgctgttcaagagtcagaggacataggcaggcaatcccccaccacaacctgccaccccatttcctctcttggggccttgatttctccacatgccaaacagggagaatgattgcaccttccttgtttctttttttttttttttgagacagtctcactttgtcatccaagctttagtgcagtggcatgatctcggctcactgcagcctctgcctctcgggttcaaagattctcctgcttcagcctcccaagtagctgtgattataggcacccaccatcacgccaggctaattttttttgtagttttagtagagatggggtttttttctcacacgttggccaggctggtcttgaacttctgacctcaggtgatctgcccatctcaccctcccaaagtgctgggattacaggtgtgagccaccgcgcccggctgcgccttccctgtttctttgtgagcttggaggtggatcacaagtgtgaaaccctttgccaaccgtgaggcatggtggccttgtgagaggacggaggccggtgtgtggtggcatgctcccgtgctgtgtggcacagacggagctacaggaaggaagttggggcagcttggcactctgagtggaccctgagtttccagcctgctctgtcttgactgggtgggaggagggtgctcaggagggtgtcactgctgccaggttctgctgccaggaccatccaacagttgttccaatcatgggacatcctgtcgtcagcagctggggctcgtgaggcctgatttccacctcgggcagttctgtgtgtgctcctggaatcccccacgtggccaagcctgtgaggtctgcttcctggcctgctgcctgtgggttcctgtcacgcacctctcgggcagctgtccggctcctctgctctcggcttagtcaagaaggaagcagaaggcttggagtctttcctgcttggactaggagtgagctcagcctaagtgccctgactatatataaagctgaactttccagaccgaagcctggggatggatcagtccgatcacttagggccgctcctgaaggagtgcaggtgctagatacaggttctcccggtggaggagcgaaccccttgtgggccgttagctactggtgggatttgagcatggtatttccctatccgttgtggagaggagcatggcagctcagagtgggtgggaacagtgtgtggtccctgttatcaccttcaagggaataaagtgtgtctgggggcttcagaggtgctggccccatgggcttataggtggttcattcattcattctcattcattcattcaccaaacttattaaacacccactgtgagtcaggaacatcatgccaggtgcttagggaaacaaatcaaagcgggttgggtgagcagcccaagccaacagatgcacccccattctcacatggtgtgtgttcctgtgggctgggccctgggtggtgtggggtgctggggagaagaggaaggcacaccaggctgcagggcggaggtgcgggtatgaattttcagaggagatggcacctgagctgtatcttcatggataagaagagatttgttcatttgtcctttgtggagcacacattcaggttaagaaagtggggaggatgggctacgctgatggagcgtatgtgtggtatccccaagtgcactgagacacgagtttgacgtgttctgggaagatcgatggtgcggcgtggctggagtagaggtgagggatgagttggaggggtgagttgggccagctctcatggatgctggagtctgggctttccctgggaggtcatggggcgccactggccagggtcagcagggagacctgcagctggatttgcatcgtacagtgggcatggaggggtgtcaggctgggttgggaaccgtgcaggctggaagggcactctggtgctctgagcattcagagggggcagctgggccttgaaggatgagcaggggctccagcaggaactggagagcgcattccagggaggacgcaagtgcaggcccctttcactacagaaaagcagttttcacacagaccttccaaaggggaggagaggggactgcctgggcctggcagctgcggcaggtagcagcaatcagagggcagggaccgctcctcccgtgcctgagacctgcccagggtccttcagggaattcgtagctgaggaggaaccagatttttgggactgagttctccctcaccacccgctctgagccaccctcttggtcccttgtcctctactgcacttcttccggggcttggctcctcgtcatgagaggagcttccctgggcatggcgaggggcgtgactgacatagcagccctggacaagtggctccaggtgacctgtgttcacgttgatcacagcactaaccacggcccctcctctcagcaccttcccctctcgagccgtccagtcccagtgaaaatgctcaccgttcatgggtgggctgagcaagcccctgatctctgccttcctccgtgttctgatctgcttcatctgctgtgaaggcctctcgccatttcccccgctggcaaactcctgttcttcctggaaagttcagctaaaaagtcatcccctttaggggtccttccctcaggggaccgtgcacttggcgagacagggactggtcttgggtctctctgttgactgttttatgaacccaggtagtcacttccagggaactcatcagagatgctaccattggctccaatctccctctgttcccactcgaggttttttgtttcttcgtttgtttttctttctttctttttttttgagacagagtctcgctctcgcccaggctggagtgcagtgacatgatctcggctcactgcaagctccgcctcccgggttcacgccattctcctgcctcagcctcccgaatagctgggactacaggcacccgccaccacgcccagctaattttttttgtatttttagtagagacggggtttcaccatgttagccaggatggtctcaatctcctgatttcgtgatccgcccgccttaacctcccaaagtgctgggattacaggcgtgagccactgcgcccagcccgtttgtttttgttttttggtggacatcaactttaatttgccctttgttttgttttgtttttgaggcagggtcttgctctgtctcccaggctggagtgcagtagtgcaatcttggctcactgcagtctcgacctcaagaggatcaagcaatcctcttgccttagcctcccgagtagctgggaccacaggcgcacaccaccatgcccagctaattttattttatattttgtagagacagggttttgccatgttccccaggctggtctcaaattcctgggctcaagcaatccgtctgcctcagcctcccaaaatgctggaattacaggcacgagccactgtgcccggccttaatttgccctttgaacatgtacaattcagggcctctctgggcctcagtttcttgatctctgagatgggaagatgggataataatacttgttcctcccgtccttcagctcctccaggggaccctcacaccagcacactctctgtcagtcttccctcaatgaacccagcaggcaagcttggttttgacagaggatgggtgagcagagataaggaaaacggccagaaatatctggcttccctcagcaggggcaccaaaattggtacctggaaattgcctggcttggacaggcagaattgtcactgtcaacccccaccaccaaaggtcttgggtctttgtctttctgcttgtggtgtttgagagagctgcttgacacagccgaggtgcggtctgtgtcaggtgacctgggcatcctgggggtgcagggagaagcccaggtaaggaggaggaggggccggtcatcagtggggaaaagtgattgtctaccccacgggaaggtcaagggtaggacgctgtgagaagccagggggagagatgaagtgaggcatgatgcggggggccctcatccaccatccccctcttgcagctgtgctgggaagagcctaggctccagggtccaaggtggcagggacagaaggaagcacgtgtgagcactttctccctgctggcccgccttcctggttggcaatgccgtgagtgttccaggatgtggccccgtggctgtcatttcctttcttccacctagtgataacaatggccactgtttgtgtgcccacagtcggcctgtgtcccagacaccttccctccattgcgtcatctcgtcctcctgcctaccctgaaggctggatgccagccaagcctgtcgtttctgtggccatgctgtcgtgggtgtgtggggggcatcccctagccccaggctctggtggggggtacacaggctgggccattgacgaaggggtgtgtggaatctttctttgatttcactgcacccctggtgactttctccctcaatctgaggctcatgggtgctggatgctcttgactctctgcccttcctgggcgcacccctccgcgtccctgtgggcccgtcctcggggtagcctctctgcgctcttccaggccaggcctgagtcccacaggtccccatcttcccggctgcagcccccagaggctcagcctatactgctacttcctttgaaaactataatcgctttacatagcatctggaaaatagggaaaaggaaaaaacaaaagcccataaacccagcaccctcatctactcaatggcatgttttctgtcagtctatcttggtttgttttctatcaggctttgttttttctatgcataatatttactcagttaaatttttgttttgacaaactttctgtgagccaagcttgtggacggagatgaaaagacgagcagctgcctttgagaaactcagactctgggccagcccatctgggtgccagctttcactgctccacccactagctgggtgaccctgggcccgtgactttacccctctgttctttggtgttctcatatgtaaaatgaggataataatagtaaccagttcatagagtggttgtcagacagaatgattaatgtacgtaaagctttcaggatggtgccagcaagatgcacaggagtgtttggtaggaggatgacgaagcttaccgtctggcaggaggggcagttgtaacatgctgggctgtgatagtacagatgtgtttaaagtgagggagagcccagagcaaggagagagaacctggcatctggtgatggtgtatcaagaacattttaggccagacacggtgactcacacctgtaatcccagcactttgagaggctgaggcaggcagatcgcttgaacccgggcgttcgagaccagcctgagcaacgtggtaagaccctgtctttataatttttttttttttttttctgagacggagtcttcactctgtcacctaggctggagtgcggtggtgctatcttggctcactgcaacctccacctcccgggctcaagtgattctcctgcctcagtctcccaagtagctgggattataggtgcccaccaccatgcccagctaatttttttatatttttagtagagacggagtttcaccatgttggtcaggctggtctcaaattcctgacctcaagtgatctgccctcctcagcctcccagagtgctgggattacgggcatgagccaccatgcctggcctctataaaaattgtttggaagaaattacctaggcctggtgatacacacctgtagtcctagctactcaggaggctgaggtggaaggaggtagaggctgcagtgagccatgattgagccactgtactccagcctgggcaacagagccagaccctgtttcaaaacaacaacaacaaaaacatttttaaggaggaggctgagaaccacgagaaccaagcttggatttgaagaaggatcagggctttctcagacagaaaaggagaggaagaacattccagatagacatcattgagagatggcactgagccttgtaatgggacactgcgaacttttcttcagttgttatgatctttttttttttttttttgagacggagtttcgctcttgttgcccaggctggagtgcaatggcgccatctcagctcaccgcaacctccgcctcccaggttcaagcgattcttctgcctcagcctcccaagtagctgggattacaggcatgcgccaccatgcctggctaattttttgtatttttagtagagacggggtttctccatgttggtcaggctggtctcaaactcctgacctcaggtgatccgcccgagtcggcctcccaaagtgctgggattacaggcgtgaaccaccgtgccttgttggtataattattagtattgatcttttttccttttcatgtgcctcttagtgggccccttgcttttgtcttccttctgtccccagggttgatcctgtgctcagcacataggccagggaagaatgtggctgtgacccagtgtccactcagatgtcctctctcccccagggcacccatactctgtccttagtgtcttttgtctggtgacatcttggcacagaggcagagggcggcctccgtctgattggcgcctggctttggtgacagtaccttaggaaggcagtgtattttctgggaacctaggaaataacaaggtatctaattccatcatcaacactggggacaatttccatggcagaaactatgactctgaatatgcagcgtaaagttaccacccagacactgctgctcctgagtctcgaatggcatcttctgcaggggctcccccacctgcccctgcagaaggtgcagttcgttcatttccaaggagcttgcttttgtgtgctgtctctcggagctctttgggaaacctgtggtagcaggaaacaaaggatttagaccaatgccgatgatccccttgctccgatagagtgtgacatgatgctggtcaccttttggtatctaggaggggggacattgattttgtttgcggaagtgaaatgatccatgctggcctctttttttttttttttttttgagacagagtcaccctatcgcccaggctggagtgcagtggcgcgatctcagctcactgcaacctctgcctcccgggttcaagtgattctcctgcctcagcttcccgggcagctgggactacaggcgcctgccaccacatctggctaatttttgtatttttagtagaggcagggtttcgccatgttggccaggctggtctcgaatttctgacctcaaatgatccgcccgcctcagcctctcgaagtgctgggattacatgcctgagccactgtgtctggtccatactagcctctttgagtgctgaaaggttatctctgtaacttatttagtgagaaccctccatttgcccagggcattactgcctataatgtatgttcacatgtgctatctcctttggtcaataccacacactacaggtgaggaaactgagtctctgctgggacactgggtcaggaagcaggcagttaaggtcacctgtgcacagtggcagcacagggggacagccttctaggtagccagcctggcctgagggttctgtcacttttacctcccactcagtgttgtttctctttctttcccctccttttaagatccctccaggcccaggatctggggacaacgctggtggggagtgatctgggtgtctgtgcaggaaaccgctgcactgggtgagatgggcatgggagactgtgcctggctgaccagagacctcgttttcttccagacagagggggaagacggtggggcctccccacctgccccgcagaagatgcagttctttggccgcctggtcaataccttcagtggcgtcaccaacttgttctctaacccattccgggtgaaggaggtggctgtggccgactacacctcgagtgaccgagttcgggaggaagggcagctgattctgttccagaacactcccaaccgcacctgggactgcgtcctggtcaaccccaggaactcacagagtggattccggtgggtgatgctcagcgggaacatacttctctcctttcactcccccacgtctcggattggaggtcttattggccgagaagcagtttctttgagtctctgtctgaggggtctggagaggggtgggagagaggggagactgtactcttggaccagagggaagggcttccgagactccacacttctggcccatcagtgtcccagcacgaggctgaggatggaagcctgggttgtttctggcctggaggctcgacctatatggacaaagggaagaaggaaggacagggagactgagagtgtccacatcagataaggcccatggggagaacctttagccctggctctttatttttggttttggtttttgttttttgagacagtcttgctctgttgcccaggctggagtgcagtggcgcaatctcggctcactgcaacctctgcctcccaggttcaagcgattctcctgcctcagcctcctgagtagctgggattacaggcacccaccaccacgcccagctgatttttgtatttttagcagagacggggtttcatcatattggccaggctggtctcaaactcctgacctcaggtgatctgcccaccttggcctcccaaagtgctgggattgcaggcgtgagccactgcacctggcctagccctggctctttaagggcatggccgttctcataggggctgcccagggtttgcttaggaaggctggacagagctgttgcctcttggggcatgctgggactcccctgggcctgaagagaaggctcaaaagccaggacaggcctgagggaaccgggccaacggcagagctggttgggaaaaggggagaagcagccaaggttccaaatgcaggccccagcagtgcttggcagactggcatctagttgggctcagacagatatccctgtttccgctcacctatccatctggctgtcctgtcagccatccattcaacatgcaccaagcacctccagtgtctccagagtcctgggcttcgggccagtcctggctggcctgtgagatgacaaacatgtcctgtgtctttaaggaacgtacagtctggtgggggaggtccggtgcaaacaggcgtcatagcaccccttgaggagtgctgtgacagagggagagcctaggaaacagtgtggatcacaaggaggtgattgagagctactctgcgtctggaagagtgaggaggagcctgtgtggcagaacaaaatggataaggtcgttccagccgtgcagaagtgtggaggtgtgagcctgcaggcaggtggctctggttggatcccaggtgcatgcagggctttggtgagagtgaggctgaaggaagcagctggggactcattctgactaaagaggcatggcaggaggggtctctgaaagtgtcaggctgggggccaggggctgccaccaacagaagagcaaggcaggtatcagggccccatccaatcaggtgagaattcagagcctggctccacaaggaacctgaggcagaggcacccacagcaggtgcttgggctaaatgcagctcagtggccagtgcaggcaccagttttaatacagtggggccattccagattctgagtgcagatggggctgagcagaccgccttccagctggactcgatcaggactgaccctggacggggcaggcttgcacttgtagcttcagagctccactgcaggcacagctgaccagggcagcgggtccactccttggagagctggacagccccacttttgaggtacacggccctggggataccactaatctccacgtaccaataatcaccaagttctgtcagttgtaaaatcccttgacaggattccagatttgtctcagccagcttaagccccagtgtgggcagacctccatcccaggaggatttagtcctttgtcagcagcttcttagctacacgtaagctattctgtggtactttatagtttacaggattttttgttttcttttttttttttttttgagacagagtctcgctctgtcacccaggctggagtacagtgacgcgatctcggcttactgcaagctccgcctcccaggttcacgccattctcctgcctcagcctcccaagtagctgggactacaggcacccgccaccacgcctggctaatattttgtatttttagtagagatggggtttcaccatgttagccaggatggtctcaatctcctgacctcgtgatccgcctgcctcggcctcccaaagtgctgggattacaattttacaggatgtttttaagtatgttgggttagcacattctctgccaatccgtggaggtgggcaaggaaggcagtattccattttatgcatgagaaaatagccttgggatgataagtgattcatcccacttatacacaggaagcagtgaagaaacagaatcagtgtcttctggttcccaattcatttctctgtgctgctgtgttgtttccatgtatgtatgtatgtatttatttttttgagacgttaagtcttgctctgttgcccaggctggagtgcagtggcatgatcttggcttacagcaacctctgcctcctgggttcaagctattcttctgcctcagcctcccgagtagctgagactacaggtgcgtgccaccatacctggctaatttttgtgttttttagtagagacagggtttcactgtgttagccaggatggtcttgaactcctgacctcgtgatctgcctgccttggcctcccaaagtgctgggattacaggcatgagtcaccatgcccggctttgtttgtcttatttctaaattttattgatttatttattttcacagtcatagctctggagtcttttttatcttctcccctctaacctgctcccacccgaacctttccatttcagcagatagcatcattgcaacgggctgtgccagatccagccatcacatccacctttccagccaaagggagggtggaagggcaggatgcagaaggtcaatctccccctcctcagggacatttcatggaagttgcacgcattggccagaacccggtcacatggccacagctaactgcaaaggatgctgggaagtgttgcctgtgttgcagacagccacgtgccagtcgaaaatcagaggttctttctccctccgtcttgctgctggctcgcttctccagaccacagtcattgtgcacgtgtctcctgctgctccggctgtggcctgcactcctctcatcctcttccaagctgctgtcacagcgctgtttccagagggcaaatctgattggtcactcccctgctttactccccaagggcttcctgttttcttttatttttatttttattttcattttttgagatggagtctcgctctgtcgctcaggctggagtgcagtggcacaatgtcagctcactgcaagatctgcctcctgggttcatgccattctcctgcctcagcctcccaagtagctgggactacaggcgcccgccaccacgcccagttaattttttttgtatttttagtagagacggggtttcaccatctactcttagccaggatggtctcgatctcctgaccttgtgatctgcccgcctcagcctcccaaagtgctgggattacaggagtgagccaccgcgcccggccagcttcctgttttcttaacacatcaggtgcttaatgacttaaaagggcccagtgtgatcaagtttctgcctctgtgttctcagctcatgccgccttgtgctcctggcctttgcccaggctcttgctgtggcctggaatactcccctttctttgcctgccttccttcctcttgccctcccctgacctgcaggctggattaggagtttctgctgggcatcccatggcacccgtccctgcactggggatcctgctttcctggtaggccacagaccttgtgaggggagggactgtgtctgttgggttcatgacagtgtgcccagcccccagcaggtgcctggcgtagatcaggtttgtggaacaaatgaatgtgatatattaatttagctttagagtattcattgagggctgctgtgtgccaggccctctgtgccacctgggtggagggtggaggactgttgcattgagggcagttgaaggagtgagctgggaagtgggaggtggaggatggggactgggatgcagggtttgaggttatcaggggtcccagaagcagtaatgccaaggcctaggctgtgacctggagtgagggctgcgatggggtggggtggggtcgaggctgtggaggagggtcatcagggcactgctggagccctggggttctccagggccgggggtggtcattgcagtgttctcccagctcctctcaacaccctgcggtctgtggagagcaggcctggtgcactggacttgcctctggccagggctgagtttctgccttctaaacgatcttcctcctgtgttgccctagaggcctctggactgtcctgagtacttgacgcgtgttagagtgagcatgggctgctagccttccgctccaggtggaggagtttctgttgttcttttgctgctgttgctgcagtgagctgccaggctgagcttctggatggacctgggggatggaattaggagcttctgaattcttgggttgtataacctaaggccggagagtcccacagcactgctgctgggcggagagactggaccctgctgatacagacagcgacagcagcaggagcatctgcagtttcccagcaggtcctgcatgcctgggcttggcactagtctaagtagtaactcatgttatcctcacgacagtcccacgaggtggggtcattactgacctcctattacagatgaggaaacagaggcttgcagaatttgagatcacacagctggtcagcgtagcgattattcagaccctgtcacctggctccagaacccactcgtttacctttcttacatcagggctgctttgtagtgtggcgagctgagtggagctccacccgcctgggctgatcctggcccttcctgcctgacctatggtgcgggggccctggctctccccgtgtgagcccccaggggtcacttgtaatatgcctgtgtacactatgatagcatagatacttctgttcctggtacagattaatcatttacggctggcattgacttgtaacagatgacatttgatgaaatcaaccagcctctcactggtatctcagcagaaacagggctgtacctcccaggcatcctgggaaggatgatagaagtgtgtgatctgtgcttccctaccgggagctgacttttgaggctctctggactgggactttgccataaaactgcttatcagaaacctcagataagtggagtgccctgtgtcctggccacgtactctggggccagctcctccatccattcagtcctcccacatcccatcttcaccaagcagagtggaaagcggcaggtctctgcgagaaaaggaggctctgtacccagccttcagtgagataactttagagtggggccttgtattccctacacaggccttgtccccgacacggcctctttgcccttgcttctccttctgctaagaatgctccttcccaactccttggctggacacacggctcctgctctgtgggcctgtcctgttcccactcagagcctcagcaccccccatgtggccaagacacagcccctcttgccttaggttgccgtgggtctgtttccacatctgtttcccctccagactgcagggctcctgagggacagggcctggggccaagtctcctctgcgttcctgatgcctggtggtgtgccacgctctccgtgggtgcacggtaaatatctgccgagtggctagatgtatccatggttgctgaaggccaagtgtgttgaccagagggcgtgggaaaggctccactggggtggctggggtagagatagaccttaaggggtccagaagactccaccagctggagggaaaggccctacagagacaaggtactaggaaaggcccagaggacagaggaggggccctgtggggagcctgtgggcaggaagggcctgtgctgggctttgaaactggggactcaggtactgctctagcgtgagggtccttggcattttttttggtccaggaccccctgaggtccctggggaatgagaacaggctcacacagccactttcaagaggtttgcaggtcccctgaggcttagccacagacccctcccaccccagcagagacacagcagaggcttctgagtggaggccaggtggcttcagcctggggttctagaagggagggaagagacacacccccgtgtgtcctccagagcctcagccttctccctgaatctcccctttgcctcctcactgtaacccacacctggctctccttgaaggacccgcttgccccgcagcctcctgagagttttctctcccagtccctctcccactgggcctggaggtggggtagggtcctccttgcccccagccttgaatcttctgtcaccctacaataccacttgctgtcaccccggtgataggtatctacgagcctggggtgctcccccacatcctcaaagatgtgagcccctgactcagcgttgcctctggttcctgaccctccacattcacatgaccacgcgctggcctttatcatcgccagtgacagcagctctcccgtaaatacaagtttcaagcaccccactttccagtctctgccttctgtctttccagttcattccctctagtcctccacccacacagtgcttttccccattgacagggaattgctcctggccgcttttcccagccccatcccgttcatgtgccttgctttgtacccagcatggactccatggcctgtcattgtcactccttcacctatacttcctgcctccttgcttctctctctcttcgtcatcctggcatcaccaccccagaactgcttggtttcagttctccaccatggctaggggaacatacctttttgctgactgctctcactttctttttttttttttttcttttttttttttttgacacagagtctcgctctgttgcccaggctggagtgcagtggcacactctcagctcactgcaacctccacctccggggttcaagcagttctctctgcctcagcctcctgagtagctggtattataggcacccgccaccacacccggctaatttttgtattttttttagtacagacagggttttgccatggtggccaggctggtcttgaactcctgacctcaggtgatatgcctgccttggcctcccaaagtgctgggattacaggcatgaaccaccctgcccggccctattgctctcactttgaaatcacgacatgagccacagtgagcctatgatgtggtttgacgtctttctgcatttctctgttcacccctctcccagaaggcatgcctccttccctcccctcagcctgcagccccttcccctccacgcttactctcagctgatagccctgctgctgtctcgctgagaaaatagaaatagccagaggagaattccctctaccccatgcacacacctctgtccccgcctactccacattccctgttgtcagcaccgatgtgtttagctgagggtggtccccccattcaaggccatcatctcctgtcatctacttcttgacaccatttgaacaattatctcccctctttcctacataacactttccccttttctactatatattttttgctatggattgaaagtatccccccgaaatcatatgttgaagccccaatccctcgtgtgatggtattaggaggtagagcactatgggggtgattaggtcatgaggatggagccctcatgaatgggattagtgcccttagacgaagaggcaagaaagagatgatctgtctctgccatgtgagggcacaacgagaagatagccatctgcaaaccaggaagtgaaccctcatcaggaactctatcagccagcaccttgatcatagacttcctagcctctagaactgtgagaaataaaggttgtttaagcctcccagtctgtagttttctgttataatgtcctgacctaagttattttccatcgctatacaatgggttatttttttctttaaaaaaaaattatttcttgactctactttttcctccagagactgcttatattccactgtcttcattcttctcctcctgttttctctctttaaacttttcaaaaatagcaaaatataacacatatagagaaaatgatatacagctcagtgatttatcacaaacacctgtgtaaccaccactcgaatctagagataggacattacagcaccccagaagccctccttttgtcccctcttcccaaagaagggtaaccaataacttgccttttatgataaaggctttttttttttgagatggagtctcactgtgttgcccaggttggagtgcggtggcgcaatctctgcttactgcaagctctgcctcctgggttcacgccattctcctgcctcagcctcctgagtagctgggactacaggtgcccgccaccacgcccggctaattttttgtattttagtagagacgaggtttcaccgtgttagccaggatggtcttgatctcctgacctcgtgatccacctgcctcagcctcccaaagtgctgggattacaggcgtgagccaccgcccccggccaagataaaggcttttctatctggcttctttgttagcattttgttggcgagattgatacgttttgtgtgcagctgtctgtcattttcattgcaatagaattccattgtctactatatcacagttactcattctactactgatgaaaatttgggttatttctagtttttttggtgcatacatgcatacatttctggtagacatacctagaagtgaactggctgcattatgggccataacttgtcttcaacgttagtaaataataccgcccgtctgttttccaagcagcagtaaatggcactttctgttacttcatatcttctgttacttggtactgtcaggttttaaaattttagtcattctgtcgggtgtctagtagtatgttattgtggttttattttgcatttgcctgattgcaaatgaagttgagcactttttgatacagtgattaaccatttggatatcctcttcagtgaagtatcagctcaattctcttgactatttaaaaaataaagttgtttatctttttcttacagagttttaggaggagttttttggtacatgtgcagtccaaatacacaccttttgtcagtgatacgtgttcagctgcacacacggtgttttgcctttttattcttttaatggtatctattgataaacatgagttcttagttttaatgaagtcaaatttgttcatcttctttacggtgtactttttgtgtcttgtttaaggaagtccttctctatcttaaagctttgagaagcattccttctttctcctattttctaaaaattgttgaagatctccttccttccttccttccttccttccttccttcctttcatctatctctctctcacccaggccaaacttcagtggcatgatcatggctcactgcagcctcaacttcccaggctcaagtgatcctcctgcctcagcctcctgagtagccaggactacaggcacgcaccaccatacctggctaattttaaaaattttttgtagagacacggtctcatcaagttacccaggctggtcttgaactcctgggctcaaacaatcctcccacctcagcctcccaaagtgctgggattacaggcatgagtcacatgtctagcctgtattctttctttcttaaatgtttggaagaattcatgggtaaaaccatgtgaccctggagtttatttgtgggaagcttttaaaacatggattcgatttctttaacaaatataggactatgagattttcatctcatgtcggtttgggtatgttgtgttttcaaggaatttttctattttatcgaagttgtcaaatttgtctgcaggtccccttatttcctttttaatgtatggaggatctgaagggatggtactttgtgttgtctctatttcttgtttggttttgctagtgatttgccaatttaaaaaatctttccaaagaaccaacttttggctttgtttattttttgaaaacctgagtagctgggattacaggcgcccaccaccacacccggctaatttttttatttttagtagaggtggggtttcaccatattggccaggctggtctcgaactcctgacctcagatgatccacccgcctcggcctcccaaagtgctgggattacaagtgtgagccagtgtgcctggcaagccgctttttaaatggcaccaatcccattcatgagggcagagccctgatgatcgaattacctcctaatggccccatttcttaatactatcacactgagaattaagttttaacataagaattttaggaagacacaaacattcagaccatggaacatatataaaacagttgtcctaccaactaacagaatacacattcttttcaagaacacctatataaaaattatagacactgacctatgctggccataaagcaaatatgaacaaatttcagatacctgaagagatttagactatgttctccaactacagtgcaattaagctagaaatcaatagcaaaaatgtaactataaatgagcccgtatgtttgaattttaagcaagatatatgtaaattatctatggttcaaaaaagaagtcacagtgaaatttagaaaatatcttgacgtggcgggttgcagtggctcacgcctgtaatcccagcactgtgggaggccaaggcgggtggatcacctgaggtaaggagtttgagaccagcctggccaacatggtgaaaccctgtctctactaaaaatacaaaacattagccaggcgtggtggtgggcacctgtggtcacagctacttgggaggctgaagcgggagaatcacttgaacccgggaggcagaggttgcagtgagccgagattgcaccactgcactccagcctgggcaacatgagtgaaacttcatctcaaaaaaaaaaaaaaaagaaaagaaaaagaaaatatcttgacccaatgatgatgcaaatactacgtatcaaacttgtaggatgaacttccacttctggccatgacagaggagcctgtatcagactagccttcctatttatatatttatttttgagatggggtgtcgctctgttgcccaggctggagtgcggtggtgcaatctcagctcactgcaacctccacctcctgagttcaagtaattctcctgtcccagccttccaagtagctggaattacaggcgcccaccaccacacccagctagttttttatatttttagtagagacggggtttcaccatgttggccaggctggtctcgacacctgacctcaggtgatccacctgcccctgcctcccaaagtgccgggattacaggtgtgagccactgcgcctggccgtgagtgacctttttaatgtgttgttgaatttgatttgctggtattttgttgagaagttttgcatcaatatccatcagggatactggcctgtagttttctttttttatatgtctttgtctggttttggtgtcagggcaatactggcctcatagaatgagtttggaagttttctctcctctgtttttcataatagtttgagtagggttggtattagtttttgtttaaatgtttggtaaaattaagcagtgaagccactgggtcccaggcttttctttgctgggagacttttcattacagctttgatctcattacttgttattggtctatttaggttttggatttcttcacggttccatcttggtaggttgtgtatgcctaggaatttatccatttcttctagggttttcaatttattggcatataattgttcacagtaacctctaataatcctttgagtttctgtgatattggttgtaatatctcttttgtcatttctgatttttttgtttgggttttctctctttttttgttagtctagttaaagatttattgattttgtttatcttttcaaaaaactttattttgttgatcttttgtattgttttgtttcaatttcatttatttctgctatgatctttattatttcttttcttctactaattttgggtttggtttgctcttttctagttctttaagagacatcattagattattttgaagtttttctacttacttgatgtaggtgcttataggtacaactttcctcttagtacttctttccctgtatctcacaggttttgatatgttgtgtttccattatcatttgtttcaggatgtttttaaatttccttcttaatttcttcattgaccattcaagagcatattatttcatttccatgtgttcgtatggtgtgcaaaataccttgtttttgatttgtagttttatttcattgtgatcacagaagatacttgatatgatttcaaatttaaaaagtaatttggctgggagaagtggctcatgcttgtaatcccagcgctttgggaggccgaggcaggcagatcacgaggtcaggagatcgagaccatcctggctaacacagtgaaaccccgtctctactaaaaatacaaaaaattagccaggcatggtggcaggtgcctgtagtcccagctactcaggaggctgaggcaggagaatggtgtgaacccgggaggcagagctggtagtgagccgagatcgcgccgctgcactccagcctgggtgacagagcaagactctgtctcaaaaaaaaaataataacaataataataatttaagacttgttttgtggcctaccatatggtctatccttgagaatgatccatatgctgaggagaagaatgtgtattctgcagccgttggatgaaatgttctgtaaatatctaataggttcatctgatctatactgcagactaaggctggtgtttctttgttgattttctgtctggatgaactgtctaatgctgaaagtggagtattgaagtctccagctattattgtattgaggtctatctctctctttagctctaagaatacttcctttatatatctgggtgttccagtgttgagtgcatatgtatttaaaattgttacattatcttgctgaattgacccttttatataatgaccttctttgtctctttttatagtttttgtcttgaagtctgttttgcctcatagaatagcatagctattcctgctcttatttggtttccatttgcatggaatatctttctccatccctttagtttcagtctatgtgtgtctttacaggtaaagtgtgtttcatgtaggcaacagatcactgggtcttgtttttctatccgttctgccactctgtgtcttttgattggagagtttagtccatttatgttcaatgttattactgacaagtaaggacttactcctgccactttattaattattttcttgttgctttgtgatcttctttctttccttcctgttctccttttagtgaaggtgattttctctggtggtatgttttaatttcttgctttttatttttttgtgtgtatctgctgtatgttttttgatttgaggttaacatgaggcttgcaaataatatcttataacctaatattttaaactgatgacaccttaacactgattgcataaacagacaaacaagcaaagagaaaactaataaaaactctacattttaactttgtccccccactttttaacttattgtactgtttatgtctgaaaagttgtagttattatttttgattggttcctcttttagtctttctactcaagatatgagtggtctacatatgacagtgttataatattctatatgtttctgtgtacttgctattaccattaagttctgtactttcaagtgatttcttattgctcattaatgtccttttctttcagattgaaaaactccctttagcatttagcagtatgtgaactgcatttttcaagtccagaatttctgcttgattcttttttttttttttgagatggagtcttgctctgtcgcccaggctggagtgcagtggcgcgatttccgctcactgcaagctctgcctcccgggttcacaccattcttctgcctcagcctcccgagtagctgggattacaggcgcccgccaccacgcctggctaattttttgtatttttagtagagatgggatttcaccatgttagccaggatagtctcgatctcctgaccttgtgatccgcctgccttggccttccgaagtgctgggattacaggcgtgagccactgtgcccagcctgcttgattcttttaaattatttcaatctctttgctaagtttatctgttaggattctgaattccttctctgtgttagcttgaatttcactgagttccctcaaaacagctattttgaattctctgtctgaaaggtcacatatctctgtctctccagaattggccactggtaccttaattagttcatttggtgaggtcatgttttcctgtatggtcttgatgcttgtgatgttcgtcagtgtctgggcattgaagttaggtatttattgtagtctttgcagtctgggcttgtttgtatctgttcttcttaggaagactttccaggtaataaaagggacttgggtattgtgatctaagtttttggtcactgcagccatatctgcattagggggcaccccaagcctactaatactatggctcttgcagactcgtaaaggtaccacttgggtggtcttggataagatctggaagaattctctggattaccaggcagaggctcttgttctcttcccttactttctcccctaaaagtggagtctctctctctgtgctgggccgcctggagctaggagaggggtgacacaggcacctctgtggccactatcactaggactatgctggctcagacctgaagccagcacagcactgggtctcacccaaggcctacagtctccactgcctggctactgcctacgtttgcttaaggcactagggctctacagtcagcaggtggtgaagccagtgagattatgtccttcccttcaaggcagcaagttccccctacccccatcctgggaaggtccttagatgccatctgggaggcagggcctgcagtcagaaaccttagtaatctccccagtgctctattctattacagcctggctgatacccaagccataaggcaaagtccttcctgctcttccctcccctttccacaagcagagaagtctctctccatggccaccactgccccagccctgtggcagtgctgccaggccactgccaacgttcattcagggcctaagggctcttgaagcaactgaacactgccaggcctgggactctccctttagggtagtgggctcccctctgacccagggcaggtccagaactgccaccccacagccaacacttagaatctgggaccccaagagccctcttggtgctctgccacactgtagctgagctggtacctaggctgatttttgctttttatgaaggtacttttttgtgtgtatagttcaatttggttttcctccagggaggacaattggtggaggtttctatttgggcatcttttttttttttttttgagacggagttttgctctttcacccaggctggagtgcagtggcgcgatctcggctcactgcaacctctgcctcctgggttcaagcgattctccagcctcagcctccccagtagctgggattacaggtgcctgccaccatgcttggctactttttttttcaattaaaaagtaaactttaatgtcgaaaatgcaaacttggggaaggcagaaagatcacacacaaggctgtcgcttcacacttggaaggttgcacggcggccaggagaggcactcctcacttcccagacagggcgggggccgggcagaggcgctcctcacttgccagacggggcggcggccacatgcctggctaatttttgtatttttagtagggacggggattctccgtgttggccaggctggtctcaaactcctgacttcaggtgatccacgcacctcggcctcccaaagtgctgggattacaggcatgagccaccgcgcccagccctatttggccatcttgctttgcctccaccttcatttgataacagaacacccccatgtaaccaccaccacaatcaagatataagacatttctgttattctccaaatttccttcaccctcctttatagtccatggcacccaccccatccctgggcaacacctatgtgcttcctttttttttttccccgcaggaggacgtcttcctatacctatgtgcattccatcactgctgcttttaatcatatagcgtgtagtcttatgagtctgactttttcacttagcataatgcttttgcaatttgtgattgagcgttttcatatgattctgttttttctgtctcttagcttggaagttatacactttttagtagtaactgttgggagatcgttctccaagagtctctctcatatttccatacatcctgctagcagagacattgactacctgtttttgtctgtttagtgttgctataaaggaatacctaagtctgagtattatacatagaaaagaggttttatttgtctcatggctcctcaggccatacaagaaacatggtgccagcatcttaccagtgtcacatggcaagaaaggaagtgaggaagagaaaataagttgttaactggttgttaaaaagtgccaggcacgggccaggcacagtggctcgtgcctgtaatcccagcactttgggtggccaaggcgagtggatcacctgaggtcgggagttttgagaccagcctgaccaacatggagaaaccctgtctctactaaaaaaaatacaaaaaaattagctgggcatggtggtgcatgcctgtaatcctagctactcgggaggctgaggcaggagaatttcttgaatccaggaggtggaggttgcagtgagccaagatcacctgggcgacaagagcgaaactctgtctcaaagaaaaaaaaagtgccaggctctttttaacaaccagttcttacaggaactaatagagtgaaaactcactcacccccaccccacagggagggcattcattcatgagggatccacccctatgacccaaacacctcccattagccccccacctccaacattggaatcaaaatttaacatgaggtttggggggcagaaatccaaattatagcactacctttgttccaggctaccttcaaaggatgtttatacagcaaacagccttggaaaatagagttagggtctccttgtagagcacagggtaagtttgcttacttttcagcataatcaagattgtgtcttcttctggagcaaaactttgacaacaacaagcggggcaaagtctgaaaccttttgcacatcttgacagaaccttagagattacgagatttatctctgccttactcaaggtccattagtatcttccagaacaataagttggtcttagaatcctttagctatgtattcccttccaggcttcgatgctgtgtgctgttgttttatttagtttttattttaaacccaacaagacgctataccatcaatacttatttagatccccccacatatttaacttgccatggtgcttcattctttcatgcctctttaagcatccatctaggatcgtgttcattccacatgaagagaaagcttttggcccagcacgatggctcacacctgtaatcccagcactttgggaagcctaggcgggaggatcgcttgagcccaggatttccagaccagcctgggctacgtggcaaaaccctgtctctactgaaaatacaaaaaattagccaggtgtggtggttcacgtccctgctactcgggaggctgaggtgggaggattacttaaacctgggaggttgaggctgcagtgagcgttgattgcaccactgcactccagcgtgggtgacaggagtgagaccatgtctccaaaaaaaaaaaagaaggaaagaaaaagcttttgtatttcctttcgtgtaggtctgctaatgacaaagtctctgggttttttgtttgactagagaaatgttttaattttaaccttattcttgaaggttttgtttttgttttcattttgttttgtgtgctaagtacagaattctcattggcatttatttatttagagacagagtcttgctctgtggcccaggctagagtacagtggcacgatctccgcctcccaggttcaagcgattctcctccctcaacctcctgagtagctggggctacaggcatgcaccactacacctgactaatttttgtatttttagtagagacggggtttcaccgtgttgcccaggctgatctcaaactcctgagctcaagtgatttgcctgccttggcctcccaaagtgctgggattataggcatgagccgccgtgcctggccagcatttattttcttttcagctctttaaggaagtcattccattatctctgggttccattgttgagaagccagctgtcattctaatggttgccctttgaagataacttttttccctctgctattttaaatatttcctccttgtattttattttcaacaggtgtaatgtggcacatatatcagcaattgttatgttacatacaatacatattgtgcaacatatgtatcattatcagttattgctgtgtaacaaactactccagaacacagtggcttataaaaggaatcatttatttagtccttaaatctgcaatttgagcagagctcagtgggaaagcctcagctttactttatatggcaccatataaggtaactcgcaactggcaagttggtgctggctgttggctggtagttcattcagggctcagggcccaggaccaagagtcgtcaccatggcttgcttcagcctccttgaggcatgatggctgggtcccaagagaagagaaatagaaacttccagtctcttaaggcattggtctggaagctgggacggcatcacttttgccatattctgttggtaacgcagttacatcgccagattaaagggtaaagagatacaaattcccactgctcagtgcaaggaatatcagtgattttagggggccctgttttaaaacccctacaaggtgctaagcgtggatttctggggctttcttgttttttgtttttttctatgtgtttttttttttttttttggtggtggggtcagggagggcttatagggtatgttaaatcagcagaataattttatttatttatttggagatggagtttcactcttttgcctaagctggagtgaagtagcgtgatcagagatggagtttcactcttttgcctaagctggagtgaagtagcgtgatctcggctcactgcaacctccgccccgctggttcaagcaattcccctgccttagcctcccaagtagctgggattataggcacccaccgccacgcccggctaatttttatatttttagtagacatggggtttcgccatggctagtctggaattcctgacctcaggtgatccacccaccttggcctcccaaagtggtgggattacaggtatgagccactgtgcctgacctataatgttttttaaaaatcagttttggaaagtttgcagacattaacttttcaaatgtagcttccatttgattctttttctactctgcctctgatcctccacttatgtatgtatgctagatcttttattagatagtctgtgtctcttatgtactctactatattttgtattcttctgtctctccatgctttattctgtttactctttcctgattatattttttaattttgtaatttccatttgatgcttttttgatcattcaaaactcttcaccaaaattctaaatttccttttttaacctctcgaatgttatcacagttactttaaagtctattttggataacttaaatatttacagtcccctcacagatatgtttcttttgtatattgtttctgttggttttctttcatgtcttatctccacatatgcctggtgagttttgattatgtgttggtcattgtatttgcaagtatgctcgtagaaataatctggaatggccgggcgcagtggctcatgcctgtaatcccagcactttgggaggctgaggcaggtggatcacgagatcaggagatcaagaccatcctggctaacatggtgaaaccccatctctactaaaaatacaaaaaattagctgagcatggtggcacgttcctgtaatccctgctactcgggaggctgaggcaggagaatcacttgaaccaggaggcagaggttgcagtgagccgagatcacgccactgcactccagcctgggtgacagagcgagactccgtctcaaaaaaaaaaaaaaaaaaaaaaaaagaaataatctagagcctagtttgatgtttccttacaaagaatgaatttatttttgcttctcccattgcaactaggataacctcagtctagtttctggaactgaaatcacttgaggctgaactgtggtctctgtgagagcgtgtctgtgtatggctcacccttattcctaggctacgtagttctttaggaccctaacccaaagtaagagatgttcatcagggctctcctcttggcagacgcctgggctccagtccctgtgtcctgagccccatgaggctgttactggtgctgctcgtctgcccatcctctccagtaacagccacctgaacactgcaattcctgggtttccatcattccttccagcctggtgagtcatcagtgtcttttgaggtatccagtgcctgccagcagatgttttttaataatttgtccagcatttctggctgtcctcagtaggtggtctgtttcacattccctagtctgctgttaatggaaagtggaagttctgagagagaatcatcgttcccgtcagcattcaaatgcctgattacactttccccattcgctatcctttcctttatttgctcctcaccacagcaaaactcctcaaaaatatctatctttgcaatcttcagattctcacattgtgtccttaaacccactttaatcaggccttggttccctccattccactaaaagtaatgttgtcaaggtcgtgcatgcctccgtgatgctaattccagtgatgagttttcagttgtcattctctgacatatcggcaacacttgatgtggagtaccctgatgttgagaggctggtgagatgaaggaaaaacccagccaagggcaatgaggaatggcttccttccgcctcctccttccctatctttgttgtggtttttgttgtttctgtaacactgattacgttatagtttatttaatgtacttccttattctatgtttttactttagtcattttgttgatctcctccataataacataggctcgggccaagcacagtggctcacgcctgtaatcccagcactttgggagaccaagatgggtggatcacttgaggtgaggagttcgagaccagcctggccaacatggcgaaaccctgtgcctactaaaaatacaaaaattagctgggcgtggtagcaagcgcctgtaatcccagctactagggaggctgaagcaggagaattgcaggagaatcacttgaacccagggggcagaggttgcagtgagctgagatcgcgccactgcactccagcctgggtaacagagtgagactctgtctcaaaaaaaaaaaaaaaaaaaaggcttcaggagggcagagcattttatgcaattgttcattaattgacccctccatttggcacagatcacatgcccagtagttaactgttaatcaacgcactctctgtggaacaacaggctggtcccgttgagccaacactctctgggcactgccttcactagactctggctggctgctgcgcttgtagaggtatgcaagacaaaaccttttggtatgttaaaagccctggtcagaactttaagtaaccatcactgacatataatggttatggttttgaaagtgcttttatagtggtttttcatctgtcctcacagcacctctgggaggtaggtaggacaggtacagttagtctcatgtttcaaatggggctcagagagggaaaaggatttcccaagatcacacagcaccttagtagcaaaacttggactcaacctcaacacttaaaaatgaacaaagctggccgggcgcagtggctcatgcctgtaatcctagcactttgggaggcccaggcaggcaggtcacctgaggccaggagtttaagatcagcctggccaacatgacaaaactctgtctcttctaaaaatacaaaaaattagccgggcatggtggcgggtgcctgtaatcccagctactcaggaggctgaggcaggagaatcacttgaacctgggagatggaggctgcagtgagccgagatcgtgccattgtactccagcctgggcaacaagaatgaaactccatctcaaaaaaaaaaaaaagaaaagaaaagaaaaagaaaagtttccctttttttaaatatctcattttaatgactgcataatagtttattacatagttataccataatttatataatattttgttgctgtacatttaggttaaacaatacttacttagttcctactatgaagaggggccaagtactcgaggctggagctctcacatgtggcaatgaaattagaaagtggatatggcagggctgtggtaaaataaaatataaaaataataaatgatattaccaaagaaaaggaaagtttttcaaaataaaggaaaatctagacaagcatagtggctcacacctgtaatcccagtacttttggaggctgaggcaggaggaacacttgaggccaggagttcaagaccagcctgggcaacatagcaagaccccctgtcaacaaaaataaaaaaaaattaggccaggcacagtggctcacggtggctagtgcctgaaatcctagcactttgagaggctgaggggggtggattgcctgagctcaggagttcgagaccagcctgggcaacatggccaaaccccatctctactaaaaacacaaaaaattagccaggtgtggcagcacacgcctttaatcccagctactctggagactgaggtaggagaattgcttgaacccgggaggtgaaggtcgcagtgaggtgagattacaacactgcactccagcctgggtgacaaaatgagactctatctcaaaaaaaaaaaaaattagctgggcatggtggtgcatgcctgtaatcccagctactcaggaactaaggtaggaggatcccttcagcccaggaattcgaagatgcagtgagtcatgatcacaccaccgcaccccagcctgggttacagagcaagaccttgtctctaaaaaacaaagaaagtctaacctaaacgccattatgtcatttacatgtgtataggggtgtgtgtgtgtgtgtgtgtgtgtgtgtgtgtgtgtgtgtgtgtgtgtgtttgcttgggaggggagtcgggctggagctggccaggccgcagcctggggaccttctgattccagcagggatgtgggccgagggtcccgccttactcatttcgggtcttgctcctctgtcctggctctacagactcttccagctggagttggaggctgacgccctagtgaatttccatcagtattcttcccagctgctacccttctatgagagctcccctcaggtcctgcacactgaggtcctgcagcacctgaccgacctcatccgtaaccaccccagctggtcagtggcccacctggctgtggagctagggatccgcgagtgcttccatcacagccgtatcatcaggtgagcaagggaacaagaccatttggacaacgtgtgtgtacctgcttgtgtgggcagtgggggccgcaggcctcggttcccctccatagtttgacttaaaaaggagcagggcctggcatggtcgctcactaacgcagtcccagcactttgggaggctgaggagggaggatcacttgagactaggagttcaagaccagcctggcaaaatagcaagaccttgtctctacgaaaaaattaaaaaattagcatgtgtctatactcctagctacttgggatgctgaggcaggaggattgcttgagcccaggagttagagtttacagtgagctatgattgcaccactgcacttcagcctgggtgacagaatgagaccttgtctctaggaaaaaaaaaaaaaaaaaaaaaaaggtgctgcgttgctaccagattaaaatgtaagaaggacaatgtaatgtttccagagtccggagtgctcaccaggtgccaggtctgtgggagctgatttctacccaccatgaaattgaattttcccaacccccacaaggtatcgtcattttattttactttattttattttattttattttattttattttattttattttatgttacgttatgttattttattttgagacggagtcttattctgtcacccaggctggagtgcagtggcgcgatcttggctcactgcaccctctgcctcctgggttcaggtgattctcctgcctcagcctccggaatagctgggattacagtaatgtgccatcatgcccgggtaattttttttttttttttttttttttttgagacggagtctcgctctgtcgcccaggctggagtgcagtggcgcgatctcggctcactgcaagctccgcctcccgggttcacgccattctcctgcctcagcctcccgcgtagctgggactacaggcgcccgccaccacgcccggctaatttttttgtgttttttagtagagacggggtttcaccatgttggccaggttggtctcgaactcctaacctcaggtgatctgccctccttggcctcccaaagtgccgggattacaggcgtgagccaccatgcccggcccaggtatcatcattctagagagagctaacaggacttgtgcaggtcactcagccagagagggtgaaagaggggcttggatccttggtgtctgcccaggctgctcttctggaagctgaaggcctccttttgtgaatccattcagccagcagatggagcagctgttgcccctggtgagggcactgtccccacccttgcacagggcaccagttggccatcttgtgcagaggtagccacacctcctctgagtctctatcctagatagctcagttaagctcccaggcccagaactcaaaacctcactgctggccgggcgtggtggctcacacctgtaatcccagcactttgtgaggccgaggcgggtgtatcacttgaggtcaggagtttgagaccagcctggccaacgtggtgaaaccccgtctctactaaaaatacaaaaaattagcaaggcgtggtggcgcacgcctgtaatcccagctactcgggaggctgaggcaggagaattgcttgaacccagaggcggaggttgcagtgagccgagattgtgtcactgcattacagcctgggcaacaagagtgaaactccacctcaaaaaaacaaaacaaaacaaaaaccctcactgcactttagtttccaggcgtgcttttggacagcactgtctcatctcaccatcactctgtccatttcctggggcaggcacagcagcttgtgtcgataaggatattgacgcccagaaaggttaagtgaattgcctgaggctagtgagatatccgtgttctgtgaccctttcctgtgccaccaccctgcccacttcctgctggtgtggccctggggcccatctcttgtacgagtgagcaaactgaacagaaacctgatacaggtcacatcagatataattacattcaaatcagcccaactagctgagtggcgggaatgctcttgagctcaaataaaccagaaagtccgagtttccgagtgcacttccctgcatgtgcacttaggtccccctgccaccttgtaccacacctgctcacctctgctcaccctggccctctcctgcagctgtgccaattgcgcggagaacgaggagggctgcacacccctgcacctggcctgccgcaagggtgatggggagatcctggtggagctggtgcagtactgccacactcagatggatgtcaccgactacaagggagagaccgtcttccattatgctgtccagggtgacaattctcaggtgctgcaggtgagcagggggaggggcagggtgactggtactgatacctcccggtgtccacggttccctttgggcccctaggctcaggtgtcactctcaggcctctcactgtcccccattggtccttgaggcctgagctccttcatggagggtgcagacccctccctggctcttccctcccagcccttttccaggagccacgtcctcagtctctttgcttgataaacctggggacggcctccaacccagcaaaataaaccccaaaaaaggcccagctccagtcagttagttcagttccacttttcctgagcacaaactgtgagccagatgcctgcctggaggggctcgtgggccagcgggacctgggcttaaccttttgcaagcttgtccaatctgtggccctgcaggctgcatgcagcccaggacggctttgaatgtggcccaacacaaattcacaaactttcttaaaacattatgagatccatgcatggaccttttttttagatcagctgttgttagcgttcatgtattttatgtgtgacccaagacaattcttctgatgtggcccagggaggccaaaatattggacaaccctattttacaggaattcaaaccaagcaaaccaaactgtctccagttcctgtaggcatttgtgccagaggccctcctgttaacgtttttgattacctgggcaaaagatgtgattttttaattgtgggcaagcagatggggtgatactattaaatagctatttcatatattagattgaacagaaaaggcaggatgttggattatgttttattgtctagaattagaaaattcttctaaagatcatgttctctctgccttggcatcagaatgcaactacgttataccagaaaatgtggattcctttttttttttttttttttttttttttgagacagagtttccctatgtctcccaggctagagtgcagtggtgcgatctcggctcactgcaacctccacctcctgggttgaagtgatgctcgtgcctcagcttcctgagtagctgggattacaggcatgtgccaccatgcctgggtagtttccgtatttttagtagggatggggttttgccatgttgcccaggctggtctccaactcctggccttaagtgatccacctgcctcagcctcccaaaatgccgggattacaggtgtgagccactgtgcccggcccagaaaatgtggattcatatcttatgcttcttgctctcagggaagggaattctccacccactgttgaactccactttcaccgagaatcctctgcgcacccagcatggtgccgcgcagaccctgcctccatgcgggggtgtgcacacccgcttctcgatagtcatgcacgactgcagctgtcctttatccggtgctgattggtgcctgaccttgaactgagtgttgtatgtgttccagttaattcttagaatacactcatggggtggaggtcattattcccctttcctctccgaagaaactgaggttcagtgttgttaattaagaagcgtgcccagggagggccacaaagctgagagagtggggcttgaccttacattggcctcgatgccagccctttgctcttcctgctgtgtctctggcctgccttcaggtccagtgggactgctgtgaggtgaccctggtgtcacatgggtacactgtggttgtaatgaacctcatggggacagcactgagccaaaagtgagacagtaaaaccctcctagcactttcttttttttgagacagcatctagctctgtcgcccaggctggagtgcagtggtgtgattgtggctcactgcagcctcaacctcctggactcaggtgatcctcccacctcagcctcctgagcagctgggactacaggctcgtgccaccacatgggctaattttttttttttttgagacggagtcttgctctgtcgcccaggctggagtgcagtggcgcgatcttggctcactgcaagctctgcctcccgggttcatgccatcctcctgcctcagcctccagagtagctgggactacaggcgcccgccaccacacccggctaattttttttgtatttttagtagagacagggtttcaccgtgttcgccaggatggtcttggtctcctgaccttgtgatccgcctgcctcggcctcccaaagtgctgggattacaggcgtgagccaccacacccaggccacgccagctaatttttaaaatttttttggtaaagatggggtctccctatgttgccgaggctggtatcacactcttggtctcaagtgatcctctcacctcccagtgtgttggaattacaagcatgagccactgcgcctggcccctggctctctttttaatactgctgttctttcattgaaaacatagtacctgcatgtagaaaaaaatcagtcaggacagaatgaaaagcaagaatcattcccacctggacccccagtgcccatcctgagatacagctaccttttaagttccttgactcagaaatgtttcatgtgagccacagtcatgccaggtcgaccccttccctcccatccacactggcacttggctttcctggtgcttctctttacgttctttttttttagacagagtttttgctctattgcccaggctagagtgcaatgatgcaatctcagctcactgcaacctctgcctcctgggttcaagcgattctctttcctcaggttcctgagtagctgggattacaggtgcctgccaccatgcccggctaatttttgtatcgttagaagagacgacatttcaccatgttggccaggctggtctcaaactcttgacctcaggtgatccacccaccttggcctcccaaagtgctaggattacaggcatgagccactgcgcccggcctctttacgttcttatcagcatcctatggagtcaaacttcccttcctctttcatcagctccttggaaggaacgcagtggctggcctgaaccaggtgaataaccaagggctgaccccgctgcacctggcctgccagctggggaagcaggagatggtccgcgtgctgctgctgtgcaatgctcggtgcaacatcatgggccccaacggctaccccatccactcggccatgaagttctctcagaaggggtaagacctcctcccctccccatctgctggcctgctgggctccagctctcctgtcacctgtcccgtgcctgaggcaagcagtatccaccatagatcttagcatctccagcctcagagcagaggccccgggttcacaagcctcattaggccccgcctggcccaaagaaggtgctccatcattgtatcatgggtaggaatctcggttcacaagttcagctgtgcaaggaggagactttaaaatttttctggctgggcgcggtgtctcacgcctgtaatcccaacactttgggaggctgaggtgggcagatcacctgaggtcgggagttcgagaccagcctgaccaacatgaagaaaccccatctctactaaaaaatacaaaattagctgggcgtggtgacacatgcctgtaatcccagctacttggaaggctgaggcaggagaatcggttgaacccgggaggcggaggttgcagtgagccgagatcgcaccgttgcactccagcctgggcaataagagcgaaactgtctcaaaaaataaataaataaataaataaataaataaataaaaataaatttatttaatgtaccttaattcctaggagtgaatctccctctataaaactggagacaaccaatcttagccctctttggggtctcctctttccagctcccctccaggtggtgctccagttctggagtctgatgcaaccccaaggcccacctggcccctcctctaacccagcccagcctgatctgaacagccccccgatggcttcagtgctccttggtttcttgtgtgcccagctcaaagcctgggaaatgcttggtaaggtggccgagtgcccgtccacctagatgcctctttcctttctggctggtggcacgttgggaggcaggtacaggctcatgttttgggagcctgggaacccctggtgtcaggaaaattgtcttcaaaggggtaggggatgagataaaaagataaatgaatatctcaaatctcaaaatactatctaggccaggcgcggtggctcacacctgtaatcccagcagtttgggaggccaaggtgggtggatcacctgaagtcaggagttcgagaccagcctgaccaatatggtgaaaccctgtctctactaaaaatacaaaaattagccaggtgtggtggtgtgtgcctgtagtcccagctactcaggaggctgagacaggagaattgtttgaaactgggaggcagaggttgcagtgatttgagattgtgccacagcactccagccagggcgacagaacaagactccatctcaagaaaaaaaatactatctaacaggaacaacatctagaatgaatgaatgagccaatgagtccttcgatcctggcactgtgctaaagcaccagcctcaccgaaatgaataagccactccaggacaggagacaccccagccacccagaatctcatagcgcagtgccagacaagcagtgagaaggcatggacgggcagcactcaggcagggaggctggcacttgtgcctgtcctcaggttgttccttcctctgggagctgcatccaccttgctagccccatggggcattgctagcccttctaagggctggaccaagcctggacaaaccctcctttccttgaatctcccaagcacagccagaatgagctagagctttcagaaatacttgaccaaacagagaagataccaacacccccagccccgcagtcaggttccccatttgcaggttgtgacctgagtggacaccaggtgatgctcttctctacccagagggctggcacatggccccactcttgcttgtctccagccaccctgagctgtactgggcaggagctgtaattgaccagttttctctctcttcaaacaacctcagccctcaccggtccctctgtccccacacaggccatcctgggtgggtccagcgtcccatcacataagaggatctttgcacagaagacaaaggaagaggctcctaccttgagtggagcagggagatcccttatcgacttggcagccagcacagccctactccaagaatcccacggcctcagtgttactgacaagtggttccctcacagctcagactaggagctccctcgctgtttttctttttcttttcttttctttgttttgtttttgagacagagtttcactctgtcacccaggctggagtgcaatggcatgatcttggctcactgcaacctctgcctcccaggttcaactgattctcctgcctcagcctcccaaggagctgggattacaggtgtgcgccactatgcccagctaatttttgtatttttagtagagatggggtttcatcatgttgaccaggctagtcttgaactcctgacctcaggtgatctacttgcctcgccctcccaacatgctgggattacaggcgtgagccaccgcgcctggccacctctgctgtttttcaatgcagctgacctttcccacaaagctcggtttgtgcctgcggttctcagatggttaagcccctgctgaggaagggaaacagataatcccagacagtgagatggaggctgagactgaggatgcctgggggctgcactaggagctcagagacggcatcaggcagctggagttcagggaaggtttgggggcagcagagcccgagccaagccatggacactagccggagctggccactcgggtgaagacttggggggctccagagggcccagggaaagaagctgggcctgactccatgtgcctagtgctgagcaccaagcgctggcataagggctgtagggagctgggcagcataaatcctgggcctgtgctgggcacccctaataatagagaacagcagctgaacactaacgctgtcccagccaccggcttagccttcatgtgggctatttcactatagcccagagagctgatgtattttattccccctctaaagctgagggccaagtgtggtggctcatgcctctaatcccagcactttgggaggctgaggcaggaggatcgcttgagcctaggagtttgaggctacagtgagctatgatcatgccattgccctccagcctgggtgacaaagggaaatcctgtctcaaacaaacaaacaaaaaacagatgaggaaaccagggcttagagagattaagtaatttgctcaaagtcaggcagtcagtaagtgccagacctgggaattaaacccatgtgggctgtcctagtaattgcactaaaaaaaaaaaaaaaaaaaagctttattgagatatagttcctattccatacaatccacctattgaaagtatacaatgattctgatatattatgtttattttttccaactgtgatagattatatataacataaaatttgccattttaaccacttttgttttttgtttttgagacagagtttcgctctcgttgctcaggctggagtgcaatggtgtgatctcggcttaccgttacctccacctcccgggttcaagtgattctcctgcctcagcctcccgagtagtagctgggattacaggcatgcaccaccatgcccagttaattttgtattttttagtagagacagggtttctccatgttggtcaggctggtctcgaactcccgacctcaggtgatccacccaccttggcctcccaaagtgctgggattacaggcgtgagccaccacacccggcccattttaaccacttttaagtgtacaattcggtggttttaatcacatttacaatgttgtccaaccattacccctttctaaaacttttcttatcacctcaaacagaaactgtaaccattaataactcccgattctcccctccccacagcccccgataagtcccatatcctctctgtctctcagaacttgcctgttctagaacctcgtatcagtgaaatcatacagcgtttgtccttttgtgcctggcttatttcacttagcatgatgtcttcaaggctcatccatgttgcagcacgtatcagaatttcctttctttttaaggcagaatactattttgtttatccattcagtccttcactgatagacgcctgggttgtttccaccttttgtctgttgtgaagaatgctgctgtgtacatgggtctgcaaatgtccattcaagtccctgcattccgtcctttgatacttccgacctcaggtgatccgcctgcctcagcctcccaaagtgttgggattacaggcgtgagacaccgcgcccagccagaaaaattttaaagtcttctccttgcacagctgaacttgtgaaccgagattcctacccatgatacaatgatggagcactttctttgggccaggcggggcctaatgaggcttgtgaacccggggcctctgctctgaggctggagatgctaagatctctggtggacactgcttgcctcaggcaccgagtagaaagcaattgtgctctttcccactctgtcatactgcttcctatagcatgcaggtcactgtgtgactcactgacagtgtggtaaggaggtggagggtggctgtgtgccaggcacagaactgggctctgaaatgcctggtcttccttacaccccagccactcctctcagcactctctccatgttgctcagcttctggaggccaccagtgaggaagctggggcttgacttcaagcccatctgactctaaagccagtaccagggagggtgatcattgctggtggcagcatcaggaaggcttcctggaggagggggttagttgtgccttgaggggctcagtacagccttaaccatggtgagtgtgctggttgggtttgctgaactttgtttgcagtgatgctctctgtaagcagtagatgaagctccaagtcctggcttcatcccacgccacgcagaccctagcttctgctcaccaaccggggcccctctctcaccaggtgtgcggagatgatcatcagcatggacagcagccagatccacagcaaagacccccgttacggagccagccccctccactgggccaagaacgcagaggtgagtggatcctgaggtgggtgggtggggcagggggccgggccccgcaggtcctcagggccctcaggaagcaggttcccgagaggaccctgaggctagcacttgggggctgaccttgcagtgggtgtgcaggcagagaagtccatgaagagctgggatcctggcagggctctgctgctctctggctgggcggggggatccgccctgtgcctcagtttcctcatccatgaattctgctttggcgatgtgatgaagtcagcaaggcagtgtgtgacaaaactcggcacaaattgtaaagtgcttcccaaatagaaggtggcgtgatgatgattgtattattagtcaggattctctagagggccagaactaacaggagatatatatatagagagagaggggggtttatttttttattttattttttttgagacggagtctcgctctgtcgcccaggctggagtgcagtggcacaatcttggctcactgcaagctctgcctcccaggttcatgccattctcctgcctcagcctcctgagtagctgggactacaggcgcccgccaccacacccggctaatttttttgtatttttagtagagacgaggtttcaccgtgttagccaggatggtctcgatctcctgacctcgtgatctgcctgccttggcctcccaaagtgctgggattataggcgtgagccaccgtgcctggcctaaagggggatttattaaggagcattaactcacacgatcacaaggtcccacaataggccatcgcaagctgaggagcaaggaagccagtccaagtcccagagctgaaggacttggagtctgatgtttgagggcaggaagcatccagcacgggagaaagatgtaggctgggaggctaagccagtctagccttttcacatttttttctgcctgctttatattctggccgtgctggcagctgattagatggtgcccacccagattaagggtaggtctgccttcccctactgactcaaatgttaatctccgttagcagcaccctctcagacacacccagggtcaatactttacatccttcaatccaatcaagttgacactcattattaaccatcaagatgatgatgatgatgatggatgatgatggtggtggtggtggtgctgggcctagctgcacacacagggagcctggctgggcatctcctctgagttcttcccctaagctaagctctgtcctcctgggaggatggaggcctctggtctcatcaccaggaagcacagcttgacagagaatgggatgccccagagttcatggcctacttctcaatgtgatgggccaggagggagggcactgccagcctcagggtacctctgcattccaggagccggacaccgagtcaggcccttccgtgtaggtttggtcactcattgtcatcacatgctgtgaggtggggacttgcattcccatcttcacagaagccctgaagtgcacatggctacagtgacccatccaagcgcaggcagctgggatgagtgaagctgggctttgggctcaggtctgtgactccaaagccaggctcccctccctgttcccaaggctctgccagggatgtgcattgccaaggcccagtgagaggtgatacctttgcagggttccagggagggatgcagggagcggggtgcttcaggacaggccccagaggagcctttgcaaggagagtgggttctgttggcactaggaaaggaccagaagcctcttaaaacagtcagcacatctttggctttttgtccctagtcttgggatgctgatgggatgggaggcagtctaggcccccctagaactggggcctgcccctggaatcctcttgctagcgctttccaacatcccagtacctgtaggcctctcagagcagaagtggcagtgcccacgtgtcccggggtgcggcagctccccgagtgcctgtgctaactcagcctgaccgtctcccgcagatggcccgcatgctgctgaaacggggctgcaacgtgaacagcaccagctccgcggggaacacggccctgcacgtggcggtgatgcgcaaccgcttcgactgtgccatagtgctgctgacccacggggccaacgcggatgcccgcggagagcacggcaacaccccgctgcacctggccatgtcggtgagcccaggaccgcgtgtcctgccctgtggggccccggtgggaatgcaggagggctgtccggactggagccctcctccccactgtctccctcctatcgtcagctgctccaaatcatcttcccacccaaagctcagttcagaccctgactcctccctcaggaagccttccaagtccccctctcagcccaaaataacaccacctcctgtgtgctgtggtaccttttccacctgtgcccccatttggcacttgcatggcacgagagggaaaaatgacagctctggccatagactggccctgagcaagccatgtcacctgtcagcctcgatttcctcatctggaaaatggtggtgtcaatacttatctggaagagttgtggaaaagttatggtggacacttggtcaccctctacagaatgtctaagtgacacacgcagtacctggcccgagtgagcatcctgcttcccttcactggtccgcgtgttgctctcatcttccctgggaggctgtaagatcctggcaggcaaagcctgagtgtgcagcccagcagcctgtggcaggtgccaggcatattcgttggtttattatagaacacagttcctgccctcaaagcccttactgtctggttacacatctagagtatgaacatattaaacctagcagaggaggacgttactgtgttacagacatatgtgtgtgcatgtattcttttttttcgagatggagtctcgcactgtcgcccaggctggagtgcagtggcgcgatctcggctcaccacaacctccgcctcccaggttcaagcgattctcctgcctcagcctcccaagtagctgggactgcaggcacgtgccaccatgcccagctaatttttgtatttttagtagagacggggtttcaccacgttggccaggctggtctcgaactcctgtgttggccaggctggtctcaaactcctgacctcatgatccacccgccttggcaccccaaagtgctgggattacaggcgtgagccaccgcgccccaccgtgtgcacgttttctatagcaataccgtatgtacagaagtctgtttactgagtctcagtgacagaacatgagagacccccgggactctaaaagctgattcaggacacattcagagacatcctgttttataccaaaggtcaaaacttggaagagatgttgttgcccaaaaggctgaaactataaatagtttcatttttgaaactgtggacatttttagcactgggtgggcccttggaatgatctaactcagcagttctcaagttttttggcctatttgatccctttatactctgaaaaattattgaggatcacaaagattttttaatcatctggattttctttatctatatttaccattttagaaatttaaagtgtgaaaatttcaaaatattaattcatttaaaaataacaataataaatatatatgcctactatgtacccacaaaaattaaaattaaaaattttttaaaaaacttaaaaaataactggccagctgcagtggctcgtgtacaccagcactttgggaggccaagatggtcagatcacctgaggccaggagttcgagaccagcctggccaacatggcgaaagcccatctctactaaaaatgcaaaattagctgggtgtgagacctctgaaagggtatcacgtgttcacaggggtccccaggtcttactttaagaactgctgatagactttggtcatcttcatcccatcttcacagtttttggcatattcatcaaccacctttacaattatgtacttaatcacctcttcaaattggcttacttttatttatttattttgagacagagtttcgcttttgttgcccaggctggagtgcaatggcacgatcttggctcaccgcaacctctgcctcctgggttcaagcgattctcctgcctcagcttcccgagtagctgggattacgttcatgcgccaccacacctggctaattttgtatttttagtagagacggggtttctccatgttggtcaggctggtcttgaactcctgacctcaggtgttccacctgcctcagcctcccaaactgctgggattacaagcgtgagccaccgtgcccggcctggcttacttttaaactgacttaaatttattttgagagaaatgttgcatcactaccataaatggccatccatccatccagtgccaaccataaaaggtaaccaatgcagggcgcggtggctcacgcctgtaatcccagcattttgggaggccgaggtgggcgaatcacgaggtcaggagttcaagaccagcctggccaacatggtgaaaccctgtctctactaaaaatacaaaaaattagctgggcgtagtggtgggcacctgtaataccagctactctggaggctgaggcaggagaattgcttgaactcggtaggtagaggttgcagtgagctgagatcacgccactgcactccagcctgggtgacagagtgagactccgtctcaaaaaaaacaaaacaaaacagtaacaacaacaaaaaatcacagttaatgctgaaaacacacacatatctgtagccatagaagtcctaatagaatgtgaagaactgtttggaaaaccccattctagacccacagcttcattctctaggcagggaaatcgggtcccaagaagaggaaggtgacaaggccagagcccacagttccaggtggccagtgtgtcctctgaaaccatgccatgctctgcgcccctgcccggcctccaggtgtggaaatgtgtgacgttcttcgtggggacactcccccgaaggctgccattaggggcacgtgtgttcggttacccctcagggatgacaccctggactgggtgggcaagatggccttccctgccctcacccaccctctccttgctactcctgaaagccatcagcagctgacctactgtgtccccatggctcctgggtcggggtcacagatgcactgcatctttggaggcggagctggcagagcaggggcgagtcacttctagtttctgcctgggttcttacaccctcccctgtgggtgcttttaagcctgtttgtcaggtccccagccatcaaatggcagactttggactaccagattgacttgggtgggggtgaggagggttccagtgtctccccgtgctgaggagaggcccgctgggtgagttgacaggttggggctggcagccaggggcccctttgttcttcacttccccggcagttgcacgtcttatcctctctccatctccaacagaaagacaacgtggagatgatcaaggccctcatcgtgttcggagcagaagtggacaccccgaatgactttggggagactcctacattcctagcctccaaaatcggcagacgtatgtgctctgcactctggggctggagtggggtgagggttgggtggatacagggaccgaggaggagggaagtcccaggcatcaggtgccagcatcctgtgctgacccgccctgctcagagctgccaggagcacctcgtactcagagagggggcttccttacccaagcacaagggccctgagcagtagatgcaggcccaccacggggcttgctataccagcatcctctcccgtgcagcgccccccacctcagggagctaagattcccagcaggggtggggacaggagagccagcagcagccttctttccccaccgttggggaattcactgatggaaccactggctagaatgaccaagggtgcatgcactacactgcacgagctctgggcatgcctgtgtgggcagagtgcatggccatgtgctgcacgctcgcacagtgagccttagcttcagagctggacagagcagatcctcctcaccagaggcctggagcccgctctggagggtttcagcagctgtgggggtcactgtgggcaggtacctgatggcagcagtgtgtgtgtgccagtgcacacgtgtgtgtctgcatgcaccgcatctatgacctccttttcagcaatcccatccatcaaatggagtaggtgccccctggctggctcattagtccctttggaaccctgaactatcacttagcatttttgagaatcactgaatgtggccatgggattcctgctttcttggctggagtagaaggaaagaaggggttcccacaggcatcgggcagggtgacactgacctcctcctcccatatcctccttccctggccttaggaagctgcttgggatgtaccagcctgggggcagcactccctgtcagggtgggctgaggcctctggagcagcccacgtgcccagggcctgggagctgggacaggggacggagtgtggaaaggaggggcctctcctttgcatgttgacatcatttctgatcctgtgccatctccccttccccaaaccatgacaagttgtcaccaggaaggcgatcttgactctgctgagaaccgtgggggccgaatactgcttcccacccatccacggggtccccgcggagcagggctctgcagcgccacatcatcccttctccctggaaagagctcagcccccaccgatcagcctaaacaacctaggtaggcctcgcctcccgactccctcttctccagctggttcccaggcccctggatcacagcaggccccaccaaagcaacaggatccctaggacggaagtcactaaaggaagccggggaggatggggccggagttgtcagcctctaggcagccagcaacccacagatcccagaggcctagggtgtccctggctgatgtcccatgctccgttgcccctgagaggatgtgtcctgcacacagtctcaggcctgggcatttccagtggcacccatgaggtggctgctgttactgccctcctgtccccagggcgttcagggtgggcagtgaggagtgctgtcgggggactgggggcccgggccctctggcttcacctgtccctctggcttcacctctatcacactgtttgaatctcggttgggcctgagacctgtgtgcccccttcctggccccgtggtgactttcagacgttgaatgtggccaggcagccagcatctgccccggtgcattccttggtgcccagggagacatccccagactagacaggacccttctctggactttctgtgggctggcccactcagggacctccattgtttgggagcggggtcccctgaacagagggcagccaggagccagtccttggtgagccagacttcactgtggaggcggcagcaccttcagccagggtagcccgaccaagcctggaactctggagaggcaccgtgactgtggcttctagtcctggctccacctctctctcccctcccaggaactccccctccacctcccatctttatctctcaattttgcaggcagtcacccaagccaggccggatggtgggcctggggtgcggcgtcagatgggtaacgccctgggcctggagaggccaccgagcctagccatgcggcattagctctagctctcactccctaatccgtccttcttagctgcgcacacaccacacgccccctcccctgcaccctgtccccggcctctctcagccactcttctgcttcccttgttcactgtggagccgtgtgccctggggagggggagacaccgcttcgcagccctcggttctgctttgctgcttctagactctgcacagtggtggggggctgtcagagttggggtcacgcgggctgctgcaccaggcacctggggactgggctgcttgtcaggaggggcagctagtcagttgggtggacgtcaggcaggccttggacacaaaggaagacatggacagagtggatggtgggcctgatcccggaggccactgggatttccagacctgggatcaggacgagggatgtctcctttcatccatggacttaaaccccgaggaacgtcctgactcagccttttgactaaatgaccttgggtgaattatggaccctcttagagcctcacctgtcaatagggaataagaattcttaggccccaggtggttattgcagcatcggctccgatgcaagaagaagcactttgtctgaagaggacacgcaagggtattcatgccttggggtttcaagaggaagagattgaggggaacctgggagctggctgggcagggtggggagcccttcccagagcagtgggcccccctttccactccagcccatttctctcctgtggcctgtggctcagctttctcctgggacagagtccttcctgtggggaagggacagatgacagggggagtggggggatgagggcgtggccgtgggcgaggcacagcccaggtttgatctagggacctctggggtagcagggcttggggacccacctgaccacagcatgccctgctctgtgcctcacagaactacaggatctcatgcacatctcacgggcccggaagccagcgttcatcctgggctccatgagggacgagaagcggacgtaagtggatcgagatcgggggcagagcggggaacgtgtgcgctttcctgcccctcacccaccccctgttgtgggctcagggctttactctctgcaccctcacagccggcgaagtggctctgctcctagtcttatagttctcagcagagacagaacatggagagcctgtgtcgctcgttcattaatgctgggcggtgcaggctctggagaccagcccagggtgccaggcttcttggacttggtggggctggcgcagtgttctggcctccctccctgatctccttatggctagaagagggggagatgcctgggtcccccctggggagatctcagcagctgcttcccactgctcctactggcttccttaaccacctcccactgcagaatagtggcgtgggctgccttccccagcacctgctgtatacctagtcccattgtaagaggcgggcctgggtgacaggatgcaaagagaagacgcccaggccttgcccttcaggcataatcccgggtgcttgaactcagtgccagctggcacggcaaggtaccaggacaaatgcgtttccagccactgtgctgtcgccacctcccttgattgctgcagttgattcatttattctttattagtctctcatgttcctaatagccttcccagggaggaatttgtaaccttgttttacagatgcagaacctgagcccctgagaggtgaagtgacttgctcaaggtcacacggagtgagtgtcagggtggcaactcacagccgggtcttccgaacccacgtcctttgtgctaccgcaggctctctctgggttctctgtggactctatacctagtgccagccctctgcagggaaagctctcttctcagaatcagaggcagctccactcccagggccaggcagtgatcgtgcagctctgtgggtcctctcacttcgcactcacttccatgctaccctgttgtgtgccctggaggttcccctgccccatcagcattccctcccctgtgccccctgcatgctcttgcacgcgggcacacgcacacacacacgcacacatgcacgcacacacacccacatgcacatgcctgcgggttgcccacatgcatgtgttgcccacatgcaaacacatggacacgcacacacatgcacacatgcaaacacacgtgcatgcacacacatacacatgcgcacacatacacatgcatgcatgcacatggacacccacacacatgcacacacatgtacacacatgcatgtacatacacacacctgtgcaggggctgaggtgaggcagctgcacctgaaggggggacccacatttcccaagggaggaaaagcagattccccagattctggagcctcagaaccctgcctggagcggggctgaggcaagagtcaggagacccctcggtagctccccacttgggccttccaagctacagagccctgcgccctctgggttgatctctgtcgccagccccgcatcttcgggagtttgctttggcctccagcaacagtgtagtctctcccctgccacctctaggcttgctgtggggctgggtacctggtccaggaaaagacccctagaggtgggacccgggcctcctccatttatcagccctcttgggcacctcctgcatccccttgacacacagcgctgcccagagcagaggcggcttctgccctggtggagcttccaggtcagcgcaggagagagtaaaagaaagattgcgaatggaatggaagcagcctccaccaggaagcaggtggagcagcaggcgggctgtgagggagggtctcgatggcatcagggcaggcttctctcagcttcatcaagctgagatgggaagatgagaagatcagaggaaggttccagactgaaccaaccacaaaggcattcccccagggcatggccaatgaggacaggcaggatgtggggagacgtgtcagggcgcgctggagagcatgtgactcaggaggcggcagacctgggtccaggtccagtccgcatccatatgacttggttcccgtcacctaacctctgagctacactccctccgtcactcaaaaatatgcacagagagtaggcgcagtggctcctgcctgtagtcccagctactcgggaggatcacttgagctcagaaggttgaggctgccgtgaactgtgattgcaccaccacacaccagcctgggtgacagagtgagaccctgtctctataaataaataaataaataaataaggctgggcacggtggctcgtgcctgtaatcccagcactttgggaggccgagacaggcggatcacatgaggtcgggagttcaagaccagcctggccaacatggagaaaccccgtctctattaaaaatacaaaattagctgggtgtggtggcgggcacctgtgatcccagctactcgggaggttgaggcaggagaatcgtttgaacccgggaggcagaggttgcggtgagccgagatcgcgttattgcactccagcctgggcaacaagagtgaaactccgtctctaaataaataagcacagggatgtcagggagggtctgcctcagaggcgtttgggacaatgacatgagctaatgctggtagcacccctcccatagcccctggcatgaacctctcccttcctccctgccccctcctcccctgcttcttccaccttgtgtggaggccctgatactctgtcactgcccattcctggcctggctgtagggtccccgcccctccttccccagccttatttaattccaacagactttatcaggcacctgctttggatcaggcctgatactgaccaaaatcaggtgtcccaagttggggagactggccgagatcctgctgggatggcgcctggtcagtgatgctatcccccgaccttcctttccctttctctgttgcactctccagcccctgaaatactagacatttgttcctttactgccctcacccccaccctcgctgtcctgcataggacagaagttcctcgggtccgtctgggtctgtctgccaggacacagctgcaggggacaagggctatgagggtggatgtaaagtactgggctgtggcaggaccctcctctctcccactgctgttcccactgcagccacgaccacctgctgtgcctggatggaggaggagtgaaaggcctcatcatcatccagctcctcatcgccatcgagaaggcctcgggtgtggccaccaaggacctgtttgactgggtggcgggcaccagcactggaggcatcctggccctggccattctgcacagtgagggcggcccctggggatggggccaggcggggctgagacctgtgtcctcaaggggccgagtttgtcttcagggctttgcaaaaagagagtggaggagtagaggagggctataagcactttgaggaggcaggggcggggctgcaggtgctgaggtcccaggctggaaggagaagggctgggcccatgggcttgggtttggggatcccccgccctctggccacagagggtagagctggctgtgtgaaattttggcataggaagcgtttcctatcgactgccttaacccctcctcccctcacccctgcaaagcaggcaccaggggccacacagcctgctgcacataaggaatcccattcccagggtgcacgcagcaggcagtctcaggaatgaggagccactgagcctcaggatgccagagccctcgcctgcacacttcattttactgggaaattttactgggaaattaagttcccaggtggggagggatgacgtgaagtcacatagctcatccatggggtcgctgggctggagcacagtcccctagactcccagcctggcacctcctaggccacagggcactgtgtagtctcctttcactgccgctttgcgaaggcgcctggcttgctggacagatagccgggtggtcagtgttgtgacggctcctctgtggagctgtctgagcttctaggtgctgacaggtggggaggggcactgccagatcagggtcctcagctccccccaaccccctggacattgtcctgggactcaacatgtctgactggtgcccctgcccctgtgctggtcagattccattttctccagagcgcccccacatctggatcctggtcatgcaaagtcttggaggtgcccggggaggactccccaccctagggtgggtatcagggcctgtgggccaggcctgtgttggatgctggggatgcagagctgagccaggcataccccagcctcaggagcagggggctcagccagtccaggaggtgctggggacagagtcccatgggcggaggaggagagtcatctgtcaagttgccgggacgttagtgtccacggcggtttattgactggtatttcatttccttttgatgattctcaccatagccctgcggggtgagcagatggggaaactgagaaccagagaggatcagccagtgaattgggcagtcaggactgggtctccagcagtgtgcccagctctctaccccagcctcagggtcccagcatcccctctctggtcttccacagggtccaagggcgggcacgaggtctgagcaggcagactgggcagagtcctagcttcttctccaaaagggccacgtccttcttcagggaccatttcttccccatccggggtcttgagactcccaggggccatggaggggatttgagaggtctcctggctgatcctccggtgtgggcagatggcctcctttcagctaccctctgcttgtacatccctggccctggggaactcactgcctcacgggggaagtggggcagcttctccttcctggaggtgcagccggccccttggccctgtctgttctgaaggctcaaaggacagggctattccttgttttctgtgacaaacaacgtgggtctagcttttataagcttttactcttgaggggctcttctttaaggaaaataatacaaaatcatgaatacaagatgaagtgcagagccgtggggcttcagtggtttttgagtctctccgttgcccaggctggagtgcagtggtgcatcttggctcactgcaacctccgctcccgggttcaagcgattctcctgcctctcagcctcccgagtagctgggactacaggcgcccgccaccacacctggcgaatttttgtatttttaatagacggggtttcaccatgttgggcaggctggtctcaaactcctgacctcaagtgatccacctgcctcagcctcccaaagtgctgggattacaggcgcgagccaccatgtccagccggaaggaggtttctctctgtctgtctgggaggttgcaaaggaagggcccagaatttgggtttgcttaggcctcggtaaacccgcttcctcctgccacctcctgcgttcaggcgctctgcaggctgttctacgggagccctgcgtgtggccgctgcatctccccgcctctgacccctttgttcctaggtaagtccatggcctacatgcgcggcatgtactttcgcatgaaggatgaggtgttccggggctccaggccctacgagtcggggcccctggaggagttcctgaagcgggagtttggggagcacaccaagatgacggacgtcaggaaacccaagtaagccctggcgcactggggccgtggccgcagctgtgcccactgtggctgttccctggggacagagggctccctgtcctgctgagggagggggaagagcgccccacgcttgaggggagcagagggaacccccttcccagggaggcagagggctggggtgtggctctcacttgggcatgcagacacctgctgagcgcaggaggggcgtggcctggtgggcctggctctgccctgcctggctctgccctgcccggctctgccctgccggctctgccctgcctggctctgccctgcccggccaggggtctggggcttgcctggagagagcctgggccacccttctctgagaccacctgggcagaggctgggtttttgctgcccaggcaaaaggaacccactggcctttcaaatgacacggctaaacattttctcacatttcagacagcactcgctcccaggatcggactactaggttataatcagagggcttcagtcttacctttaatttaaggcctacaagacttgaactaatttaagtcagactgaaggagaaagtcacatttccaggaaacatttgtttgggaagcccaaatcctaggactaagcaatgcatcccgttcggggctggatgaatggtgtgttccaagaggagtgttttgagcatttctgagtgattttttcatattttgaaagtgagtgtcccccagtcttaggggcccggcatcccctctgcggtcttccctagggtccaaggccagggaccttcaatcttttttcccactctgtggcttgtctttctgctctgtggtgtttctaggtttttgttttttgttttttgttttggttttggttttggtggcccatgttcttaatgaggtagataatatttataaatatttttcttcttgtagtttgtgattttttcctttctttctttcttttttttgaaacagggtcttgctgtggggcccatgctggagtatattgctgtgaacacggcttactgcagcctcgacctcctgggttcaagcagtcctcccatctcagccgcctgagtgcctgggactactagcatgtgccaacacatgtattttttgtagagatggggtttcaccatgttgtccaggctagtcttgaactcctgagctgaggcgatcctcccgccttggtttcccattacaggcatcagccaccatgcccagcctagtttgtgctttttatttctcgttcataaacccctttgctgcccccaagcagcacacgattctcctgtgtcgagctggaaagctctctagatctgccttttacattgaggtcttttatcaacctggaattgatttttgtatgagggtgaaatccaagatccaatttaatgttttccacgtgattggccaatttttcccagccccatctgtgaagtctgtccttccctccgcttcctcagcagtgggtcaagcatccctctgctcttggatctgctccaggctgtgttttgttccactggttggaaagctgtctctgtgcccggaccacagagcataaaaaactaccgctgtgtggtgagtcctggtgtctgggtggcagatcctccaccttggccttcttcaaaaacatcatggctattcttgggggcagtagagagaagtggatacaagcatagaccctgaagtttctacctcttctcaaaaataggaatatgccaggcatggtggctcaagcctgtaatcccagctctttgggaggctgaggcaggaggatcacttgaggccaggaggtcgagaccagcctgggcaacatagtgagaccctcatctctacaaaaaatttaaaactaacaattagctgggcatggtggcactatggctgtagtcccagctaattgagaggctgaggtgggaggatcacttgagccccggaggctgaggctacagtgggctgtgatcccatcactgcactccagcctgggcaatagagtgagaccctgtcttaagacaaaaaaaaaaaaacaaaaacaaacaaactcacaaactataaaaagaaaaaatatttataaattctactccattaagaacatgggtccatccaaataaataaataaaacaaaaacaccataaagggagtaaaaagacaagccacagagtgggagaaaagatttcgaatccatacatccatcaaaggactcattttcaaaatatgaaaagatcattcagaaatgctcaaaatagtaaccaccattttactttctcttcctatgagtttaactgctccaggtactgttaagtaaaatttttaggggataattgatttggaccaggattctgtaccaggcccaacagaagaaacgaatatggagtcattcatgccaagtgaacctagttagcttaggcgtatacccatgtaacaaatagctgagttctggttagctacaacagctaagctttaatcaatcatagatggccacctgattcaaacaaggcaaaccaattaagctccacacctcactttggttttcagcccatcaacactgcctgaccacgttgcaggccagagttctttgaacctattctggttttgtggcctgcctgactctcagttcatcaataaaagccaattaacatctttaaatttgttgcaattttatctttgaccgtaccttatgtaagtggaatcatacagtatttgtctttttgtgactggcttatttctttctttttttttttttttgagatggagtcttgctctatcacccaggctggagtgcagtggcgcgatctcggctcactgcaatttctgcttcccaggttcaagtgattctcctgcctcagcctccggagtagctgggattataggcgtgcaccaccatgcccggctaattttttgtattttagtagagacagggtttcaccatgttggccaggccagtctcaaactcctaacctcgtgatccacccacctcggcctcccaaagtgctgggattacaggggtgagccaccgtgcccggccatgactggcttatttcacttggcatccatgttgtagcgtgtgtcagaatttccttcctttttaaggctgaaaaactccattgtctgttggatacacgttttgcttctccattcatccattgatggatattttagttgtaaattgactgctgtcaatgtcggatgtgcaaatacctgtttgaggcctactctctcttactggtgccttctctagagagaattctgatgggttcagtttgatcatattttgtttaagatttttggccaggcgcagtggctcacgcttgtaatcccagcactttgggaggccgaggtgggcggatcatgaggtcaggagatcaagaccacagtgaaaccccatctctactaaaaatacaaaaaattagccgggcgtggtggcgggcgcctgtagtcccagctactcagagaggctgaggcaggagaatggcgtgaacccgggaggcagatcttgcagtgagccgagattgcgccactgtactacagcctgggcaacagagtgagactccgtctcaaaaaaaagatttttgtgtccacgctcgtgggcgaacttgacccgttttttcctattttgggttttgaggaaatatttcctctttttatttttcttggaagagttagtataatagtttattttgaatttatggtagaacttgatagtaaattcttctaggcctggagtttgcttggtgggaggatttttgatgatggaattaatttctatagtggttgtgagactgaccactcggggtttctaaatacctttttgagttagttttggttaagtgaggtttttctaggaatgtgtccatttcatctaaatctttaagcttattggcttagagttgttcaaaatattctgtttttttttttttttttttttttttgagacggagtttcactcttatcgcccaggctggagtgcaatgacgtgatctcggctcactgcaacctctgcctcctgggttcaagcaattctcttgcttcagcctcccaagtagctgggattacaggcatgcgcaaccacacctaatttttgtattattagtagagacggggtttccccatgttggccaggctggtctcgaactcctgacctcaggtgatccacctgcctcggcctcccaaagtgctgggattacagacatgagccaccatgcccagccgattctcctttttctaacgtctgcagtgtgtgttggtgcggcccccttttctttcctgattttgataacagataacagccatgttttatcagtcttgcaacaggtttttccattggattagcctttcaaaaaaaccaacttttgctgaattgtgcccccaaggttggaccaatctgacactcctccagcactgccggagagagcctgttttgcggggatggtgcggggagaagcccacctatcccgaacagaggttggagtgggcactctgctacccaaggccctggggtgtgaattgtggggaaagggaaaggtggatgggcgggtggctcagccgtcctcctgcctcatttctctccagggtgatgctgacagggacactgtctgaccggcagccggctgaactccacctcttccggaactacgatgctccagaaactgtccgggagcctcgtttcaaccagaacgttaacctcaggcctccagctcagccctcaggtttaaaccatgtttgatgcatccatgggaagcgactggcccgagaggctgtggggtggtgggtgggagtcgtgcacttgccatcaggcaccctcaccgtgccaccagcccacccgctgcactggtctttattggctgaggacagggattgcgggggagctgtcaggcccctggcaggttagaaaagtccctggaaagtcctcagctgtacctgccttccaccaggacgaactagccagagagtgtggcttcgtgggtcctgcttctgaagagttcccagcctcccctcttcccgcacccccagcccccaacacgcacaccctgagatctggagtgcatgggttttatgccagtcccttgtgccactgggccgccctccttccccgcccctagaccagctggtgtggcgggcggcccgaagcagcggggcagctcctacttacttccgacccaatgggcgcttcctggacggtgggctgctggccaacaaccccacgctggatgccatgaccgagatccatgagtacaatcaggacctgatccgcaaggtgagtgccgtaggccagagggcctggacccactgctccctggagccaatcctgtgtcagcaaaccatgctagggaccgacccccaggacagcaggtggcttttacacacgcactcattcatatgtgcacacagggcaaattgatctcactggaacctgttccatgggtgggatctgcctgaagcactgtgctaagggggatctgaggaccactgtgctctaagtgtgcatgagtggggagggcggcatgcataccatgaacgtgccactcgagccagcctggggacaggacacatgcttgcccttgagctcacctctgtggatagacagtcccacaggaatgcctgtccccacgggttgccggtgctgtggtggaggaccgtgaggcctctgctaaaaggcctgggggctcggaaagggctccatggaacaggggacccatcctgaggcccttggggacagagcagtgcagaatcagtgatctggaggaagagcagcagccctctctctgcagaggtacagcagaggctggcaggacccagcatgctaggggaggccctgtggcgtggcgggcggtgggtgaccggggtgggcgagcgcggtggctgagctcagaccctggagccagggcgcctctgggggtccccgttctgcctgcactcactgcagctacctaatggggccatcatagcgcctgcctggggaggctgcgaggccttggcatgctgttgtctgtgaaatgttcacagcactgccgggagcctgagctgcatccttgctgctgtggtttcccgaagccccagggcgtcctgggcagcgcagcagaggctctgggcagacagagaagcgccctctaggggccagatcgggcagggcgggcttcctgcaggcggcagagaccgtcagactgtcagacactagccagtctaactctcctattgcgtgcggatggggagcctgggacccagagtgggaggcatcacccaagatcatccagcaaatcggcagcagagcttgttcggaagcaaataagagaggcagcggccgggcgcagcggctcacgcctgtaatcccagcactttgggaggccgaggcaagtggatcatgaggtcaggagatcgagaccatcctggctaacacggtgaaaccctgtctctactaaaaatacaaaaaaattagccaggcgggcatagtggcaggagcctgtagtcccagctactcgggatgctgaggcaggagaatggtgtgaacccaggaggcggagcttgcagtgagccgagatcgcgccactgcactccagactgggagacagagcgagactccgtctcaaaaaaaaaaaaaaaaaggcagcacccagggctcaggttcaagccttagcccctacttccctaccacgtggcccctgcagctgcttcccggcctgagcttcgctgagagccctcatttgcaaactgggtgatcagtgccctctccacagactggctggagattaaatgaagtaatgatgcaaatacctggcaaatcaccaacaccaaggaacaccgtctgcctttcctcccctggccacgacttgacttgggccagcatcagatggggtgggcgggatccttcttgcagctggtgtatgtgtggtcctgttggtacacagatgctgtcctgagcagatggcatgtgatgcccgcaccagccgttctggggtcacgtgcaagaggctggctggaaatcatgccaggcatgctcttgccaccagagacctcttgccctgttctcatgtgccccagagcccagtcttgggcctccccttgacgctccccttcgtgccccctacctgtggaaggtctcttctgactgcccctgtcctgttcccaacagggtcaggccaacaaggtgaagaaactctccatcgttgtctccctggggacagggaggtccccacaagtgcctgtgacctgtgtggatgtcttccgtcccagcaacccctgggagctggccaagactgtttttggggccaaggaactgggcaagatggtggtggactgtgtgagtgtgggcccctcccccaggccacttccctcagggtctgtagcccaggtcgatggcttcccctcatcctgtggggcctttggtgttggaggagacagcagggctctgtccatcgcctttagccagctggagggagagagagtccacagttcagagtctcagtgcggggcagggaccctcagtgaccaccagcaggggggttttcaaacgctttttagctgcggatccctttctgcaaacatagcgcagtgtagaagcccagaatggacaaaggctccagagcgggctgggcgctcaccctgtaatcccagcactttgggaggccaaggcaggcggaccacttgagcacagcagtttgagaccagcctgagcaatataatgagactttgtctctaccaaaaaattaaaaactagctggacatggtggtgtgtgcctgtggtcccagctactcaggaggctgaggtgggaggattgcttaagcccaagaggcagaggctgcagtgagctgtgatcatgccactgcactccagcctgagcaacagaaggagaccttgtctcaaaaagaaagaaagaaagagagagagagagagagaggagggagggagggaaacttcagggagaggggacatggaggcctgtcgactcagccgctaccctttcccccactcatcatccctgaaagggcactgctgagacctctgcccctctgattgcacagctgggacagtccctgcagtcccaggaaggggttttgcccgagccgctctgctgctgtgtggctcagcctgactcgaaagagcctggggctccccaggctggggctccgagagtgcagggcagggccgggcggggtgcgggccgggcggggtgtgggcccggcactcaccaaggctgcttctcaccagtgcacggatccagacgggcgggctgtggaccgggcacgggcctggtgcgagatggtcggcatccagtacttcaggtgagggctcagccgccccagcccttggccccgtgccctggcgtggtcggactcaccgaccttcccctcccagccctagtgtggactttcccttccccaagggtctgctctgttccccaagcccaccctggtcctagctggcgtcccctgcccagcctgagcatcctagggtgaccccctcctccctggcccgaacagattgaacccccagctggggacggacatcatgctggatgaggtcagtgacacagtgctggtcaacgccctctgggagaccgaggtctacatctatgagcaccgcgaggagttccagaagctcatccagctgctgctctcaccctgagggtccccagcctctcaccggccccagctgacctcgtccattcagcccctgccaggccaagcccagccactgccctcccgggcagatctgggcccaggcacctctgagtccatagaccaggcctgggagaatgccaagctgcctgcccgaggctggtcctgaaggcctgtctcccactaaccccgccttccagcactttctgtcattccaggctgggaaagtctagagccccctttggcccctttccctgactgtcaaggacaactgactcccccatcagctcaaacattaagggtacccgggcacaaccgtacccctgcccccagccccagcctccctgagggcctgccgggctgcctctgccccagcccccagcaagggcactcccaggcttcctggtgggtgca

SEQ ID NO: 15724 - DNA, 70332 bp, Homo sapiens
gtttgcggaagtaggaggaagtagaagtgctgagtaagccgaggtgagtgacctcgcgggtgggcggggcctgggggtccgttccccaacttcctcggcgctccggactcccaagtctccgccggaccctcctttggatattcctcgtgtctccgattctgaggcatgtcctccattaacccttatgtgactccctgagtgcccccaccttccatcttttcatccccctgcgtccccaattcccatcccgagaccgcccgtgtctcatctcgaacttgtggaccccagggaccccagcttcgaccctgagtttctcccctgaaccccagtctcctccgtgtgtctccctcagtatccctaacttcccgagtcaatccatctcttctctttccccgaccctcagtgcctctttaggccccattggccgtcctaattttccttcctgtgctcctctaagtgctcacttgattccccacttcacgtccgtctccacctttcgtggtgcctctactcatttctcactccctgcttctcctgcctttcctccctgctttttttccttgcctttcctctctcgcgtgcctccagacctgcccccgacatgctccctccttcccctcagcctggccaccccagagtctcccacccctaatcctgtgtccacctcctgctcccacagatgacttggaagctggtgacagggagcatgtgaccagggtgatcatgggactgggtcggggcaagcctgtgggtgtgggacagggagggcacagggcaaggggacctgtggccgtatttttaatgggctacccacatgaccccaacgaatacctccccctagcttctgggtctttccctcacctgcctcttacccgcccaacaggatgtcaggcaggttcggtttggcaacgttgaggctgcacccttgggctgaatgcattgtttttgaatgcattgtttttgttagagtttctgcctggagtttggaacctgttttctgtccaagtctcagtttcctcatctgtgacaggggaactgtacctcctgccctcgtaagtctgccatgaggttcaaaatttgaatgagaaaatgtagaaggtaaagctttataaccagtatggccctgtacaaatacatgattttactgttgggtcataggcagaattgaaaggagtggaaagggaaagggctagaatgagaagacaaggagagaaggatgagcaggaggtcccttgtctttcagtgtatcatttggcagtgtttgttcatcacctcttgtgagtcaggctcttctgtatatgttctcttcaccattcattcagtcatcgtttatctaacaaatatttacggactgtctgatgttctaggctacccttggtgtggccaatgatattctcacttcacatgagaaaaagagggcgcatgagttgcttgaggtcacaccgatgaggttgaagctggaatctgacaccagagcctgtgtgattgtcctgatgtgtaaggtttgctactgtttaggacacttcttgttccttccgtggattactttcttgttacatgagagactccccaaaagggagtttccctcttactcagcagaatgacatcactaagagatacagaaaggagaaatttaaatactctgtgtgtgtgtgtgtgtgtgtgtgtgtgtgtgtgtgtgtgtgtctgcagacatctattgggtgtgtgtgctgggggaagtaggtaggcaaggagtaaggggccgtagtgaagagtgtgttacaaacttcactttgtagagggtggctccctgggagaatatgttctgtgtctttcacagtggattttgatagggtcatgtcttaaatgcctcttctcgttttcggatggtgatctcatccagtcttatttctttaagtgccgtctctattctgtcagcccacaaatttatatccccagtccagtccagacctttccctggaatgacatactcaaatctagttgcttactcagcacctcaaacttaggcttttcaaacttgaagtatttatttattgatttatttattttttgagacagagtctcactctgtcacccaggctggaatgcaatggcacgatctcggctcactgcaacctccacctcctgattctcctgcctcagcctcccaagtagctgggattacaagcatgcgccatcatgcccaactaatttttgtatttttgtagaggcggggtttcaccgtgttggccaggctggtctcgaactcctgatctcaagtgatccacctgccttggcctcccaaagtggtgggattacaggtgtgagccaccgcgccaggcctcaaacttaagagtttagaattgagctcctgttagttctgccctccatccctgaccccactcttcaccaaaacatgtccctcccactctctttctcatcttaggacataggagtattgttcattcagttgctcaggtcaaagctgtgagattatctatgatgcctctctgtttcttaccccacacccagccagagtgatcttgttaaaatgttgtttctttgcagtggcctctcctctcatggcacatgcctggccccctgttgcctctctgatgtcactggcttccttgcttttcctggaactcgctaaacatgttccagccccatggcctttgcacacgctctctttgcctagctattcatatgactttcatctctctccatcaggtatttatttaagatcaatttcttggtgaagacttctctcctcacccaatctaaaatttcactctccacctcagcacttcctatccccattctctggtttttctcctcagtagttaattgtcatctaaaacctttgtaaatatttacctgtttatcttctttattattagtagctctgtctaaaatataagttccaggatgtcagggattttgtggggttttttttggttggttggttgttttggttttgagacagggtctcactctgttgcccaggctggagcgcagtggtgcgatctcagctcactgcagcctccgcctcctgggtttgagtgattctcccacctcagtctcccaggaagctggaattacaggtgcacgccaccacacccagctaatttttgtattttttggtagagatggggtttcactatgttggccaggccggtcttgaactcttgacctcaagtgatccacccgcctcggcctcccaaagttctgggattactggtgtgagccaccgcgcccggccttgttttgttttaagacagggtctcactgtcgctcaggctggattgcagtggcacaatcacagctcactgcagcctcgacctgctagacttaagcaatccccccacctcagccaccttagtagctgggacttacaggcatgagagataccatgcctgggtaattgttaagtttttgtagaggtgaggtctcactatattacccaggctggtctcaaagtcctgagcttaagtgatcctccttccttggcctcctaaagtgctgggattacaggagtgaactgccgtgcctgaccagtctgttttgtttacgattgtatcctcagcggttagaacaatgcctgccacaatccatctcagtaaatatttgtggagtgagtcataacatgggccacactgtaccgtgccaccagcccaaagatctcttaaagtcacccctgtctcatgtgcttgggagctccagtgacagtttcggggcagtttgcttccagctgtggtccagccaagcggagtgaatgaaagagatgctttttccttttgtgaaaggacgttttgctctggctcacgtgagcagcagtgcattttgagacgagggccttggcttttggaatctaagagcctgttgagcaagcctcgctcagccaccttctttcagctttctcctgaaggcagtttgaggattaagagcctgatgctctggattccacctaattgggttcagatcctggcaaactgtgtaacctgtgccccagtttcctgtgtaatgtggagagacctggaccttttcttacaggtgtttggagggttaaatgtggcaattcggccgggcgcagtggctcatgcctgtaaccccagcactttgggaggtggaggtgggcggatcaccggaggtcaggagttcaagaccagcctggttaacatggtgaaaccccgtttctactaaaaatacaaaaaattagccgagtgtggtggtgcgcgcctgtaatcccagctagtctggagactgaggcaggagaatcgcttgaacccgggaggcagaggttgcagtgagccaagatcacgccattgcactccagcttgggcaacaagagtgaaactctgtctcaaaaaaaaaaaaaaaaaaaaagtggcaatttacccgaaactgtggtgaagcgtctggcgccctgtgggtgctgggcagcagtgggtgctgatggggtgtgaggggatgggatcaagccctttcccactaacttaggaaagaggttggaatgagctggggtcagagggaacatttgcggggacattttgccgggaggctgccttggaggttcagaggctcagatgacccctgtgttcattcagtgttttctcacccacagattgagcacctgctgtgtggccagccctttgcctagtgctgttcaagagtcagaggacataggcaggcaatcccccaccacaacctgccaccccatttcctctcttggggccttgatttctccacatgccaaacagggagaatgattgcaccttccttgtttctttttttttttttttgagacagtctcactttgtcatccaagctttagtgcagtggcatgatctcggctcactgcagcctctgcctctcgggttcaaagattctcctgcttcagcctcccaagtagctgtgattataggcacccaccatcacgccaggctaattttttttgtagttttagtagagatggggtttttttctcacacgttggccaggctggtcttgaacttctgacctcaggtgatctgcccatctcaccctcccaaagtgctgggattacaggtgtgagccaccgcgcccggctgcgccttccctgtttctttgtgagcttggaggtggatcacaagtgtgaaaccctttgccaaccgtgaggcatggtggccttgtgagaggacggaggccggtgtgtggtggcatgctcccgtgctgtgtggcacagacggagctacaggaaggaagttggggcagcttggcactctgagtggaccctgagtttccagcctgctctgtcttgactgggtgggaggagggtgctcaggagggtgtcactgctgccaggttctgctgccaggaccatccaacagttgttccaatcatgggacatcctgtcgtcagcagctggggctcgtgaggcctgatttccacctcgggcagttctgtgtgtgctcctggaatcccccacgtggccaagcctgtgaggtctgcttcctggcctgctgcctgtgggttcctgtcacgcacctctcgggcagctgtccggctcctctgctctcggcttagtcaagaaggaagcagaaggcttggagtctttcctgcttggactaggagtgagctcagcctaagtgccctgactatatataaagctgaactttccagaccgaagcctggggatggatcagtccgatcacttagggccgctcctgaaggagtgcaggtgctagatacaggttctcccggtggaggagcgaaccccttgtgggccgttagctactggtgggatttgagcatggtatttccctatccgttgtggagaggagcatggcagctcagagtgggtgggaacagtgtgtggtccctgttatcaccttcaagggaataaagtgtgtctgggggcttcagaggtgctggccccatgggcttataggtggttcattcattcattctcattcattcattcaccaaacttattaaacacccactgtgagtcaggaacatcatgccaggtgcttagggaaacaaatcaaagcgggttgggtgagcagcccaagccaacagatgcacccccattctcacatggtgtgtgttcctgtgggctgggccctgggtggtgtggggtgctggggagaagaggaaggcacaccaggctgcagggcggaggtgcgggtatgaattttcagaggagatggcacctgagctgtatcttcatggataagaagagatttgttcatttgtcctttgtggagcacacattcaggttaagaaagtggggaggatgggctacgctgatggagcgtatgtgtggtatccccaagtgcactgagacacgagtttgacgtgttctgggaagatcgatggtgcggcgtggctggagtagaggtgagggatgagttggaggggtgagttgggccagctctcatggatgctggagtctgggctttccctgggaggtcatggggcgccactggccagggtcagcagggagacctgcagctggatttgcatcgtacagtgggcatggaggggtgtcaggctgggttgggaaccgtgcaggctggaagggcactctggtgctctgagcattcagagggggcagctgggccttgaaggatgagcaggggctccagcaggaactggagagcgcattccagggaggacgcaagtgcaggcccctttcactacagaaaagcagttttcacacagaccttccaaaggggaggagaggggactgcctgggcctggcagctgcggcaggtagcagcaatcagagggcagggaccgctcctcccgtgcctgagacctgcccagggtccttcagggaattcgtagctgaggaggaaccagatttttgggactgagttctccctcaccacccgctctgagccaccctcttggtcccttgtcctctactgcacttcttccggggcttggctcctcgtcatgagaggagcttccctgggcatggcgaggggcgtgactgacatagcagccctggacaagtggctccaggtgacctgtgttcacgttgatcacagcactaaccacggcccctcctctcagcaccttcccctctcgagccgtccagtcccagtgaaaatgctcaccgttcatgggtgggctgagcaagcccctgatctctgccttcctccgtgttctgatctgcttcatctgctgtgaaggcctctcgccatttcccccgctggcaaactcctgttcttcctggaaagttcagctaaaaagtcatcccctttaggggtccttccctcaggggaccgtgcacttggcgagacagggactggtcttgggtctctctgttgactgttttatgaacccaggtagtcacttccagggaactcatcagagatgctaccattggctccaatctccctctgttcccactcgaggttttttgtttcttcgtttgtttttctttctttctttttttttgagacagagtctcgctctcgcccaggctggagtgcagtgacatgatctcggctcactgcaagctccgcctcccgggttcacgccattctcctgcctcagcctcccgaatagctgggactacaggcacccgccaccacgcccagctaattttttttgtatttttagtagagacggggtttcaccatgttagccaggatggtctcaatctcctgatttcgtgatccgcccgccttaacctcccaaagtgctgggattacaggcgtgagccactgcgcccagcccgtttgtttttgttttttggtggacatcaactttaatttgccctttgttttgttttgtttttgaggcagggtcttgctctgtctcccaggctggagtgcagtagtgcaatcttggctcactgcagtctcgacctcaagaggatcaagcaatcctcttgccttagcctcccgagtagctgggaccacaggcgcacaccaccatgcccagctaattttattttatattttgtagagacagggttttgccatgttccccaggctggtctcaaattcctgggctcaagcaatccgtctgcctcagcctcccaaaatgctggaattacaggcacgagccactgtgcccggccttaatttgccctttgaacatgtacaattcagggcctctctgggcctcagtttcttgatctctgagatgggaagatgggataataatacttgttcctcccgtccttcagctcctccaggggaccctcacaccagcacactctctgtcagtcttccctcaatgaacccagcaggcaagcttggttttgacagaggatgggtgagcagagataaggaaaacggccagaaatatctggcttccctcagcaggggcaccaaaattggtacctggaaattgcctggcttggacaggcagaattgtcactgtcaacccccaccaccaaaggtcttgggtctttgtctttctgcttgtggtgtttgagagagctgcttgacacagccgaggtgcggtctgtgtcaggtgacctgggcatcctgggggtgcagggagaagcccaggtaaggaggaggaggggccggtcatcagtggggaaaagtgattgtctaccccacgggaaggtcaagggtaggacgctgtgagaagccagggggagagatgaagtgaggcatgatgcggggggccctcatccaccatccccctcttgcagctgtgctgggaagagcctaggctccagggtccaaggtggcagggacagaaggaagcacgtgtgagcactttctccctgctggcccgccttcctggttggcaatgccgtgagtgttccaggatgtggccccgtggctgtcatttcctttcttccacctagtgataacaatggccactgtttgtgtgcccacagtcggcctgtgtcccagacaccttccctccattgcgtcatctcgtcctcctgcctaccctgaaggctggatgccagccaagcctgtcgtttctgtggccatgctgtcgtgggtgtgtggggggcatcccctagccccaggctctggtggggggtacacaggctgggccattgacgaaggggtgtgtggaatctttctttgatttcactgcacccctggtgactttctccctcaatctgaggctcatgggtgctggatgctcttgactctctgcccttcctgggcgcacccctccgcgtccctgtgggcccgtcctcggggtagcctctctgcgctcttccaggccaggcctgagtcccacaggtccccatcttcccggctgcagcccccagaggctcagcctatactgctacttcctttgaaaactataatcgctttacatagcatctggaaaatagggaaaaggaaaaaacaaaagcccataaacccagcaccctcatctactcaatggcatgttttctgtcagtctatcttggtttgttttctatcaggctttgttttttctatgcataatatttactcagttaaatttttgttttgacaaactttctgtgagccaagcttgtggacggagatgaaaagacgagcagctgcctttgagaaactcagactctgggccagcccatctgggtgccagctttcactgctccacccactagctgggtgaccctgggcccgtgactttacccctctgttctttggtgttctcatatgtaaaatgaggataataatagtaaccagttcatagagtggttgtcagacagaatgattaatgtacgtaaagctttcaggatggtgccagcaagatgcacaggagtgtttggtaggaggatgacgaagcttaccgtctggcaggaggggcagttgtaacatgctgggctgtgatagtacagatgtgtttaaagtgagggagagcccagagcaaggagagagaacctggcatctggtgatggtgtatcaagaacattttaggccagacacggtgactcacacctgtaatcccagcactttgagaggctgaggcaggcagatcgcttgaacccgggcgttcgagaccagcctgagcaacgtggtaagaccctgtctttataatttttttttttttttttctgagacggagtcttcactctgtcacctaggctggagtgcggtggtgctatcttggctcactgcaacctccacctcccgggctcaagtgattctcctgcctcagtctcccaagtagctgggattataggtgcccaccaccatgcccagctaatttttttatatttttagtagagacggagtttcaccatgttggtcaggctggtctcaaattcctgacctcaagtgatctgccctcctcagcctcccagagtgctgggattacgggcatgagccaccatgcctggcctctataaaaattgtttggaagaaattacctaggcctggtgatacacacctgtagtcctagctactcaggaggctgaggtggaaggaggtagaggctgcagtgagccatgattgagccactgtactccagcctgggcaacagagccagaccctgtttcaaaacaacaacaacaaaaacatttttaaggaggaggctgagaaccacgagaaccaagcttggatttgaagaaggatcagggctttctcagacagaaaaggagaggaagaacattccagatagacatcattgagagatggcactgagccttgtaatgggacactgcgaacttttcttcagttgttatgatctttttttttttttttttgagacggagtttcgctcttgttgcccaggctggagtgcaatggcgccatctcagctcaccgcaacctccgcctcccaggttcaagcgattcttctgcctcagcctcccaagtagctgggattacaggcatgcgccaccatgcctggctaattttttgtatttttagtagagacggggtttctccatgttggtcaggctggtctcaaactcctgacctcaggtgatccgcccgagtcggcctcccaaagtgctgggattacaggcgtgaaccaccgtgccttgttggtataattattagtattgatcttttttccttttcatgtgcctcttagtgggccccttgcttttgtcttccttctgtccccagggttgatcctgtgctcagcacataggccagggaagaatgtggctgtgacccagtgtccactcagatgtcctctctcccccagggcacccatactctgtccttagtgtcttttgtctggtgacatcttggcacagaggcagagggcggcctccgtctgattggcgcctggctttggtgacagtaccttaggaaggcagtgtattttctgggaacctaggaaataacaaggtatctaattccatcatcaacactggggacaatttccatggcagaaactatgactctgaatatgcagcgtaaagttaccacccagacactgctgctcctgagtctcgaatggcatcttctgcaggggctcccccacctgcccctgcagaaggtgcagttcgttcatttccaaggagcttgcttttgtgtgctgtctctcggagctctttgggaaacctgtggtagcaggaaacaaaggatttagaccaatgccgatgatccccttgctccgatagagtgtgacatgatgctggtcaccttttggtatctaggaggggggacattgattttgtttgcggaagtgaaatgatccatgctggcctctttttttttttttttttttgagacagagtcaccctatcgcccaggctggagtgcagtggcgcgatctcagctcactgcaacctctgcctcccgggttcaagtgattctcctgcctcagcttcccgggcagctgggactacaggcgcctgccaccacatctggctaatttttgtatttttagtagaggcagggtttcgccatgttggccaggctggtctcgaatttctgacctcaaatgatccgcccgcctcagcctctcgaagtgctgggattacatgcctgagccactgtgtctggtccatactagcctctttgagtgctgaaaggttatctctgtaacttatttagtgagaaccctccatttgcccagggcattactgcctataatgtatgttcacatgtgctatctcctttggtcaataccacacactacaggtgaggaaactgagtctctgctgggacactgggtcaggaagcaggcagttaaggtcacctgtgcacagtggcagcacagggggacagccttctaggtagccagcctggcctgagggttctgtcacttttacctcccactcagtgttgtttctctttctttcccctccttttaagatccctccaggcccaggatctggggacaacgctggtggggagtgatctgggtgtctgtgcaggaaaccgctgcactgggtgagatgggcatgggagactgtgcctggctgaccagagacctcgttttcttccagacagagggggaagacggtggggcctccccacctgccccgcagaagatgcagttctttggccgcctggtcaataccttcagtggcgtcaccaacttgttctctaacccattccgggtgaaggaggtggctgtggccgactacacctcgagtgaccgagttcgggaggaagggcagctgattctgttccagaacactcccaaccgcacctgggactgcgtcctggtcaaccccaggaactcacagagtggattccggtgggtgatgctcagcgggaacatacttctctcctttcactcccccacgtctcggattggaggtcttattggccgagaagcagtttctttgagtctctgtctgaggggtctggagaggggtgggagagaggggagactgtactcttggaccagagggaagggcttccgagactccacacttctggcccatcagtgtcccagcacgaggctgaggatggaagcctgggttgtttctggcctggaggctcgacctatatggacaaagggaagaaggaaggacagggagactgagagtgtccacatcagataaggcccatggggagaacctttagccctggctctttatttttggttttggtttttgttttttgagacagtcttgctctgttgcccaggctggagtgcagtggcgcaatctcggctcactgcaacctctgcctcccaggttcaagcgattctcctgcctcagcctcctgagtagctgggattacaggcacccaccaccacgcccagctgatttttgtatttttagcagagacggggtttcatcatattggccaggctggtctcaaactcctgacctcaggtgatctgcccaccttggcctcccaaagtgctgggattgcaggcgtgagccactgcacctggcctagccctggctctttaagggcatggccgttctcataggggctgcccagggtttgcttaggaaggctggacagagctgttgcctcttggggcatgctgggactcccctgggcctgaagagaaggctcaaaagccaggacaggcctgagggaaccgggccaacggcagagctggttgggaaaaggggagaagcagccaaggttccaaatgcaggccccagcagtgcttggcagactggcatctagttgggctcagacagatatccctgtttccgctcacctatccatctggctgtcctgtcagccatccattcaacatgcaccaagcacctccagtgtctccagagtcctgggcttcgggccagtcctggctggcctgtgagatgacaaacatgtcctgtgtctttaaggaacgtacagtctggtgggggaggtccggtgcaaacaggcgtcatagcaccccttgaggagtgctgtgacagagggagagcctaggaaacagtgtggatcacaaggaggtgattgagagctactctgcgtctggaagagtgaggaggagcctgtgtggcagaacaaaatggataaggtcgttccagccgtgcagaagtgtggaggtgtgagcctgcaggcaggtggctctggttggatcccaggtgcatgcagggctttggtgagagtgaggctgaaggaagcagctggggactcattctgactaaagaggcatggcaggaggggtctctgaaagtgtcaggctgggggccaggggctgccaccaacagaagagcaaggcaggtatcagggccccatccaatcaggtgagaattcagagcctggctccacaaggaacctgaggcagaggcacccacagcaggtgcttgggctaaatgcagctcagtggccagtgcaggcaccagttttaatacagtggggccattccagattctgagtgcagatggggctgagcagaccgccttccagctggactcgatcaggactgaccctggacggggcaggcttgcacttgtagcttcagagctccactgcaggcacagctgaccagggcagcgggtccactccttggagagctggacagccccacttttgaggtacacggccctggggataccactaatctccacgtaccaataatcaccaagttctgtcagttgtaaaatcccttgacaggattccagatttgtctcagccagcttaagccccagtgtgggcagacctccatcccaggaggatttagtcctttgtcagcagcttcttagctacacgtaagctattctgtggtactttatagtttacaggattttttgttttcttttttttttttttttgagacagagtctcgctctgtcacccaggctggagtacagtgacgcgatctcggcttactgcaagctccgcctcccaggttcacgccattctcctgcctcagcctcccaagtagctgggactacaggcacccgccaccacgcctggctaatattttgtatttttagtagagatggggtttcaccatgttagccaggatggtctcaatctcctgacctcgtgatccgcctgcctcggcctcccaaagtgctgggattacaattttacaggatgtttttaagtatgttgggttagcacattctctgccaatccgtggaggtgggcaaggaaggcagtattccattttatgcatgagaaaatagccttgggatgataagtgattcatcccacttatacacaggaagcagtgaagaaacagaatcagtgtcttctggttcccaattcatttctctgtgctgctgtgttgtttccatgtatgtatgtatgtatttatttttttgagacgttaagtcttgctctgttgcccaggctggagtgcagtggcatgatcttggcttacagcaacctctgcctcctgggttcaagctattcttctgcctcagcctcccgagtagctgagactacaggtgcgtgccaccatacctggctaatttttgtgttttttagtagagacagggtttcactgtgttagccaggatggtcttgaactcctgacctcgtgatctgcctgccttggcctcccaaagtgctgggattacaggcatgagtcaccatgcccggctttgtttgtcttatttctaaattttattgatttatttattttcacagtcatagctctggagtcttttttatcttctcccctctaacctgctcccacccgaacctttccatttcagcagatagcatcattgcaacgggctgtgccagatccagccatcacatccacctttccagccaaagggagggtggaagggcaggatgcagaaggtcaatctccccctcctcagggacatttcatggaagttgcacgcattggccagaacccggtcacatggccacagctaactgcaaaggatgctgggaagtgttgcctgtgttgcagacagccacgtgccagtcgaaaatcagaggttctttctccctccgtcttgctgctggctcgcttctccagaccacagtcattgtgcacgtgtctcctgctgctccggctgtggcctgcactcctctcatcctcttccaagctgctgtcacagcgctgtttccagagggcaaatctgattggtcactcccctgctttactccccaagggcttcctgttttcttttatttttatttttattttcattttttgagatggagtctcgctctgtcgctcaggctggagtgcagtggcacaatgtcagctcactgcaagatctgcctcctgggttcatgccattctcctgcctcagcctcccaagtagctgggactacaggcgcccgccaccacgcccagttaattttttttgtatttttagtagagacggggtttcaccatctactcttagccaggatggtctcgatctcctgaccttgtgatctgcccgcctcagcctcccaaagtgctgggattacaggagtgagccaccgcgcccggccagcttcctgttttcttaacacatcaggtgcttaatgacttaaaagggcccagtgtgatcaagtttctgcctctgtgttctcagctcatgccgccttgtgctcctggcctttgcccaggctcttgctgtggcctggaatactcccctttctttgcctgccttccttcctcttgccctcccctgacctgcaggctggattaggagtttctgctgggcatcccatggcacccgtccctgcactggggatcctgctttcctggtaggccacagaccttgtgaggggagggactgtgtctgttgggttcatgacagtgtgcccagcccccagcaggtgcctggcgtagatcaggtttgtggaacaaatgaatgtgatatattaatttagctttagagtattcattgagggctgctgtgtgccaggccctctgtgccacctgggtggagggtggaggactgttgcattgagggcagttgaaggagtgagctgggaagtgggaggtggaggatggggactgggatgcagggtttgaggttatcaggggtcccagaagcagtaatgccaaggcctaggctgtgacctggagtgagggctgcgatggggtggggtggggtcgaggctgtggaggagggtcatcagggcactgctggagccctggggttctccagggccgggggtggtcattgcagtgttctcccagctcctctcaacaccctgcggtctgtggagagcaggcctggtgcactggacttgcctctggccagggctgagtttctgccttctaaacgatcttcctcctgtgttgccctagaggcctctggactgtcctgagtacttgacgcgtgttagagtgagcatgggctgctagccttccgctccaggtggaggagtttctgttgttcttttgctgctgttgctgcagtgagctgccaggctgagcttctggatggacctgggggatggaattaggagcttctgaattcttgggttgtataacctaaggccggagagtcccacagcactgctgctgggcggagagactggaccctgctgatacagacagcgacagcagcaggagcatctgcagtttcccagcaggtcctgcatgcctgggcttggcactagtctaagtagtaactcatgttatcctcacgacagtcccacgaggtggggtcattactgacctcctattacagatgaggaaacagaggcttgcagaatttgagatcacacagctggtcagcgtagcgattattcagaccctgtcacctggctccagaacccactcgtttacctttcttacatcagggctgctttgtagtgtggcgagctgagtggagctccacccgcctgggctgatcctggcccttcctgcctgacctatggtgcgggggccctggctctccccgtgtgagcccccaggggtcacttgtaatatgcctgtgtacactatgatagcatagatacttctgttcctggtacagattaatcatttacggctggcattgacttgtaacagatgacatttgatgaaatcaaccagcctctcactggtatctcagcagaaacagggctgtacctcccaggcatcctgggaaggatgatagaagtgtgtgatctgtgcttccctaccgggagctgacttttgaggctctctggactgggactttgccataaaactgcttatcagaaacctcagataagtggagtgccctgtgtcctggccacgtactctggggccagctcctccatccattcagtcctcccacatcccatcttcaccaagcagagtggaaagcggcaggtctctgcgagaaaaggaggctctgtacccagccttcagtgagataactttagagtggggccttgtattccctacacaggccttgtccccgacacggcctctttgcccttgcttctccttctgctaagaatgctccttcccaactccttggctggacacacggctcctgctctgtgggcctgtcctgttcccactcagagcctcagcaccccccatgtggccaagacacagcccctcttgccttaggttgccgtgggtctgtttccacatctgtttcccctccagactgcagggctcctgagggacagggcctggggccaagtctcctctgcgttcctgatgcctggtggtgtgccacgctctccgtgggtgcacggtaaatatctgccgagtggctagatgtatccatggttgctgaaggccaagtgtgttgaccagagggcgtgggaaaggctccactggggtggctggggtagagatagaccttaaggggtccagaagactccaccagctggagggaaaggccctacagagacaaggtactaggaaaggcccagaggacagaggaggggccctgtggggagcctgtgggcaggaagggcctgtgctgggctttgaaactggggactcaggtactgctctagcgtgagggtccttggcattttttttggtccaggaccccctgaggtccctggggaatgagaacaggctcacacagccactttcaagaggtttgcaggtcccctgaggcttagccacagacccctcccaccccagcagagacacagcagaggcttctgagtggaggccaggtggcttcagcctggggttctagaagggagggaagagacacacccccgtgtgtcctccagagcctcagccttctccctgaatctcccctttgcctcctcactgtaacccacacctggctctccttgaaggacccgcttgccccgcagcctcctgagagttttctctcccagtccctctcccactgggcctggaggtggggtagggtcctccttgcccccagccttgaatcttctgtcaccctacaataccacttgctgtcaccccggtgataggtatctacgagcctggggtgctcccccacatcctcaaagatgtgagcccctgactcagcgttgcctctggttcctgaccctccacattcacatgaccacgcgctggcctttatcatcgccagtgacagcagctctcccgtaaatacaagtttcaagcaccccactttccagtctctgccttctgtctttccagttcattccctctagtcctccacccacacagtgcttttccccattgacagggaattgctcctggccgcttttcccagccccatcccgttcatgtgccttgctttgtacccagcatggactccatggcctgtcattgtcactccttcacctatacttcctgcctccttgcttctctctctcttcgtcatcctggcatcaccaccccagaactgcttggtttcagttctccaccatggctaggggaacatacctttttgctgactgctctcactttctttttttttttttttcttttttttttttttgacacagagtctcgctctgttgcccaggctggagtgcagtggcacactctcagctcactgcaacctccacctccggggttcaagcagttctctctgcctcagcctcctgagtagctggtattataggcacccgccaccacacccggctaatttttgtattttttttagtacagacagggttttgccatggtggccaggctggtcttgaactcctgacctcaggtgatatgcctgccttggcctcccaaagtgctgggattacaggcatgaaccaccctgcccggccctattgctctcactttgaaatcacgacatgagccacagtgagcctatgatgtggtttgacgtctttctgcatttctctgttcacccctctcccagaaggcatgcctccttccctcccctcagcctgcagccccttcccctccacgcttactctcagctgatagccctgctgctgtctcgctgagaaaatagaaatagccagaggagaattccctctaccccatgcacacacctctgtccccgcctactccacattccctgttgtcagcaccgatgtgtttagctgagggtggtccccccattcaaggccatcatctcctgtcatctacttcttgacaccatttgaacaattatctcccctctttcctacataacactttccccttttctactatatattttttgctatggattgaaagtatccccccgaaatcatatgttgaagccccaatccctcgtgtgatggtattaggaggtagagcactatgggggtgattaggtcatgaggatggagccctcatgaatgggattagtgcccttagacgaagaggcaagaaagagatgatctgtctctgccatgtgagggcacaacgagaagatagccatctgcaaaccaggaagtgaaccctcatcaggaactctatcagccagcaccttgatcatagacttcctagcctctagaactgtgagaaataaaggttgtttaagcctcccagtctgtagttttctgttataatgtcctgacctaagttattttccatcgctatacaatgggttatttttttctttaaaaaaaaattatttcttgactctactttttcctccagagactgcttatattccactgtcttcattcttctcctcctgttttctctctttaaacttttcaaaaatagcaaaatataacacatatagagaaaatgatatacagctcagtgatttatcacaaacacctgtgtaaccaccactcgaatctagagataggacattacagcaccccagaagccctccttttgtcccctcttcccaaagaagggtaaccaataacttgccttttatgataaaggctttttttttttgagatggagtctcactgtgttgcccaggttggagtgcggtggcgcaatctctgcttactgcaagctctgcctcctgggttcacgccattctcctgcctcagcctcctgagtagctgggactacaggtgcccgccaccacgcccggctaattttttgtattttagtagagacgaggtttcaccgtgttagccaggatggtcttgatctcctgacctcgtgatccacctgcctcagcctcccaaagtgctgggattacaggcgtgagccaccgcccccggccaagataaaggcttttctatctggcttctttgttagcattttgttggcgagattgatacgttttgtgtgcagctgtctgtcattttcattgcaatagaattccattgtctactatatcacagttactcattctactactgatgaaaatttgggttatttctagtttttttggtgcatacatgcatacatttctggtagacatacctagaagtgaactggctgcattatgggccataacttgtcttcaacgttagtaaataataccgcccgtctgttttccaagcagcagtaaatggcactttctgttacttcatatcttctgttacttggtactgtcaggttttaaaattttagtcattctgtcgggtgtctagtagtatgttattgtggttttattttgcatttgcctgattgcaaatgaagttgagcactttttgatacagtgattaaccatttggatatcctcttcagtgaagtatcagctcaattctcttgactatttaaaaaataaagttgtttatctttttcttacagagttttaggaggagttttttggtacatgtgcagtccaaatacacaccttttgtcagtgatacgtgttcagctgcacacacggtgttttgcctttttattcttttaatggtatctattgataaacatgagttcttagttttaatgaagtcaaatttgttcatcttctttacggtgtactttttgtgtcttgtttaaggaagtccttctctatcttaaagctttgagaagcattccttctttctcctattttctaaaaattgttgaagatctccttccttccttccttccttccttccttccttcctttcatctatctctctctcacccaggccaaacttcagtggcatgatcatggctcactgcagcctcaacttcccaggctcaagtgatcctcctgcctcagcctcctgagtagccaggactacaggcacgcaccaccatacctggctaattttaaaaattttttgtagagacacggtctcatcaagttacccaggctggtcttgaactcctgggctcaaacaatcctcccacctcagcctcccaaagtgctgggattacaggcatgagtcacatgtctagcctgtattctttctttcttaaatgtttggaagaattcatgggtaaaaccatgtgaccctggagtttatttgtgggaagcttttaaaacatggattcgatttctttaacaaatataggactatgagattttcatctcatgtcggtttgggtatgttgtgttttcaaggaatttttctattttatcgaagttgtcaaatttgtctgcaggtccccttatttcctttttaatgtatggaggatctgaagggatggtactttgtgttgtctctatttcttgtttggttttgctagtgatttgccaatttaaaaaatctttccaaagaaccaacttttggctttgtttattttttgaaaacctgagtagctgggattacaggcgcccaccaccacacccggctaatttttttatttttagtagaggtggggtttcaccatattggccaggctggtctcgaactcctgacctcagatgatccacccgcctcggcctcccaaagtgctgggattacaagtgtgagccagtgtgcctggcaagccgctttttaaatggcaccaatcccattcatgagggcagagccctgatgatcgaattacctcctaatggccccatttcttaatactatcacactgagaattaagttttaacataagaattttaggaagacacaaacattcagaccatggaacatatataaaacagttgtcctaccaactaacagaatacacattcttttcaagaacacctatataaaaattatagacactgacctatgctggccataaagcaaatatgaacaaatttcagatacctgaagagatttagactatgttctccaactacagtgcaattaagctagaaatcaatagcaaaaatgtaactataaatgagcccgtatgtttgaattttaagcaagatatatgtaaattatctatggttcaaaaaagaagtcacagtgaaatttagaaaatatcttgacgtggcgggttgcagtggctcacgcctgtaatcccagcactgtgggaggccaaggcgggtggatcacctgaggtaaggagtttgagaccagcctggccaacatggtgaaaccctgtctctactaaaaatacaaaacattagccaggcgtggtggtgggcacctgtggtcacagctacttgggaggctgaagcgggagaatcacttgaacccgggaggcagaggttgcagtgagccgagattgcaccactgcactccagcctgggcaacatgagtgaaacttcatctcaaaaaaaaaaaaaaaagaaaagaaaaagaaaatatcttgacccaatgatgatgcaaatactacgtatcaaacttgtaggatgaacttccacttctggccatgacagaggagcctgtatcagactagccttcctatttatatatttatttttgagatggggtgtcgctctgttgcccaggctggagtgcggtggtgcaatctcagctcactgcaacctccacctcctgagttcaagtaattctcctgtcccagccttccaagtagctggaattacaggcgcccaccaccacacccagctagttttttatatttttagtagagacggggtttcaccatgttggccaggctggtctcgacacctgacctcaggtgatccacctgcccctgcctcccaaagtgccgggattacaggtgtgagccactgcgcctggccgtgagtgacctttttaatgtgttgttgaatttgatttgctggtattttgttgagaagttttgcatcaatatccatcagggatactggcctgtagttttctttttttatatgtctttgtctggttttggtgtcagggcaatactggcctcatagaatgagtttggaagttttctctcctctgtttttcataatagtttgagtagggttggtattagtttttgtttaaatgtttggtaaaattaagcagtgaagccactgggtcccaggcttttctttgctgggagacttttcattacagctttgatctcattacttgttattggtctatttaggttttggatttcttcacggttccatcttggtaggttgtgtatgcctaggaatttatccatttcttctagggttttcaatttattggcatataattgttcacagtaacctctaataatcctttgagtttctgtgatattggttgtaatatctcttttgtcatttctgatttttttgtttgggttttctctctttttttgttagtctagttaaagatttattgattttgtttatcttttcaaaaaactttattttgttgatcttttgtattgttttgtttcaatttcatttatttctgctatgatctttattatttcttttcttctactaattttgggtttggtttgctcttttctagttctttaagagacatcattagattattttgaagtttttctacttacttgatgtaggtgcttataggtacaactttcctcttagtacttctttccctgtatctcacaggttttgatatgttgtgtttccattatcatttgtttcaggatgtttttaaatttccttcttaatttcttcattgaccattcaagagcatattatttcatttccatgtgttcgtatggtgtgcaaaataccttgtttttgatttgtagttttatttcattgtgatcacagaagatacttgatatgatttcaaatttaaaaagtaatttggctgggagaagtggctcatgcttgtaatcccagcgctttgggaggccgaggcaggcagatcacgaggtcaggagatcgagaccatcctggctaacacagtgaaaccccgtctctactaaaaatacaaaaaattagccaggcatggtggcaggtgcctgtagtcccagctactcaggaggctgaggcaggagaatggtgtgaacccgggaggcagagctggtagtgagccgagatcgcgccgctgcactccagcctgggtgacagagcaagactctgtctcaaaaaaaaaataataacaataataataatttaagacttgttttgtggcctaccatatggtctatccttgagaatgatccatatgctgaggagaagaatgtgtattctgcagccgttggatgaaatgttctgtaaatatctaataggttcatctgatctatactgcagactaaggctggtgtttctttgttgattttctgtctggatgaactgtctaatgctgaaagtggagtattgaagtctccagctattattgtattgaggtctatctctctctttagctctaagaatacttcctttatatatctgggtgttccagtgttgagtgcatatgtatttaaaattgttacattatcttgctgaattgacccttttatataatgaccttctttgtctctttttatagtttttgtcttgaagtctgttttgcctcatagaatagcatagctattcctgctcttatttggtttccatttgcatggaatatctttctccatccctttagtttcagtctatgtgtgtctttacaggtaaagtgtgtttcatgtaggcaacagatcactgggtcttgtttttctatccgttctgccactctgtgtcttttgattggagagtttagtccatttatgttcaatgttattactgacaagtaaggacttactcctgccactttattaattattttcttgttgctttgtgatcttctttctttccttcctgttctccttttagtgaaggtgattttctctggtggtatgttttaatttcttgctttttatttttttgtgtgtatctgctgtatgttttttgatttgaggttaacatgaggcttgcaaataatatcttataacctaatattttaaactgatgacaccttaacactgattgcataaacagacaaacaagcaaagagaaaactaataaaaactctacattttaactttgtccccccactttttaacttattgtactgtttatgtctgaaaagttgtagttattatttttgattggttcctcttttagtctttctactcaagatatgagtggtctacatatgacagtgttataatattctatatgtttctgtgtacttgctattaccattaagttctgtactttcaagtgatttcttattgctcattaatgtccttttctttcagattgaaaaactccctttagcatttagcagtatgtgaactgcatttttcaagtccagaatttctgcttgattcttttttttttttttgagatggagtcttgctctgtcgcccaggctggagtgcagtggcgcgatttccgctcactgcaagctctgcctcccgggttcacaccattcttctgcctcagcctcccgagtagctgggattacaggcgcccgccaccacgcctggctaattttttgtatttttagtagagatgggatttcaccatgttagccaggatagtctcgatctcctgaccttgtgatccgcctgccttggccttccgaagtgctgggattacaggcgtgagccactgtgcccagcctgcttgattcttttaaattatttcaatctctttgctaagtttatctgttaggattctgaattccttctctgtgttagcttgaatttcactgagttccctcaaaacagctattttgaattctctgtctgaaaggtcacatatctctgtctctccagaattggccactggtaccttaattagttcatttggtgaggtcatgttttcctgtatggtcttgatgcttgtgatgttcgtcagtgtctgggcattgaagttaggtatttattgtagtctttgcagtctgggcttgtttgtatctgttcttcttaggaagactttccaggtaataaaagggacttgggtattgtgatctaagtttttggtcactgcagccatatctgcattagggggcaccccaagcctactaatactatggctcttgcagactcgtaaaggtaccacttgggtggtcttggataagatctggaagaattctctggattaccaggcagaggctcttgttctcttcccttactttctcccctaaaagtggagtctctctctctgtgctgggccgcctggagctaggagaggggtgacacaggcacctctgtggccactatcactaggactatgctggctcagacctgaagccagcacagcactgggtctcacccaaggcctacagtctccactgcctggctactgcctacgtttgcttaaggcactagggctctacagtcagcaggtggtgaagccagtgagattatgtccttcccttcaaggcagcaagttccccctacccccatcctgggaaggtccttagatgccatctgggaggcagggcctgcagtcagaaaccttagtaatctccccagtgctctattctattacagcctggctgatacccaagccataaggcaaagtccttcctgctcttccctcccctttccacaagcagagaagtctctctccatggccaccactgccccagccctgtggcagtgctgccaggccactgccaacgttcattcagggcctaagggctcttgaagcaactgaacactgccaggcctgggactctccctttagggtagtgggctcccctctgacccagggcaggtccagaactgccaccccacagccaacacttagaatctgggaccccaagagccctcttggtgctctgccacactgtagctgagctggtacctaggctgatttttgctttttatgaaggtacttttttgtgtgtatagttcaatttggttttcctccagggaggacaattggtggaggtttctatttgggcatcttttttttttttttttgagacggagttttgctctttcacccaggctggagtgcagtggcgcgatctcggctcactgcaacctctgcctcctgggttcaagcgattctccagcctcagcctccccagtagctgggattacaggtgcctgccaccatgcttggctactttttttttcaattaaaaagtaaactttaatgtcgaaaatgcaaacttggggaaggcagaaagatcacacacaaggctgtcgcttcacacttggaaggttgcacggcggccaggagaggcactcctcacttcccagacagggcgggggccgggcagaggcgctcctcacttgccagacggggcggcggccacatgcctggctaatttttgtatttttagtagggacggggattctccgtgttggccaggctggtctcaaactcctgacttcaggtgatccacgcacctcggcctcccaaagtgctgggattacaggcatgagccaccgcgcccagccctatttggccatcttgctttgcctccaccttcatttgataacagaacacccccatgtaaccaccaccacaatcaagatataagacatttctgttattctccaaatttccttcaccctcctttatagtccatggcacccaccccatccctgggcaacacctatgtgcttcctttttttttttccccgcaggaggacgtcttcctatacctatgtgcattccatcactgctgcttttaatcatatagcgtgtagtcttatgagtctgactttttcacttagcataatgcttttgcaatttgtgattgagcgttttcatatgattctgttttttctgtctcttagcttggaagttatacactttttagtagtaactgttgggagatcgttctccaagagtctctctcatatttccatacatcctgctagcagagacattgactacctgtttttgtctgtttagtgttgctataaaggaatacctaagtctgagtattatacatagaaaagaggttttatttgtctcatggctcctcaggccatacaagaaacatggtgccagcatcttaccagtgtcacatggcaagaaaggaagtgaggaagagaaaataagttgttaactggttgttaaaaagtgccaggcacgggccaggcacagtggctcgtgcctgtaatcccagcactttgggtggccaaggcgagtggatcacctgaggtcgggagttttgagaccagcctgaccaacatggagaaaccctgtctctactaaaaaaaatacaaaaaaattagctgggcatggtggtgcatgcctgtaatcctagctactcgggaggctgaggcaggagaatttcttgaatccaggaggtggaggttgcagtgagccaagatcacctgggcgacaagagcgaaactctgtctcaaagaaaaaaaaagtgccaggctctttttaacaaccagttcttacaggaactaatagagtgaaaactcactcacccccaccccacagggagggcattcattcatgagggatccacccctatgacccaaacacctcccattagccccccacctccaacattggaatcaaaatttaacatgaggtttggggggcagaaatccaaattatagcactacctttgttccaggctaccttcaaaggatgtttatacagcaaacagccttggaaaatagagttagggtctccttgtagagcacagggtaagtttgcttacttttcagcataatcaagattgtgtcttcttctggagcaaaactttgacaacaacaagcggggcaaagtctgaaaccttttgcacatcttgacagaaccttagagattacgagatttatctctgccttactcaaggtccattagtatcttccagaacaataagttggtcttagaatcctttagctatgtattcccttccaggcttcgatgctgtgtgctgttgttttatttagtttttattttaaacccaacaagacgctataccatcaatacttatttagatccccccacatatttaacttgccatggtgcttcattctttcatgcctctttaagcatccatctaggatcgtgttcattccacatgaagagaaagcttttggcccagcacgatggctcacacctgtaatcccagcactttgggaagcctaggcgggaggatcgcttgagcccaggatttccagaccagcctgggctacgtggcaaaaccctgtctctactgaaaatacaaaaaattagccaggtgtggtggttcacgtccctgctactcgggaggctgaggtgggaggattacttaaacctgggaggttgaggctgcagtgagcgttgattgcaccactgcactccagcgtgggtgacaggagtgagaccatgtctccaaaaaaaaaaaagaaggaaagaaaaagcttttgtatttcctttcgtgtaggtctgctaatgacaaagtctctgggttttttgtttgactagagaaatgttttaattttaaccttattcttgaaggttttgtttttgttttcattttgttttgtgtgctaagtacagaattctcattggcatttatttatttagagacagagtcttgctctgtggcccaggctagagtacagtggcacgatctccgcctcccaggttcaagcgattctcctccctcaacctcctgagtagctggggctacaggcatgcaccactacacctgactaatttttgtatttttagtagagacggggtttcaccgtgttgcccaggctgatctcaaactcctgagctcaagtgatttgcctgccttggcctcccaaagtgctgggattataggcatgagccgccgtgcctggccagcatttattttcttttcagctctttaaggaagtcattccattatctctgggttccattgttgagaagccagctgtcattctaatggttgccctttgaagataacttttttccctctgctattttaaatatttcctccttgtattttattttcaacaggtgtaatgtggcacatatatcagcaattgttatgttacatacaatacatattgtgcaacatatgtatcattatcagttattgctgtgtaacaaactactccagaacacagtggcttataaaaggaatcatttatttagtccttaaatctgcaatttgagcagagctcagtgggaaagcctcagctttactttatatggcaccatataaggtaactcgcaactggcaagttggtgctggctgttggctggtagttcattcagggctcagggcccaggaccaagagtcgtcaccatggcttgcttcagcctccttgaggcatgatggctgggtcccaagagaagagaaatagaaacttccagtctcttaaggcattggtctggaagctgggacggcatcacttttgccatattctgttggtaacgcagttacatcgccagattaaagggtaaagagatacaaattcccactgctcagtgcaaggaatatcagtgattttagggggccctgttttaaaacccctacaaggtgctaagcgtggatttctggggctttcttgttttttgtttttttctatgtgtttttttttttttttttggtggtggggtcagggagggcttatagggtatgttaaatcagcagaataattttatttatttatttggagatggagtttcactcttttgcctaagctggagtgaagtagcgtgatcagagatggagtttcactcttttgcctaagctggagtgaagtagcgtgatctcggctcactgcaacctccgccccgctggttcaagcaattcccctgccttagcctcccaagtagctgggattataggcacccaccgccacgcccggctaatttttatatttttagtagacatggggtttcgccatggctagtctggaattcctgacctcaggtgatccacccaccttggcctcccaaagtggtgggattacaggtatgagccactgtgcctgacctataatgttttttaaaaatcagttttggaaagtttgcagacattaacttttcaaatgtagcttccatttgattctttttctactctgcctctgatcctccacttatgtatgtatgctagatcttttattagatagtctgtgtctcttatgtactctactatattttgtattcttctgtctctccatgctttattctgtttactctttcctgattatattttttaattttgtaatttccatttgatgcttttttgatcattcaaaactcttcaccaaaattctaaatttccttttttaacctctcgaatgttatcacagttactttaaagtctattttggataacttaaatatttacagtcccctcacagatatgtttcttttgtatattgtttctgttggttttctttcatgtcttatctccacatatgcctggtgagttttgattatgtgttggtcattgtatttgcaagtatgctcgtagaaataatctggaatggccgggcgcagtggctcatgcctgtaatcccagcactttgggaggctgaggcaggtggatcacgagatcaggagatcaagaccatcctggctaacatggtgaaaccccatctctactaaaaatacaaaaaattagctgagcatggtggcacgttcctgtaatccctgctactcgggaggctgaggcaggagaatcacttgaaccaggaggcagaggttgcagtgagccgagatcacgccactgcactccagcctgggtgacagagcgagactccgtctcaaaaaaaaaaaaaaaaaaaaaaaaagaaataatctagagcctagtttgatgtttccttacaaagaatgaatttatttttgcttctcccattgcaactaggataacctcagtctagtttctggaactgaaatcacttgaggctgaactgtggtctctgtgagagcgtgtctgtgtatggctcacccttattcctaggctacgtagttctttaggaccctaacccaaagtaagagatgttcatcagggctctcctcttggcagacgcctgggctccagtccctgtgtcctgagccccatgaggctgttactggtgctgctcgtctgcccatcctctccagtaacagccacctgaacactgcaattcctgggtttccatcattccttccagcctggtgagtcatcagtgtcttttgaggtatccagtgcctgccagcagatgttttttaataatttgtccagcatttctggctgtcctcagtaggtggtctgtttcacattccctagtctgctgttaatggaaagtggaagttctgagagagaatcatcgttcccgtcagcattcaaatgcctgattacactttccccattcgctatcctttcctttatttgctcctcaccacagcaaaactcctcaaaaatatctatctttgcaatcttcagattctcacattgtgtccttaaacccactttaatcaggccttggttccctccattccactaaaagtaatgttgtcaaggtcgtgcatgcctccgtgatgctaattccagtgatgagttttcagttgtcattctctgacatatcggcaacacttgatgtggagtaccctgatgttgagaggctggtgagatgaaggaaaaacccagccaagggcaatgaggaatggcttccttccgcctcctccttccctatctttgttgtggtttttgttgtttctgtaacactgattacgttatagtttatttaatgtacttccttattctatgtttttactttagtcattttgttgatctcctccataataacataggctcgggccaagcacagtggctcacgcctgtaatcccagcactttgggagaccaagatgggtggatcacttgaggtgaggagttcgagaccagcctggccaacatggcgaaaccctgtgcctactaaaaatacaaaaattagctgggcgtggtagcaagcgcctgtaatcccagctactagggaggctgaagcaggagaattgcaggagaatcacttgaacccagggggcagaggttgcagtgagctgagatcgcgccactgcactccagcctgggtaacagagtgagactctgtctcaaaaaaaaaaaaaaaaaaaaggcttcaggagggcagagcattttatgcaattgttcattaattgacccctccatttggcacagatcacatgcccagtagttaactgttaatcaacgcactctctgtggaacaacaggctggtcccgttgagccaacactctctgggcactgccttcactagactctggctggctgctgcgcttgtagaggtatgcaagacaaaaccttttggtatgttaaaagccctggtcagaactttaagtaaccatcactgacatataatggttatggttttgaaagtgcttttatagtggtttttcatctgtcctcacagcacctctgggaggtaggtaggacaggtacagttagtctcatgtttcaaatggggctcagagagggaaaaggatttcccaagatcacacagcaccttagtagcaaaacttggactcaacctcaacacttaaaaatgaacaaagctggccgggcgcagtggctcatgcctgtaatcctagcactttgggaggcccaggcaggcaggtcacctgaggccaggagtttaagatcagcctggccaacatgacaaaactctgtctcttctaaaaatacaaaaaattagccgggcatggtggcgggtgcctgtaatcccagctactcaggaggctgaggcaggagaatcacttgaacctgggagatggaggctgcagtgagccgagatcgtgccattgtactccagcctgggcaacaagaatgaaactccatctcaaaaaaaaaaaaaagaaaagaaaagaaaaagaaaagtttccctttttttaaatatctcattttaatgactgcataatagtttattacatagttataccataatttatataatattttgttgctgtacatttaggttaaacaatacttacttagttcctactatgaagaggggccaagtactcgaggctggagctctcacatgtggcaatgaaattagaaagtggatatggcagggctgtggtaaaataaaatataaaaataataaatgatattaccaaagaaaaggaaagtttttcaaaataaaggaaaatctagacaagcatagtggctcacacctgtaatcccagtacttttggaggctgaggcaggaggaacacttgaggccaggagttcaagaccagcctgggcaacatagcaagaccccctgtcaacaaaaataaaaaaaaattaggccaggcacagtggctcacggtggctagtgcctgaaatcctagcactttgagaggctgaggggggtggattgcctgagctcaggagttcgagaccagcctgggcaacatggccaaaccccatctctactaaaaacacaaaaaattagccaggtgtggcagcacacgcctttaatcccagctactctggagactgaggtaggagaattgcttgaacccgggaggtgaaggtcgcagtgaggtgagattacaacactgcactccagcctgggtgacaaaatgagactctatctcaaaaaaaaaaaaaattagctgggcatggtggtgcatgcctgtaatcccagctactcaggaactaaggtaggaggatcccttcagcccaggaattcgaagatgcagtgagtcatgatcacaccaccgcaccccagcctgggttacagagcaagaccttgtctctaaaaaacaaagaaagtctaacctaaacgccattatgtcatttacatgtgtataggggtgtgtgtgtgtgtgtgtgtgtgtgtgtgtgtgtgtgtgtgtgtgtgtgtttgcttgggaggggagtcgggctggagctggccaggccgcagcctggggaccttctgattccagcagggatgtgggccgagggtcccgccttactcatttcgggtcttgctcctctgtcctggctctacagactcttccagctggagttggaggctgacgccctagtgaatttccatcagtattcttcccagctgctacccttctatgagagctcccctcaggtcctgcacactgaggtcctgcagcacctgaccgacctcatccgtaaccaccccagctggtcagtggcccacctggctgtggagctagggatccgcgagtgcttccatcacagccgtatcatcaggtgagcaagggaacaagaccatttggacaacgtgtgtgtacctgcttgtgtgggcagtgggggccgcaggcctcggttcccctccatagtttgacttaaaaaggagcagggcctggcatggtcgctcactaacgcagtcccagcactttgggaggctgaggagggaggatcacttgagactaggagttcaagaccagcctggcaaaatagcaagaccttgtctctacgaaaaaattaaaaaattagcatgtgtctatactcctagctacttgggatgctgaggcaggaggattgcttgagcccaggagttagagtttacagtgagctatgattgcaccactgcacttcagcctgggtgacagaatgagaccttgtctctaggaaaaaaaaaaaaaaaaaaaaaaaggtgctgcgttgctaccagattaaaatgtaagaaggacaatgtaatgtttccagagtccggagtgctcaccaggtgccaggtctgtgggagctgatttctacccaccatgaaattgaattttcccaacccccacaaggtatcgtcattttattttactttattttattttattttattttattttattttattttattttatgttacgttatgttattttattttgagacggagtcttattctgtcacccaggctggagtgcagtggcgcgatcttggctcactgcaccctctgcctcctgggttcaggtgattctcctgcctcagcctccggaatagctgggattacagtaatgtgccatcatgcccgggtaattttttttttttttttttttttttttgagacggagtctcgctctgtcgcccaggctggagtgcagtggcgcgatctcggctcactgcaagctccgcctcccgggttcacgccattctcctgcctcagcctcccgcgtagctgggactacaggcgcccgccaccacgcccggctaatttttttgtgttttttagtagagacggggtttcaccatgttggccaggttggtctcgaactcctaacctcaggtgatctgccctccttggcctcccaaagtgccgggattacaggcgtgagccaccatgcccggcccaggtatcatcattctagagagagctaacaggacttgtgcaggtcactcagccagagagggtgaaagaggggcttggatccttggtgtctgcccaggctgctcttctggaagctgaaggcctccttttgtgaatccattcagccagcagatggagcagctgttgcccctggtgagggcactgtccccacccttgcacagggcaccagttggccatcttgtgcagaggtagccacacctcctctgagtctctatcctagatagctcagttaagctcccaggcccagaactcaaaacctcactgctggccgggcgtggtggctcacacctgtaatcccagcactttgtgaggccgaggcgggtgtatcacttgaggtcaggagtttgagaccagcctggccaacgtggtgaaaccccgtctctactaaaaatacaaaaaattagcaaggcgtggtggcgcacgcctgtaatcccagctactcgggaggctgaggcaggagaattgcttgaacccagaggcggaggttgcagtgagccgagattgtgtcactgcattacagcctgggcaacaagagtgaaactccacctcaaaaaaacaaaacaaaacaaaaaccctcactgcactttagtttccaggcgtgcttttggacagcactgtctcatctcaccatcactctgtccatttcctggggcaggcacagcagcttgtgtcgataaggatattgacgcccagaaaggttaagtgaattgcctgaggctagtgagatatccgtgttctgtgaccctttcctgtgccaccaccctgcccacttcctgctggtgtggccctggggcccatctcttgtacgagtgagcaaactgaacagaaacctgatacaggtcacatcagatataattacattcaaatcagcccaactagctgagtggcgggaatgctcttgagctcaaataaaccagaaagtccgagtttccgagtgcacttccctgcatgtgcacttaggtccccctgccaccttgtaccacacctgctcacctctgctcaccctggccctctcctgcagctgtgccaattgcgcggagaacgaggagggctgcacacccctgcacctggcctgccgcaagggtgatggggagatcctggtggagctggtgcagtactgccacactcagatggatgtcaccgactacaagggagagaccgtcttccattatgctgtccagggtgacaattctcaggtgctgcaggtgagcagggggaggggcagggtgactggtactgatacctcccggtgtccacggttccctttgggcccctaggctcaggtgtcactctcaggcctctcactgtcccccattggtccttgaggcctgagctccttcatggagggtgcagacccctccctggctcttccctcccagcccttttccaggagccacgtcctcagtctctttgcttgataaacctggggacggcctccaacccagcaaaataaaccccaaaaaaggcccagctccagtcagttagttcagttccacttttcctgagcacaaactgtgagccagatgcctgcctggaggggctcgtgggccagcgggacctgggcttaaccttttgcaagcttgtccaatctgtggccctgcaggctgcatgcagcccaggacggctttgaatgtggcccaacacaaattcacaaactttcttaaaacattatgagatccatgcatggaccttttttttagatcagctgttgttagcgttcatgtattttatgtgtgacccaagacaattcttctgatgtggcccagggaggccaaaatattggacaaccctattttacaggaattcaaaccaagcaaaccaaactgtctccagttcctgtaggcatttgtgccagaggccctcctgttaacgtttttgattacctgggcaaaagatgtgattttttaattgtgggcaagcagatggggtgatactattaaatagctatttcatatattagattgaacagaaaaggcaggatgttggattatgttttattgtctagaattagaaaattcttctaaagatcatgttctctctgccttggcatcagaatgcaactacgttataccagaaaatgtggattcctttttttttttttttttttttttttttgagacagagtttccctatgtctcccaggctagagtgcagtggtgcgatctcggctcactgcaacctccacctcctgggttgaagtgatgctcgtgcctcagcttcctgagtagctgggattacaggcatgtgccaccatgcctgggtagtttccgtatttttagtagggatggggttttgccatgttgcccaggctggtctccaactcctggccttaagtgatccacctgcctcagcctcccaaaatgccgggattacaggtgtgagccactgtgcccggcccagaaaatgtggattcatatcttatgcttcttgctctcagggaagggaattctccacccactgttgaactccactttcaccgagaatcctctgcgcacccagcatggtgccgcgcagaccctgcctccatgcgggggtgtgcacacccgcttctcgatagtcatgcacgactgcagctgtcctttatccggtgctgattggtgcctgaccttgaactgagtgttgtatgtgttccagttaattcttagaatacactcatggggtggaggtcattattcccctttcctctccgaagaaactgaggttcagtgttgttaattaagaagcgtgcccagggagggccacaaagctgagagagtggggcttgaccttacattggcctcgatgccagccctttgctcttcctgctgtgtctctggcctgccttcaggtccagtgggactgctgtgaggtgaccctggtgtcacatgggtacactgtggttgtaatgaacctcatggggacagcactgagccaaaagtgagacagtaaaaccctcctagcactttcttttttttgagacagcatctagctctgtcgcccaggctggagtgcagtggtgtgattgtggctcactgcagcctcaacctcctggactcaggtgatcctcccacctcagcctcctgagcagctgggactacaggctcgtgccaccacatgggctaattttttttttttttgagacggagtcttgctctgtcgcccaggctggagtgcagtggcgcgatcttggctcactgcaagctctgcctcccgggttcatgccatcctcctgcctcagcctccagagtagctgggactacaggcgcccgccaccacacccggctaattttttttgtatttttagtagagacagggtttcaccgtgttcgccaggatggtcttggtctcctgaccttgtgatccgcctgcctcggcctcccaaagtgctgggattacaggcgtgagccaccacacccaggccacgccagctaatttttaaaatttttttggtaaagatggggtctccctatgttgccgaggctggtatcacactcttggtctcaagtgatcctctcacctcccagtgtgttggaattacaagcatgagccactgcgcctggcccctggctctctttttaatactgctgttctttcattgaaaacatagtacctgcatgtagaaaaaaatcagtcaggacagaatgaaaagcaagaatcattcccacctggacccccagtgcccatcctgagatacagctaccttttaagttccttgactcagaaatgtttcatgtgagccacagtcatgccaggtcgaccccttccctcccatccacactggcacttggctttcctggtgcttctctttacgttctttttttttagacagagtttttgctctattgcccaggctagagtgcaatgatgcaatctcagctcactgcaacctctgcctcctgggttcaagcgattctctttcctcaggttcctgagtagctgggattacaggtgcctgccaccatgcccggctaatttttgtatcgttagaagagacgacatttcaccatgttggccaggctggtctcaaactcttgacctcaggtgatccacccaccttggcctcccaaagtgctaggattacaggcatgagccactgcgcccggcctctttacgttcttatcagcatcctatggagtcaaacttcccttcctctttcatcagctccttggaaggaacgcagtggctggcctgaaccaggtgaataaccaagggctgaccccgctgcacctggcctgccagctggggaagcaggagatggtccgcgtgctgctgctgtgcaatgctcggtgcaacatcatgggccccaacggctaccccatccactcggccatgaagttctctcagaaggggtaagacctcctcccctccccatctgctggcctgctgggctccagctctcctgtcacctgtcccgtgcctgaggcaagcagtatccaccatagatcttagcatctccagcctcagagcagaggccccgggttcacaagcctcattaggccccgcctggcccaaagaaggtgctccatcattgtatcatgggtaggaatctcggttcacaagttcagctgtgcaaggaggagactttaaaatttttctggctgggcgcggtgtctcacgcctgtaatcccaacactttgggaggctgaggtgggcagatcacctgaggtcgggagttcgagaccagcctgaccaacatgaagaaaccccatctctactaaaaaatacaaaattagctgggcgtggtgacacatgcctgtaatcccagctacttggaaggctgaggcaggagaatcggttgaacccgggaggcggaggttgcagtgagccgagatcgcaccgttgcactccagcctgggcaataagagcgaaactgtctcaaaaaataaataaataaataaataaataaataaataaaaataaatttatttaatgtaccttaattcctaggagtgaatctccctctataaaactggagacaaccaatcttagccctctttggggtctcctctttccagctcccctccaggtggtgctccagttctggagtctgatgcaaccccaaggcccacctggcccctcctctaacccagcccagcctgatctgaacagccccccgatggcttcagtgctccttggtttcttgtgtgcccagctcaaagcctgggaaatgcttggtaaggtggccgagtgcccgtccacctagatgcctctttcctttctggctggtggcacgttgggaggcaggtacaggctcatgttttgggagcctgggaacccctggtgtcaggaaaattgtcttcaaaggggtaggggatgagataaaaagataaatgaatatctcaaatctcaaaatactatctaggccaggcgcggtggctcacacctgtaatcccagcagtttgggaggccaaggtgggtggatcacctgaagtcaggagttcgagaccagcctgaccaatatggtgaaaccctgtctctactaaaaatacaaaaattagccaggtgtggtggtgtgtgcctgtagtcccagctactcaggaggctgagacaggagaattgtttgaaactgggaggcagaggttgcagtgatttgagattgtgccacagcactccagccagggcgacagaacaagactccatctcaagaaaaaaaatactatctaacaggaacaacatctagaatgaatgaatgagccaatgagtccttcgatcctggcactgtgctaaagcaccagcctcaccgaaatgaataagccactccaggacaggagacaccccagccacccagaatctcatagcgcagtgccagacaagcagtgagaaggcatggacgggcagcactcaggcagggaggctggcacttgtgcctgtcctcaggttgttccttcctctgggagctgcatccaccttgctagccccatggggcattgctagcccttctaagggctggaccaagcctggacaaaccctcctttccttgaatctcccaagcacagccagaatgagctagagctttcagaaatacttgaccaaacagagaagataccaacacccccagccccgcagtcaggttccccatttgcaggttgtgacctgagtggacaccaggtgatgctcttctctacccagagggctggcacatggccccactcttgcttgtctccagccaccctgagctgtactgggcaggagctgtaattgaccagttttctctctcttcaaacaacctcagccctcaccggtccctctgtccccacacaggccatcctgggtgggtccagcgtcccatcacataagaggatctttgcacagaagacaaaggaagaggctcctaccttgagtggagcagggagatcccttatcgacttggcagccagcacagccctactccaagaatcccacggcctcagtgttactgacaagtggttccctcacagctcagactaggagctccctcgctgtttttctttttcttttcttttctttgttttgtttttgagacagagtttcactctgtcacccaggctggagtgcaatggcatgatcttggctcactgcaacctctgcctcccaggttcaactgattctcctgcctcagcctcccaaggagctgggattacaggtgtgcgccactatgcccagctaatttttgtatttttagtagagatggggtttcatcatgttgaccaggctagtcttgaactcctgacctcaggtgatctacttgcctcgccctcccaacatgctgggattacaggcgtgagccaccgcgcctggccacctctgctgtttttcaatgcagctgacctttcccacaaagctcggtttgtgcctgcggttctcagatggttaagcccctgctgaggaagggaaacagataatcccagacagtgagatggaggctgagactgaggatgcctgggggctgcactaggagctcagagacggcatcaggcagctggagttcagggaaggtttgggggcagcagagcccgagccaagccatggacactagccggagctggccactcgggtgaagacttggggggctccagagggcccagggaaagaagctgggcctgactccatgtgcctagtgctgagcaccaagcgctggcataagggctgtagggagctgggcagcataaatcctgggcctgtgctgggcacccctaataatagagaacagcagctgaacactaacgctgtcccagccaccggcttagccttcatgtgggctatttcactatagcccagagagctgatgtattttattccccctctaaagctgagggccaagtgtggtggctcatgcctctaatcccagcactttgggaggctgaggcaggaggatcgcttgagcctaggagtttgaggctacagtgagctatgatcatgccattgccctccagcctgggtgacaaagggaaatcctgtctcaaacaaacaaacaaaaaacagatgaggaaaccagggcttagagagattaagtaatttgctcaaagtcaggcagtcagtaagtgccagacctgggaattaaacccatgtgggctgtcctagtaattgcactaaaaaaaaaaaaaaaaaaaagctttattgagatatagttcctattccatacaatccacctattgaaagtatacaatgattctgatatattatgtttattttttccaactgtgatagattatatataacataaaatttgccattttaaccacttttgttttttgtttttgagacagagtttcgctctcgttgctcaggctggagtgcaatggtgtgatctcggcttaccgttacctccacctcccgggttcaagtgattctcctgcctcagcctcccgagtagtagctgggattacaggcatgcaccaccatgcccagttaattttgtattttttagtagagacagggtttctccatgttggtcaggctggtctcgaactcccgacctcaggtgatccacccaccttggcctcccaaagtgctgggattacaggcgtgagccaccacacccggcccattttaaccacttttaagtgtacaattcggtggttttaatcacatttacaatgttgtccaaccattacccctttctaaaacttttcttatcacctcaaacagaaactgtaaccattaataactcccgattctcccctccccacagcccccgataagtcccatatcctctctgtctctcagaacttgcctgttctagaacctcgtatcagtgaaatcatacagcgtttgtccttttgtgcctggcttatttcacttagcatgatgtcttcaaggctcatccatgttgcagcacgtatcagaatttcctttctttttaaggcagaatactattttgtttatccattcagtccttcactgatagacgcctgggttgtttccaccttttgtctgttgtgaagaatgctgctgtgtacatgggtctgcaaatgtccattcaagtccctgcattccgtcctttgatacttccgacctcaggtgatccgcctgcctcagcctcccaaagtgttgggattacaggcgtgagacaccgcgcccagccagaaaaattttaaagtcttctccttgcacagctgaacttgtgaaccgagattcctacccatgatacaatgatggagcactttctttgggccaggcggggcctaatgaggcttgtgaacccggggcctctgctctgaggctggagatgctaagatctctggtggacactgcttgcctcaggcaccgagtagaaagcaattgtgctctttcccactctgtcatactgcttcctatagcatgcaggtcactgtgtgactcactgacagtgtggtaaggaggtggagggtggctgtgtgccaggcacagaactgggctctgaaatgcctggtcttccttacaccccagccactcctctcagcactctctccatgttgctcagcttctggaggccaccagtgaggaagctggggcttgacttcaagcccatctgactctaaagccagtaccagggagggtgatcattgctggtggcagcatcaggaaggcttcctggaggagggggttagttgtgccttgaggggctcagtacagccttaaccatggtgagtgtgctggttgggtttgctgaactttgtttgcagtgatgctctctgtaagcagtagatgaagctccaagtcctggcttcatcccacgccacgcagaccctagcttctgctcaccaaccggggcccctctctcaccaggtgtgcggagatgatcatcagcatggacagcagccagatccacagcaaagacccccgttacggagccagccccctccactgggccaagaacgcagaggtgagtggatcctgaggtgggtgggtggggcagggggccgggccccgcaggtcctcagggccctcaggaagcaggttcccgagaggaccctgaggctagcacttgggggctgaccttgcagtgggtgtgcaggcagagaagtccatgaagagctgggatcctggcagggctctgctgctctctggctgggcggggggatccgccctgtgcctcagtttcctcatccatgaattctgctttggcgatgtgatgaagtcagcaaggcagtgtgtgacaaaactcggcacaaattgtaaagtgcttcccaaatagaaggtggcgtgatgatgattgtattattagtcaggattctctagagggccagaactaacaggagatatatatatagagagagaggggggtttatttttttattttattttttttgagacggagtctcgctctgtcgcccaggctggagtgcagtggcacaatcttggctcactgcaagctctgcctcccaggttcatgccattctcctgcctcagcctcctgagtagctgggactacaggcgcccgccaccacacccggctaatttttttgtatttttagtagagacgaggtttcaccgtgttagccaggatggtctcgatctcctgacctcgtgatctgcctgccttggcctcccaaagtgctgggattataggcgtgagccaccgtgcctggcctaaagggggatttattaaggagcattaactcacacgatcacaaggtcccacaataggccatcgcaagctgaggagcaaggaagccagtccaagtcccagagctgaaggacttggagtctgatgtttgagggcaggaagcatccagcacgggagaaagatgtaggctgggaggctaagccagtctagccttttcacatttttttctgcctgctttatattctggccgtgctggcagctgattagatggtgcccacccagattaagggtaggtctgccttcccctactgactcaaatgttaatctccgttagcagcaccctctcagacacacccagggtcaatactttacatccttcaatccaatcaagttgacactcattattaaccatcaagatgatgatgatgatgatggatgatgatggtggtggtggtggtgctgggcctagctgcacacacagggagcctggctgggcatctcctctgagttcttcccctaagctaagctctgtcctcctgggaggatggaggcctctggtctcatcaccaggaagcacagcttgacagagaatgggatgccccagagttcatggcctacttctcaatgtgatgggccaggagggagggcactgccagcctcagggtacctctgcattccaggagccggacaccgagtcaggcccttccgtgtaggtttggtcactcattgtcatcacatgctgtgaggtggggacttgcattcccatcttcacagaagccctgaagtgcacatggctacagtgacccatccaagcgcaggcagctgggatgagtgaagctgggctttgggctcaggtctgtgactccaaagccaggctcccctccctgttcccaaggctctgccagggatgtgcattgccaaggcccagtgagaggtgatacctttgcagggttccagggagggatgcagggagcggggtgcttcaggacaggccccagaggagcctttgcaaggagagtgggttctgttggcactaggaaaggaccagaagcctcttaaaacagtcagcacatctttggctttttgtccctagtcttgggatgctgatgggatgggaggcagtctaggcccccctagaactggggcctgcccctggaatcctcttgctagcgctttccaacatcccagtacctgtaggcctctcagagcagaagtggcagtgcccacgtgtcccggggtgcggcagctccccgagtgcctgtgctaactcagcctgaccgtctcccgcagatggcccgcatgctgctgaaacggggctgcaacgtgaacagcaccagctccgcggggaacacggccctgcacgtggcggtgatgcgcaaccgcttcgactgtgccatagtgctgctgacccacggggccaacgcggatgcccgcggagagcacggcaacaccccgctgcacctggccatgtcggtgagcccaggaccgcgtgtcctgccctgtggggccccggtgggaatgcaggagggctgtccggactggagccctcctccccactgtctccctcctatcgtcagctgctccaaatcatcttcccacccaaagctcagttcagaccctgactcctccctcaggaagccttccaagtccccctctcagcccaaaataacaccacctcctgtgtgctgtggtaccttttccacctgtgcccccatttggcacttgcatggcacgagagggaaaaatgacagctctggccatagactggccctgagcaagccatgtcacctgtcagcctcgatttcctcatctggaaaatggtggtgtcaatacttatctggaagagttgtggaaaagttatggtggacacttggtcaccctctacagaatgtctaagtgacacacgcagtacctggcccgagtgagcatcctgcttcccttcactggtccgcgtgttgctctcatcttccctgggaggctgtaagatcctggcaggcaaagcctgagtgtgcagcccagcagcctgtggcaggtgccaggcatattcgttggtttattatagaacacagttcctgccctcaaagcccttactgtctggttacacatctagagtatgaacatattaaacctagcagaggaggacgttactgtgttacagacatatgtgtgtgcatgtattcttttttttcgagatggagtctcgcactgtcgcccaggctggagtgcagtggcgcgatctcggctcaccacaacctccgcctcccaggttcaagcgattctcctgcctcagcctcccaagtagctgggactgcaggcacgtgccaccatgcccagctaatttttgtatttttagtagagacggggtttcaccacgttggccaggctggtctcgaactcctgtgttggccaggctggtctcaaactcctgacctcatgatccacccgccttggcaccccaaagtgctgggattacaggcgtgagccaccgcgccccaccgtgtgcacgttttctatagcaataccgtatgtacagaagtctgtttactgagtctcagtgacagaacatgagagacccccgggactctaaaagctgattcaggacacattcagagacatcctgttttataccaaaggtcaaaacttggaagagatgttgttgcccaaaaggctgaaactataaatagtttcatttttgaaactgtggacatttttagcactgggtgggcccttggaatgatctaactcagcagttctcaagttttttggcctatttgatccctttatactctgaaaaattattgaggatcacaaagattttttaatcatctggattttctttatctatatttaccattttagaaatttaaagtgtgaaaatttcaaaatattaattcatttaaaaataacaataataaatatatatgcctactatgtacccacaaaaattaaaattaaaaattttttaaaaaacttaaaaaataactggccagctgcagtggctcgtgtacaccagcactttgggaggccaagatggtcagatcacctgaggccaggagttcgagaccagcctggccaacatggcgaaagcccatctctactaaaaatgcaaaattagctgggtgtgagacctctgaaagggtatcacgtgttcacaggggtccccaggtcttactttaagaactgctgatagactttggtcatcttcatcccatcttcacagtttttggcatattcatcaaccacctttacaattatgtacttaatcacctcttcaaattggcttacttttatttatttattttgagacagagtttcgcttttgttgcccaggctggagtgcaatggcacgatcttggctcaccgcaacctctgcctcctgggttcaagcgattctcctgcctcagcttcccgagtagctgggattacgttcatgcgccaccacacctggctaattttgtatttttagtagagacggggtttctccatgttggtcaggctggtcttgaactcctgacctcaggtgttccacctgcctcagcctcccaaactgctgggattacaagcgtgagccaccgtgcccggcctggcttacttttaaactgacttaaatttattttgagagaaatgttgcatcactaccataaatggccatccatccatccagtgccaaccataaaaggtaaccaatgcagggcgcggtggctcacgcctgtaatcccagcattttgggaggccgaggtgggcgaatcacgaggtcaggagttcaagaccagcctggccaacatggtgaaaccctgtctctactaaaaatacaaaaaattagctgggcgtagtggtgggcacctgtaataccagctactctggaggctgaggcaggagaattgcttgaactcggtaggtagaggttgcagtgagctgagatcacgccactgcactccagcctgggtgacagagtgagactccgtctcaaaaaaaacaaaacaaaacagtaacaacaacaaaaaatcacagttaatgctgaaaacacacacatatctgtagccatagaagtcctaatagaatgtgaagaactgtttggaaaaccccattctagacccacagcttcattctctaggcagggaaatcgggtcccaagaagaggaaggtgacaaggccagagcccacagttccaggtggccagtgtgtcctctgaaaccatgccatgctctgcgcccctgcccggcctccaggtgtggaaatgtgtgacgttcttcgtggggacactcccccgaaggctgccattaggggcacgtgtgttcggttacccctcagggatgacaccctggactgggtgggcaagatggccttccctgccctcacccaccctctccttgctactcctgaaagccatcagcagctgacctactgtgtccccatggctcctgggtcggggtcacagatgcactgcatctttggaggcggagctggcagagcaggggcgagtcacttctagtttctgcctgggttcttacaccctcccctgtgggtgcttttaagcctgtttgtcaggtccccagccatcaaatggcagactttggactaccagattgacttgggtgggggtgaggagggttccagtgtctccccgtgctgaggagaggcccgctgggtgagttgacaggttggggctggcagccaggggcccctttgttcttcacttccccggcagttgcacgtcttatcctctctccatctccaacagaaagacaacgtggagatgatcaaggccctcatcgtgttcggagcagaagtggacaccccgaatgactttggggagactcctacattcctagcctccaaaatcggcagacgtatgtgctctgcactctggggctggagtggggtgagggttgggtggatacagggaccgaggaggagggaagtcccaggcatcaggtgccagcatcctgtgctgacccgccctgctcagagctgccaggagcacctcgtactcagagagggggcttccttacccaagcacaagggccctgagcagtagatgcaggcccaccacggggcttgctataccagcatcctctcccgtgcagcgccccccacctcagggagctaagattcccagcaggggtggggacaggagagccagcagcagccttctttccccaccgttggggaattcactgatggaaccactggctagaatgaccaagggtgcatgcactacactgcacgagctctgggcatgcctgtgtgggcagagtgcatggccatgtgctgcacgctcgcacagtgagccttagcttcagagctggacagagcagatcctcctcaccagaggcctggagcccgctctggagggtttcagcagctgtgggggtcactgtgggcaggtacctgatggcagcagtgtgtgtgtgccagtgcacacgtgtgtgtctgcatgcaccgcatctatgacctccttttcagcaatcccatccatcaaatggagtaggtgccccctggctggctcattagtccctttggaaccctgaactatcacttagcatttttgagaatcactgaatgtggccatgggattcctgctttcttggctggagtagaaggaaagaaggggttcccacaggcatcgggcagggtgacactgacctcctcctcccatatcctccttccctggccttaggaagctgcttgggatgtaccagcctgggggcagcactccctgtcagggtgggctgaggcctctggagcagcccacgtgcccagggcctgggagctgggacaggggacggagtgtggaaaggaggggcctctcctttgcatgttgacatcatttctgatcctgtgccatctccccttccccaaaccatgacaagttgtcaccaggaaggcgatcttgactctgctgagaaccgtgggggccgaatactgcttcccacccatccacggggtccccgcggagcagggctctgcagcgccacatcatcccttctccctggaaagagctcagcccccaccgatcagcctaaacaacctaggtaggcctcgcctcccgactccctcttctccagctggttcccaggcccctggatcacagcaggccccaccaaagcaacaggatccctaggacggaagtcactaaaggaagccggggaggatggggccggagttgtcagcctctaggcagccagcaacccacagatcccagaggcctagggtgtccctggctgatgtcccatgctccgttgcccctgagaggatgtgtcctgcacacagtctcaggcctgggcatttccagtggcacccatgaggtggctgctgttactgccctcctgtccccagggcgttcagggtgggcagtgaggagtgctgtcgggggactgggggcccgggccctctggcttcacctgtccctctggcttcacctctatcacactgtttgaatctcggttgggcctgagacctgtgtgcccccttcctggccccgtggtgactttcagacgttgaatgtggccaggcagccagcatctgccccggtgcattccttggtgcccagggagacatccccagactagacaggacccttctctggactttctgtgggctggcccactcagggacctccattgtttgggagcggggtcccctgaacagagggcagccaggagccagtccttggtgagccagacttcactgtggaggcggcagcaccttcagccagggtagcccgaccaagcctggaactctggagaggcaccgtgactgtggcttctagtcctggctccacctctctctcccctcccaggaactccccctccacctcccatctttatctctcaattttgcaggcagtcacccaagccaggccggatggtgggcctggggtgcggcgtcagatgggtaacgccctgggcctggagaggccaccgagcctagccatgcggcattagctctagctctcactccctaatccgtccttcttagctgcgcacacaccacacgccccctcccctgcaccctgtccccggcctctctcagccactcttctgcttcccttgttcactgtggagccgtgtgccctggggagggggagacaccgcttcgcagccctcggttctgctttgctgcttctagactctgcacagtggtggggggctgtcagagttggggtcacgcgggctgctgcaccaggcacctggggactgggctgcttgtcaggaggggcagctagtcagttgggtggacgtcaggcaggccttggacacaaaggaagacatggacagagtggatggtgggcctgatcccggaggccactgggatttccagacctgggatcaggacgagggatgtctcctttcatccatggacttaaaccccgaggaacgtcctgactcagccttttgactaaatgaccttgggtgaattatggaccctcttagagcctcacctgtcaatagggaataagaattcttaggccccaggtggttattgcagcatcggctccgatgcaagaagaagcactttgtctgaagaggacacgcaagggtattcatgccttggggtttcaagaggaagagattgaggggaacctgggagctggctgggcagggtggggagcccttcccagagcagtgggcccccctttccactccagcccatttctctcctgtggcctgtggctcagctttctcctgggacagagtccttcctgtggggaagggacagatgacagggggagtggggggatgagggcgtggccgtgggcgaggcacagcccaggtttgatctagggacctctggggtagcagggcttggggacccacctgaccacagcatgccctgctctgtgcctcacagaactacaggatctcatgcacatctcacgggcccggaagccagcgttcatcctgggctccatgagggacgagaagcggacgtaagtggatcgagatcgggggcagagcggggaacgtgtgcgctttcctgcccctcacccaccccctgttgtgggctcagggctttactctctgcaccctcacagccggcgaagtggctctgctcctagtcttatagttctcagcagagacagaacatggagagcctgtgtcgctcgttcattaatgctgggcggtgcaggctctggagaccagcccagggtgccaggcttcttggacttggtggggctggcgcagtgttctggcctccctccctgatctccttatggctagaagagggggagatgcctgggtcccccctggggagatctcagcagctgcttcccactgctcctactggcttccttaaccacctcccactgcagaatagtggcgtgggctgccttccccagcacctgctgtatacctagtcccattgtaagaggcgggcctgggtgacaggatgcaaagagaagacgcccaggccttgcccttcaggcataatcccgggtgcttgaactcagtgccagctggcacggcaaggtaccaggacaaatgcgtttccagccactgtgctgtcgccacctcccttgattgctgcagttgattcatttattctttattagtctctcatgttcctaatagccttcccagggaggaatttgtaaccttgttttacagatgcagaacctgagcccctgagaggtgaagtgacttgctcaaggtcacacggagtgagtgtcagggtggcaactcacagccgggtcttccgaacccacgtcctttgtgctaccgcaggctctctctgggttctctgtggactctatacctagtgccagccctctgcagggaaagctctcttctcagaatcagaggcagctccactcccagggccaggcagtgatcgtgcagctctgtgggtcctctcacttcgcactcacttccatgctaccctgttgtgtgccctggaggttcccctgccccatcagcattccctcccctgtgccccctgcatgctcttgcacgcgggcacacgcacacacacacgcacacatgcacgcacacacacccacatgcacatgcctgcgggttgcccacatgcatgtgttgcccacatgcaaacacatggacacgcacacacatgcacacatgcaaacacacgtgcatgcacacacatacacatgcgcacacatacacatgcatgcatgcacatggacacccacacacatgcacacacatgtacacacatgcatgtacatacacacacctgtgcaggggctgaggtgaggcagctgcacctgaaggggggacccacatttcccaagggaggaaaagcagattccccagattctggagcctcagaaccctgcctggagcggggctgaggcaagagtcaggagacccctcggtagctccccacttgggccttccaagctacagagccctgcgccctctgggttgatctctgtcgccagccccgcatcttcgggagtttgctttggcctccagcaacagtgtagtctctcccctgccacctctaggcttgctgtggggctgggtacctggtccaggaaaagacccctagaggtgggacccgggcctcctccatttatcagccctcttgggcacctcctgcatccccttgacacacagcgctgcccagagcagaggcggcttctgccctggtggagcttccaggtcagcgcaggagagagtaaaagaaagattgcgaatggaatggaagcagcctccaccaggaagcaggtggagcagcaggcgggctgtgagggagggtctcgatggcatcagggcaggcttctctcagcttcatcaagctgagatgggaagatgagaagatcagaggaaggttccagactgaaccaaccacaaaggcattcccccagggcatggccaatgaggacaggcaggatgtggggagacgtgtcagggcgcgctggagagcatgtgactcaggaggcggcagacctgggtccaggtccagtccgcatccatatgacttggttcccgtcacctaacctctgagctacactccctccgtcactcaaaaatatgcacagagagtaggcgcagtggctcctgcctgtagtcccagctactcgggaggatcacttgagctcagaaggttgaggctgccgtgaactgtgattgcaccaccacacaccagcctgggtgacagagtgagaccctgtctctataaataaataaataaataaataaggctgggcacggtggctcgtgcctgtaatcccagcactttgggaggccgagacaggcggatcacatgaggtcgggagttcaagaccagcctggccaacatggagaaaccccgtctctattaaaaatacaaaattagctgggtgtggtggcgggcacctgtgatcccagctactcgggaggttgaggcaggagaatcgtttgaacccgggaggcagaggttgcggtgagccgagatcgcgttattgcactccagcctgggcaacaagagtgaaactccgtctctaaataaataagcacagggatgtcagggagggtctgcctcagaggcgtttgggacaatgacatgagctaatgctggtagcacccctcccatagcccctggcatgaacctctcccttcctccctgccccctcctcccctgcttcttccaccttgtgtggaggccctgatactctgtcactgcccattcctggcctggctgtagggtccccgcccctccttccccagccttatttaattccaacagactttatcaggcacctgctttggatcaggcctgatactgaccaaaatcaggtgtcccaagttggggagactggccgagatcctgctgggatggcgcctggtcagtgatgctatcccccgaccttcctttccctttctctgttgcactctccagcccctgaaatactagacatttgttcctttactgccctcacccccaccctcgctgtcctgcataggacagaagttcctcgggtccgtctgggtctgtctgccaggacacagctgcaggggacaagggctatgagggtggatgtaaagtactgggctgtggcaggaccctcctctctcccactgctgttcccactgcagccacgaccacctgctgtgcctggatggaggaggagtgaaaggcctcatcatcatccagctcctcatcgccatcgagaaggcctcgggtgtggccaccaaggacctgtttgactgggtggcgggcaccagcactggaggcatcctggccctggccattctgcacagtgagggcggcccctggggatggggccaggcggggctgagacctgtgtcctcaaggggccgagtttgtcttcagggctttgcaaaaagagagtggaggagtagaggagggctataagcactttgaggaggcaggggcggggctgcaggtgctgaggtcccaggctggaaggagaagggctgggcccatgggcttgggtttggggatcccccgccctctggccacagagggtagagctggctgtgtgaaattttggcataggaagcgtttcctatcgactgccttaacccctcctcccctcacccctgcaaagcaggcaccaggggccacacagcctgctgcacataaggaatcccattcccagggtgcacgcagcaggcagtctcaggaatgaggagccactgagcctcaggatgccagagccctcgcctgcacacttcattttactgggaaattttactgggaaattaagttcccaggtggggagggatgacgtgaagtcacatagctcatccatggggtcgctgggctggagcacagtcccctagactcccagcctggcacctcctaggccacagggcactgtgtagtctcctttcactgccgctttgcgaaggcgcctggcttgctggacagatagccgggtggtcagtgttgtgacggctcctctgtggagctgtctgagcttctaggtgctgacaggtggggaggggcactgccagatcagggtcctcagctccccccaaccccctggacattgtcctgggactcaacatgtctgactggtgcccctgcccctgtgctggtcagattccattttctccagagcgcccccacatctggatcctggtcatgcaaagtcttggaggtgcccggggaggactccccaccctagggtgggtatcagggcctgtgggccaggcctgtgttggatgctggggatgcagagctgagccaggcataccccagcctcaggagcagggggctcagccagtccaggaggtgctggggacagagtcccatgggcggaggaggagagtcatctgtcaagttgccgggacgttagtgtccacggcggtttattgactggtatttcatttccttttgatgattctcaccatagccctgcggggtgagcagatggggaaactgagaaccagagaggatcagccagtgaattgggcagtcaggactgggtctccagcagtgtgcccagctctctaccccagcctcagggtcccagcatcccctctctggtcttccacagggtccaagggcgggcacgaggtctgagcaggcagactgggcagagtcctagcttcttctccaaaagggccacgtccttcttcagggaccatttcttccccatccggggtcttgagactcccaggggccatggaggggatttgagaggtctcctggctgatcctccggtgtgggcagatggcctcctttcagctaccctctgcttgtacatccctggccctggggaactcactgcctcacgggggaagtggggcagcttctccttcctggaggtgcagccggccccttggccctgtctgttctgaaggctcaaaggacagggctattccttgttttctgtgacaaacaacgtgggtctagcttttataagcttttactcttgaggggctcttctttaaggaaaataatacaaaatcatgaatacaagatgaagtgcagagccgtggggcttcagtggtttttgagtctctccgttgcccaggctggagtgcagtggtgcatcttggctcactgcaacctccgctcccgggttcaagcgattctcctgcctctcagcctcccgagtagctgggactacaggcgcccgccaccacacctggcgaatttttgtatttttaatagacggggtttcaccatgttgggcaggctggtctcaaactcctgacctcaagtgatccacctgcctcagcctcccaaagtgctgggattacaggcgcgagccaccatgtccagccggaaggaggtttctctctgtctgtctgggaggttgcaaaggaagggcccagaatttgggtttgcttaggcctcggtaaacccgcttcctcctgccacctcctgcgttcaggcgctctgcaggctgttctacgggagccctgcgtgtggccgctgcatctccccgcctctgacccctttgttcctaggtaagtccatggcctacatgcgcggcatgtactttcgcatgaaggatgaggtgttccggggctccaggccctacgagtcggggcccctggaggagttcctgaagcgggagtttggggagcacaccaagatgacggacgtcaggaaacccaagtaagccctggcgcactggggccgtggccgcagctgtgcccactgtggctgttccctggggacagagggctccctgtcctgctgagggagggggaagagcgccccacgcttgaggggagcagagggaacccccttcccagggaggcagagggctggggtgtggctctcacttgggcatgcagacacctgctgagcgcaggaggggcgtggcctggtgggcctggctctgccctgcctggctctgccctgcccggctctgccctgccggctctgccctgcctggctctgccctgcccggccaggggtctggggcttgcctggagagagcctgggccacccttctctgagaccacctgggcagaggctgggtttttgctgcccaggcaaaaggaacccactggcctttcaaatgacacggctaaacattttctcacatttcagacagcactcgctcccaggatcggactactaggttataatcagagggcttcagtcttacctttaatttaaggcctacaagacttgaactaatttaagtcagactgaaggagaaagtcacatttccaggaaacatttgtttgggaagcccaaatcctaggactaagcaatgcatcccgttcggggctggatgaatggtgtgttccaagaggagtgttttgagcatttctgagtgattttttcatattttgaaagtgagtgtcccccagtcttaggggcccggcatcccctctgcggtcttccctagggtccaaggccagggaccttcaatcttttttcccactctgtggcttgtctttctgctctgtggtgtttctaggtttttgttttttgttttttgttttggttttggttttggtggcccatgttcttaatgaggtagataatatttataaatatttttcttcttgtagtttgtgattttttcctttctttctttcttttttttgaaacagggtcttgctgtggggcccatgctggagtatattgctgtgaacacggcttactgcagcctcgacctcctgggttcaagcagtcctcccatctcagccgcctgagtgcctgggactactagcatgtgccaacacatgtattttttgtagagatggggtttcaccatgttgtccaggctagtcttgaactcctgagctgaggcgatcctcccgccttggtttcccattacaggcatcagccaccatgcccagcctagtttgtgctttttatttctcgttcataaacccctttgctgcccccaagcagcacacgattctcctgtgtcgagctggaaagctctctagatctgccttttacattgaggtcttttatcaacctggaattgatttttgtatgagggtgaaatccaagatccaatttaatgttttccacgtgattggccaatttttcccagccccatctgtgaagtctgtccttccctccgcttcctcagcagtgggtcaagcatccctctgctcttggatctgctccaggctgtgttttgttccactggttggaaagctgtctctgtgcccggaccacagagcataaaaaactaccgctgtgtggtgagtcctggtgtctgggtggcagatcctccaccttggccttcttcaaaaacatcatggctattcttgggggcagtagagagaagtggatacaagcatagaccctgaagtttctacctcttctcaaaaataggaatatgccaggcatggtggctcaagcctgtaatcccagctctttgggaggctgaggcaggaggatcacttgaggccaggaggtcgagaccagcctgggcaacatagtgagaccctcatctctacaaaaaatttaaaactaacaattagctgggcatggtggcactatggctgtagtcccagctaattgagaggctgaggtgggaggatcacttgagccccggaggctgaggctacagtgggctgtgatcccatcactgcactccagcctgggcaatagagtgagaccctgtcttaagacaaaaaaaaaaaaacaaaaacaaacaaactcacaaactataaaaagaaaaaatatttataaattctactccattaagaacatgggtccatccaaataaataaataaaacaaaaacaccataaagggagtaaaaagacaagccacagagtgggagaaaagatttcgaatccatacatccatcaaaggactcattttcaaaatatgaaaagatcattcagaaatgctcaaaatagtaaccaccattttactttctcttcctatgagtttaactgctccaggtactgttaagtaaaatttttaggggataattgatttggaccaggattctgtaccaggcccaacagaagaaacgaatatggagtcattcatgccaagtgaacctagttagcttaggcgtatacccatgtaacaaatagctgagttctggttagctacaacagctaagctttaatcaatcatagatggccacctgattcaaacaaggcaaaccaattaagctccacacctcactttggttttcagcccatcaacactgcctgaccacgttgcaggccagagttctttgaacctattctggttttgtggcctgcctgactctcagttcatcaataaaagccaattaacatctttaaatttgttgcaattttatctttgaccgtaccttatgtaagtggaatcatacagtatttgtctttttgtgactggcttatttctttctttttttttttttttgagatggagtcttgctctatcacccaggctggagtgcagtggcgcgatctcggctcactgcaatttctgcttcccaggttcaagtgattctcctgcctcagcctccggagtagctgggattataggcgtgcaccaccatgcccggctaattttttgtattttagtagagacagggtttcaccatgttggccaggccagtctcaaactcctaacctcgtgatccacccacctcggcctcccaaagtgctgggattacaggggtgagccaccgtgcccggccatgactggcttatttcacttggcatccatgttgtagcgtgtgtcagaatttccttcctttttaaggctgaaaaactccattgtctgttggatacacgttttgcttctccattcatccattgatggatattttagttgtaaattgactgctgtcaatgtcggatgtgcaaatacctgtttgaggcctactctctcttactggtgccttctctagagagaattctgatgggttcagtttgatcatattttgtttaagatttttggccaggcgcagtggctcacgcttgtaatcccagcactttgggaggccgaggtgggcggatcatgaggtcaggagatcaagaccacagtgaaaccccatctctactaaaaatacaaaaaattagccgggcgtggtggcgggcgcctgtagtcccagctactcagagaggctgaggcaggagaatggcgtgaacccgggaggcagatcttgcagtgagccgagattgcgccactgtactacagcctgggcaacagagtgagactccgtctcaaaaaaaagatttttgtgtccacgctcgtgggcgaacttgacccgttttttcctattttgggttttgaggaaatatttcctctttttatttttcttggaagagttagtataatagtttattttgaatttatggtagaacttgatagtaaattcttctaggcctggagtttgcttggtgggaggatttttgatgatggaattaatttctatagtggttgtgagactgaccactcggggtttctaaatacctttttgagttagttttggttaagtgaggtttttctaggaatgtgtccatttcatctaaatctttaagcttattggcttagagttgttcaaaatattctgtttttttttttttttttttttttttgagacggagtttcactcttatcgcccaggctggagtgcaatgacgtgatctcggctcactgcaacctctgcctcctgggttcaagcaattctcttgcttcagcctcccaagtagctgggattacaggcatgcgcaaccacacctaatttttgtattattagtagagacggggtttccccatgttggccaggctggtctcgaactcctgacctcaggtgatccacctgcctcggcctcccaaagtgctgggattacagacatgagccaccatgcccagccgattctcctttttctaacgtctgcagtgtgtgttggtgcggcccccttttctttcctgattttgataacagataacagccatgttttatcagtcttgcaacaggtttttccattggattagcctttcaaaaaaaccaacttttgctgaattgtgcccccaaggttggaccaatctgacactcctccagcactgccggagagagcctgttttgcggggatggtgcggggagaagcccacctatcccgaacagaggttggagtgggcactctgctacccaaggccctggggtgtgaattgtggggaaagggaaaggtggatgggcgggtggctcagccgtcctcctgcctcatttctctccagggtgatgctgacagggacactgtctgaccggcagccggctgaactccacctcttccggaactacgatgctccagaaactgtccgggagcctcgtttcaaccagaacgttaacctcaggcctccagctcagccctcaggtttaaaccatgtttgatgcatccatgggaagcgactggcccgagaggctgtggggtggtgggtgggagtcgtgcacttgccatcaggcaccctcaccgtgccaccagcccacccgctgcactggtctttattggctgaggacagggattgcgggggagctgtcaggcccctggcaggttagaaaagtccctggaaagtcctcagctgtacctgccttccaccaggacgaactagccagagagtgtggcttcgtgggtcctgcttctgaagagttcccagcctcccctcttcccgcacccccagcccccaacacgcacaccctgagatctggagtgcatgggttttatgccagtcccttgtgccactgggccgccctccttccccgcccctagaccagctggtgtggcgggcggcccgaagcagcggggcagctcctacttacttccgacccaatgggcgcttcctggacggtgggctgctggccaacaaccccacgctggatgccatgaccgagatccatgagtacaatcaggacctgatccgcaaggtgagtgccgtaggccagagggcctggacccactgctccctggagccaatcctgtgtcagcaaaccatgctagggaccgacccccaggacagcaggtggcttttacacacgcactcattcatatgtgcacacagggcaaattgatctcactggaacctgttccatgggtgggatctgcctgaagcactgtgctaagggggatctgaggaccactgtgctctaagtgtgcatgagtggggagggcggcatgcataccatgaacgtgccactcgagccagcctggggacaggacacatgcttgcccttgagctcacctctgtggatagacagtcccacaggaatgcctgtccccacgggttgccggtgctgtggtggaggaccgtgaggcctctgctaaaaggcctgggggctcggaaagggctccatggaacaggggacccatcctgaggcccttggggacagagcagtgcagaatcagtgatctggaggaagagcagcagccctctctctgcagaggtacagcagaggctggcaggacccagcatgctaggggaggccctgtggcgtggcgggcggtgggtgaccggggtgggcgagcgcggtggctgagctcagaccctggagccagggcgcctctgggggtccccgttctgcctgcactcactgcagctacctaatggggccatcatagcgcctgcctggggaggctgcgaggccttggcatgctgttgtctgtgaaatgttcacagcactgccgggagcctgagctgcatccttgctgctgtggtttcccgaagccccagggcgtcctgggcagcgcagcagaggctctgggcagacagagaagcgccctctaggggccagatcgggcagggcgggcttcctgcaggcggcagagaccgtcagactgtcagacactagccagtctaactctcctattgcgtgcggatggggagcctgggacccagagtgggaggcatcacccaagatcatccagcaaatcggcagcagagcttgttcggaagcaaataagagaggcagcggccgggcgcagcggctcacgcctgtaatcccagcactttgggaggccgaggcaagtggatcatgaggtcaggagatcgagaccatcctggctaacacggtgaaaccctgtctctactaaaaatacaaaaaaattagccaggcgggcatagtggcaggagcctgtagtcccagctactcgggatgctgaggcaggagaatggtgtgaacccaggaggcggagcttgcagtgagccgagatcgcgccactgcactccagactgggagacagagcgagactccgtctcaaaaaaaaaaaaaaaaaggcagcacccagggctcaggttcaagccttagcccctacttccctaccacgtggcccctgcagctgcttcccggcctgagcttcgctgagagccctcatttgcaaactgggtgatcagtgccctctccacagactggctggagattaaatgaagtaatgatgcaaatacctggcaaatcaccaacaccaaggaacaccgtctgcctttcctcccctggccacgacttgacttgggccagcatcagatggggtgggcgggatccttcttgcagctggtgtatgtgtggtcctgttggtacacagatgctgtcctgagcagatggcatgtgatgcccgcaccagccgttctggggtcacgtgcaagaggctggctggaaatcatgccaggcatgctcttgccaccagagacctcttgccctgttctcatgtgccccagagcccagtcttgggcctccccttgacgctccccttcgtgccccctacctgtggaaggtctcttctgactgcccctgtcctgttcccaacagggtcaggccaacaaggtgaagaaactctccatcgttgtctccctggggacagggaggtccccacaagtgcctgtgacctgtgtggatgtcttccgtcccagcaacccctgggagctggccaagactgtttttggggccaaggaactgggcaagatggtggtggactgtgtgagtgtgggcccctcccccaggccacttccctcagggtctgtagcccaggtcgatggcttcccctcatcctgtggggcctttggtgttggaggagacagcagggctctgtccatcgcctttagccagctggagggagagagagtccacagttcagagtctcagtgcggggcagggaccctcagtgaccaccagcaggggggttttcaaacgctttttagctgcggatccctttctgcaaacatagcgcagtgtagaagcccagaatggacaaaggctccagagcgggctgggcgctcaccctgtaatcccagcactttgggaggccaaggcaggcggaccacttgagcacagcagtttgagaccagcctgagcaatataatgagactttgtctctaccaaaaaattaaaaactagctggacatggtggtgtgtgcctgtggtcccagctactcaggaggctgaggtgggaggattgcttaagcccaagaggcagaggctgcagtgagctgtgatcatgccactgcactccagcctgagcaacagaaggagaccttgtctcaaaaagaaagaaagaaagagagagagagagagagaggagggagggagggaaacttcagggagaggggacatggaggcctgtcgactcagccgctaccctttcccccactcatcatccctgaaagggcactgctgagacctctgcccctctgattgcacagctgggacagtccctgcagtcccaggaaggggttttgcccgagccgctctgctgctgtgtggctcagcctgactcgaaagagcctggggctccccaggctggggctccgagagtgcagggcagggccgggcggggtgcgggccgggcggggtgtgggcccggcactcaccaaggctgcttctcaccagtgcacggatccagacgggcgggctgtggaccgggcacgggcctggtgcgagatggtcggcatccagtacttcaggtgagggctcagccgccccagcccttggccccgtgccctggcgtggtcggactcaccgaccttcccctcccagccctagtgtggactttcccttccccaagggtctgctctgttccccaagcccaccctggtcctagctggcgtcccctgcccagcctgagcatcctagggtgaccccctcctccctggcccgaacagattgaacccccagctggggacggacatcatgctggatgaggtcagtgacacagtgctggtcaacgccctctgggagaccgaggtctacatctatgagcaccgcgaggagttccagaagctcatccagctgctgctctcaccctgagggtccccagcctctcaccggccccagctgacctcgtccattcagcccctgccaggccaagcccagccactgccctcccgggcagatctgggcccaggcacctctgagtccatagaccaggcctgggagaatgccaagctgcctgcccgaggctggtcctgaaggcctgtctcccactaaccccgccttccagcactttctgtcattccaggctgggaaagtctagagccccctttggcccctttccctgactgtcaaggacaactgactcccccatcagctcaaacattaagggtacccgggcacaaccgtacccctgcccccagccccagcctccctgagggcctgccgggctgcctctgccccagcccccagcaagggcactcccaggcttcctggtgggtgcagcccactccctctgccctctgctccgttccctgggggctgggactaaagaaatgggtgtcccccaccccatcagctgggaaagcccaggccgcaggagtgggatgcccgttggactttgcccctcacactggcccagcccctcacactgccccaccccgagaaccctcagctctcaaaggtcactcctgggagtttcttcttcccaatggaagtggcttaagagccaaaactgaaataaatcatttggattcaagttca

SEQ ID NO: 15725 - DNA, 70254 bp, Homo sapiens
ggcccgtttgtttgcggaagtaggaggaagtagaagtgctgagtaagccgaggtgagtgacctcgcgggtgggcggggcctgggggtccgttccccaacttcctcggcgctccggactcccaagtctccgccggaccctcctttggatattcctcgtgtctccgattctgaggcatgtcctccattaacccttatgtgactccctgagtgcccccaccttccatcttttcatccccctgcgtccccaattcccatcccgagaccgcccgtgtctcatctcgaacttgtggaccccagggaccccagcttcgaccctgagtttctcccctgaaccccagtctcctccgtgtgtctccctcagtatccctaacttcccgagtcaatccatctcttctctttccccgaccctcagtgcctctttaggccccattggccgtcctaattttccttcctgtgctcctctaagtgctcacttgattccccacttcacgtccgtctccacctttcgtggtgcctctactcatttctcactccctgcttctcctgcctttcctccctgctttttttccttgcctttcctctctcgcgtgcctccagacctgcccccgacatgctccctccttcccctcagcctggccaccccagagtctcccacccctaatcctgtgtccacctcctgctcccacagatgacttggaagctggtgacagggagcatgtgaccagggtgatcatgggactgggtcggggcaagcctgtgggtgtgggacagggagggcacagggcaaggggacctgtggccgtatttttaatgggctacccacatgaccccaacgaatacctccccctagcttctgggtctttccctcacctgcctcttacccgcccaacaggatgtcaggcaggttcggtttggcaacgttgaggctgcacccttgggctgaatgcattgtttttgaatgcattgtttttgttagagtttctgcctggagtttggaacctgttttctgtccaagtctcagtttcctcatctgtgacaggggaactgtacctcctgccctcgtaagtctgccatgaggttcaaaatttgaatgagaaaatgtagaaggtaaagctttataaccagtatggccctgtacaaatacatgattttactgttgggtcataggcagaattgaaaggagtggaaagggaaagggctagaatgagaagacaaggagagaaggatgagcaggaggtcccttgtctttcagtgtatcatttggcagtgtttgttcatcacctcttgtgagtcaggctcttctgtatatgttctcttcaccattcattcagtcatcgtttatctaacaaatatttacggactgtctgatgttctaggctacccttggtgtggccaatgatattctcacttcacatgagaaaaagagggcgcatgagttgcttgaggtcacaccgatgaggttgaagctggaatctgacaccagagcctgtgtgattgtcctgatgtgtaaggtttgctactgtttaggacacttcttgttccttccgtggattactttcttgttacatgagagactccccaaaagggagtttccctcttactcagcagaatgacatcactaagagatacagaaaggagaaatttaaatactctgtgtgtgtgtgtgtgtgtgtgtgtgtgtgtgtgtgtgtgtgtctgcagacatctattgggtgtgtgtgctgggggaagtaggtaggcaaggagtaaggggccgtagtgaagagtgtgttacaaacttcactttgtagagggtggctccctgggagaatatgttctgtgtctttcacagtggattttgatagggtcatgtcttaaatgcctcttctcgttttcggatggtgatctcatccagtcttatttctttaagtgccgtctctattctgtcagcccacaaatttatatccccagtccagtccagacctttccctggaatgacatactcaaatctagttgcttactcagcacctcaaacttaggcttttcaaacttgaagtatttatttattgatttatttattttttgagacagagtctcactctgtcacccaggctggaatgcaatggcacgatctcggctcactgcaacctccacctcctgattctcctgcctcagcctcccaagtagctgggattacaagcatgcgccatcatgcccaactaatttttgtatttttgtagaggcggggtttcaccgtgttggccaggctggtctcgaactcctgatctcaagtgatccacctgccttggcctcccaaagtggtgggattacaggtgtgagccaccgcgccaggcctcaaacttaagagtttagaattgagctcctgttagttctgccctccatccctgaccccactcttcaccaaaacatgtccctcccactctctttctcatcttaggacataggagtattgttcattcagttgctcaggtcaaagctgtgagattatctatgatgcctctctgtttcttaccccacacccagccagagtgatcttgttaaaatgttgtttctttgcagtggcctctcctctcatggcacatgcctggccccctgttgcctctctgatgtcactggcttccttgcttttcctggaactcgctaaacatgttccagccccatggcctttgcacacgctctctttgcctagctattcatatgactttcatctctctccatcaggtatttatttaagatcaatttcttggtgaagacttctctcctcacccaatctaaaatttcactctccacctcagcacttcctatccccattctctggtttttctcctcagtagttaattgtcatctaaaacctttgtaaatatttacctgtttatcttctttattattagtagctctgtctaaaatataagttccaggatgtcagggattttgtggggttttttttggttggttggttgttttggttttgagacagggtctcactctgttgcccaggctggagcgcagtggtgcgatctcagctcactgcagcctccgcctcctgggtttgagtgattctcccacctcagtctcccaggaagctggaattacaggtgcacgccaccacacccagctaatttttgtattttttggtagagatggggtttcactatgttggccaggccggtcttgaactcttgacctcaagtgatccacccgcctcggcctcccaaagttctgggattactggtgtgagccaccgcgcccggccttgttttgttttaagacagggtctcactgtcgctcaggctggattgcagtggcacaatcacagctcactgcagcctcgacctgctagacttaagcaatccccccacctcagccaccttagtagctgggacttacaggcatgagagataccatgcctgggtaattgttaagtttttgtagaggtgaggtctcactatattacccaggctggtctcaaagtcctgagcttaagtgatcctccttccttggcctcctaaagtgctgggattacaggagtgaactgccgtgcctgaccagtctgttttgtttacgattgtatcctcagcggttagaacaatgcctgccacaatccatctcagtaaatatttgtggagtgagtcataacatgggccacactgtaccgtgccaccagcccaaagatctcttaaagtcacccctgtctcatgtgcttgggagctccagtgacagtttcggggcagtttgcttccagctgtggtccagccaagcggagtgaatgaaagagatgctttttccttttgtgaaaggacgttttgctctggctcacgtgagcagcagtgcattttgagacgagggccttggcttttggaatctaagagcctgttgagcaagcctcgctcagccaccttctttcagctttctcctgaaggcagtttgaggattaagagcctgatgctctggattccacctaattgggttcagatcctggcaaactgtgtaacctgtgccccagtttcctgtgtaatgtggagagacctggaccttttcttacaggtgtttggagggttaaatgtggcaattcggccgggcgcagtggctcatgcctgtaaccccagcactttgggaggtggaggtgggcggatcaccggaggtcaggagttcaagaccagcctggttaacatggtgaaaccccgtttctactaaaaatacaaaaaattagccgagtgtggtggtgcgcgcctgtaatcccagctagtctggagactgaggcaggagaatcgcttgaacccgggaggcagaggttgcagtgagccaagatcacgccattgcactccagcttgggcaacaagagtgaaactctgtctcaaaaaaaaaaaaaaaaaaaaagtggcaatttacccgaaactgtggtgaagcgtctggcgccctgtgggtgctgggcagcagtgggtgctgatggggtgtgaggggatgggatcaagccctttcccactaacttaggaaagaggttggaatgagctggggtcagagggaacatttgcggggacattttgccgggaggctgccttggaggttcagaggctcagatgacccctgtgttcattcagtgttttctcacccacagattgagcacctgctgtgtggccagccctttgcctagtgctgttcaagagtcagaggacataggcaggcaatcccccaccacaacctgccaccccatttcctctcttggggccttgatttctccacatgccaaacagggagaatgattgcaccttccttgtttctttttttttttttttgagacagtctcactttgtcatccaagctttagtgcagtggcatgatctcggctcactgcagcctctgcctctcgggttcaaagattctcctgcttcagcctcccaagtagctgtgattataggcacccaccatcacgccaggctaattttttttgtagttttagtagagatggggtttttttctcacacgttggccaggctggtcttgaacttctgacctcaggtgatctgcccatctcaccctcccaaagtgctgggattacaggtgtgagccaccgcgcccggctgcgccttccctgtttctttgtgagcttggaggtggatcacaagtgtgaaaccctttgccaaccgtgaggcatggtggccttgtgagaggacggaggccggtgtgtggtggcatgctcccgtgctgtgtggcacagacggagctacaggaaggaagttggggcagcttggcactctgagtggaccctgagtttccagcctgctctgtcttgactgggtgggaggagggtgctcaggagggtgtcactgctgccaggttctgctgccaggaccatccaacagttgttccaatcatgggacatcctgtcgtcagcagctggggctcgtgaggcctgatttccacctcgggcagttctgtgtgtgctcctggaatcccccacgtggccaagcctgtgaggtctgcttcctggcctgctgcctgtgggttcctgtcacgcacctctcgggcagctgtccggctcctctgctctcggcttagtcaagaaggaagcagaaggcttggagtctttcctgcttggactaggagtgagctcagcctaagtgccctgactatatataaagctgaactttccagaccgaagcctggggatggatcagtccgatcacttagggccgctcctgaaggagtgcaggtgctagatacaggttctcccggtggaggagcgaaccccttgtgggccgttagctactggtgggatttgagcatggtatttccctatccgttgtggagaggagcatggcagctcagagtgggtgggaacagtgtgtggtccctgttatcaccttcaagggaataaagtgtgtctgggggcttcagaggtgctggccccatgggcttataggtggttcattcattcattctcattcattcattcaccaaacttattaaacacccactgtgagtcaggaacatcatgccaggtgcttagggaaacaaatcaaagcgggttgggtgagcagcccaagccaacagatgcacccccattctcacatggtgtgtgttcctgtgggctgggccctgggtggtgtggggtgctggggagaagaggaaggcacaccaggctgcagggcggaggtgcgggtatgaattttcagaggagatggcacctgagctgtatcttcatggataagaagagatttgttcatttgtcctttgtggagcacacattcaggttaagaaagtggggaggatgggctacgctgatggagcgtatgtgtggtatccccaagtgcactgagacacgagtttgacgtgttctgggaagatcgatggtgcggcgtggctggagtagaggtgagggatgagttggaggggtgagttgggccagctctcatggatgctggagtctgggctttccctgggaggtcatggggcgccactggccagggtcagcagggagacctgcagctggatttgcatcgtacagtgggcatggaggggtgtcaggctgggttgggaaccgtgcaggctggaagggcactctggtgctctgagcattcagagggggcagctgggccttgaaggatgagcaggggctccagcaggaactggagagcgcattccagggaggacgcaagtgcaggcccctttcactacagaaaagcagttttcacacagaccttccaaaggggaggagaggggactgcctgggcctggcagctgcggcaggtagcagcaatcagagggcagggaccgctcctcccgtgcctgagacctgcccagggtccttcagggaattcgtagctgaggaggaaccagatttttgggactgagttctccctcaccacccgctctgagccaccctcttggtcccttgtcctctactgcacttcttccggggcttggctcctcgtcatgagaggagcttccctgggcatggcgaggggcgtgactgacatagcagccctggacaagtggctccaggtgacctgtgttcacgttgatcacagcactaaccacggcccctcctctcagcaccttcccctctcgagccgtccagtcccagtgaaaatgctcaccgttcatgggtgggctgagcaagcccctgatctctgccttcctccgtgttctgatctgcttcatctgctgtgaaggcctctcgccatttcccccgctggcaaactcctgttcttcctggaaagttcagctaaaaagtcatcccctttaggggtccttccctcaggggaccgtgcacttggcgagacagggactggtcttgggtctctctgttgactgttttatgaacccaggtagtcacttccagggaactcatcagagatgctaccattggctccaatctccctctgttcccactcgaggttttttgtttcttcgtttgtttttctttctttctttttttttgagacagagtctcgctctcgcccaggctggagtgcagtgacatgatctcggctcactgcaagctccgcctcccgggttcacgccattctcctgcctcagcctcccgaatagctgggactacaggcacccgccaccacgcccagctaattttttttgtatttttagtagagacggggtttcaccatgttagccaggatggtctcaatctcctgatttcgtgatccgcccgccttaacctcccaaagtgctgggattacaggcgtgagccactgcgcccagcccgtttgtttttgttttttggtggacatcaactttaatttgccctttgttttgttttgtttttgaggcagggtcttgctctgtctcccaggctggagtgcagtagtgcaatcttggctcactgcagtctcgacctcaagaggatcaagcaatcctcttgccttagcctcccgagtagctgggaccacaggcgcacaccaccatgcccagctaattttattttatattttgtagagacagggttttgccatgttccccaggctggtctcaaattcctgggctcaagcaatccgtctgcctcagcctcccaaaatgctggaattacaggcacgagccactgtgcccggccttaatttgccctttgaacatgtacaattcagggcctctctgggcctcagtttcttgatctctgagatgggaagatgggataataatacttgttcctcccgtccttcagctcctccaggggaccctcacaccagcacactctctgtcagtcttccctcaatgaacccagcaggcaagcttggttttgacagaggatgggtgagcagagataaggaaaacggccagaaatatctggcttccctcagcaggggcaccaaaattggtacctggaaattgcctggcttggacaggcagaattgtcactgtcaacccccaccaccaaaggtcttgggtctttgtctttctgcttgtggtgtttgagagagctgcttgacacagccgaggtgcggtctgtgtcaggtgacctgggcatcctgggggtgcagggagaagcccaggtaaggaggaggaggggccggtcatcagtggggaaaagtgattgtctaccccacgggaaggtcaagggtaggacgctgtgagaagccagggggagagatgaagtgaggcatgatgcggggggccctcatccaccatccccctcttgcagctgtgctgggaagagcctaggctccagggtccaaggtggcagggacagaaggaagcacgtgtgagcactttctccctgctggcccgccttcctggttggcaatgccgtgagtgttccaggatgtggccccgtggctgtcatttcctttcttccacctagtgataacaatggccactgtttgtgtgcccacagtcggcctgtgtcccagacaccttccctccattgcgtcatctcgtcctcctgcctaccctgaaggctggatgccagccaagcctgtcgtttctgtggccatgctgtcgtgggtgtgtggggggcatcccctagccccaggctctggtggggggtacacaggctgggccattgacgaaggggtgtgtggaatctttctttgatttcactgcacccctggtgactttctccctcaatctgaggctcatgggtgctggatgctcttgactctctgcccttcctgggcgcacccctccgcgtccctgtgggcccgtcctcggggtagcctctctgcgctcttccaggccaggcctgagtcccacaggtccccatcttcccggctgcagcccccagaggctcagcctatactgctacttcctttgaaaactataatcgctttacatagcatctggaaaatagggaaaaggaaaaaacaaaagcccataaacccagcaccctcatctactcaatggcatgttttctgtcagtctatcttggtttgttttctatcaggctttgttttttctatgcataatatttactcagttaaatttttgttttgacaaactttctgtgagccaagcttgtggacggagatgaaaagacgagcagctgcctttgagaaactcagactctgggccagcccatctgggtgccagctttcactgctccacccactagctgggtgaccctgggcccgtgactttacccctctgttctttggtgttctcatatgtaaaatgaggataataatagtaaccagttcatagagtggttgtcagacagaatgattaatgtacgtaaagctttcaggatggtgccagcaagatgcacaggagtgtttggtaggaggatgacgaagcttaccgtctggcaggaggggcagttgtaacatgctgggctgtgatagtacagatgtgtttaaagtgagggagagcccagagcaaggagagagaacctggcatctggtgatggtgtatcaagaacattttaggccagacacggtgactcacacctgtaatcccagcactttgagaggctgaggcaggcagatcgcttgaacccgggcgttcgagaccagcctgagcaacgtggtaagaccctgtctttataatttttttttttttttttctgagacggagtcttcactctgtcacctaggctggagtgcggtggtgctatcttggctcactgcaacctccacctcccgggctcaagtgattctcctgcctcagtctcccaagtagctgggattataggtgcccaccaccatgcccagctaatttttttatatttttagtagagacggagtttcaccatgttggtcaggctggtctcaaattcctgacctcaagtgatctgccctcctcagcctcccagagtgctgggattacgggcatgagccaccatgcctggcctctataaaaattgtttggaagaaattacctaggcctggtgatacacacctgtagtcctagctactcaggaggctgaggtggaaggaggtagaggctgcagtgagccatgattgagccactgtactccagcctgggcaacagagccagaccctgtttcaaaacaacaacaacaaaaacatttttaaggaggaggctgagaaccacgagaaccaagcttggatttgaagaaggatcagggctttctcagacagaaaaggagaggaagaacattccagatagacatcattgagagatggcactgagccttgtaatgggacactgcgaacttttcttcagttgttatgatctttttttttttttttttgagacggagtttcgctcttgttgcccaggctggagtgcaatggcgccatctcagctcaccgcaacctccgcctcccaggttcaagcgattcttctgcctcagcctcccaagtagctgggattacaggcatgcgccaccatgcctggctaattttttgtatttttagtagagacggggtttctccatgttggtcaggctggtctcaaactcctgacctcaggtgatccgcccgagtcggcctcccaaagtgctgggattacaggcgtgaaccaccgtgccttgttggtataattattagtattgatcttttttccttttcatgtgcctcttagtgggccccttgcttttgtcttccttctgtccccagggttgatcctgtgctcagcacataggccagggaagaatgtggctgtgacccagtgtccactcagatgtcctctctcccccagggcacccatactctgtccttagtgtcttttgtctggtgacatcttggcacagaggcagagggcggcctccgtctgattggcgcctggctttggtgacagtaccttaggaaggcagtgtattttctgggaacctaggaaataacaaggtatctaattccatcatcaacactggggacaatttccatggcagaaactatgactctgaatatgcagcgtaaagttaccacccagacactgctgctcctgagtctcgaatggcatcttctgcaggggctcccccacctgcccctgcagaaggtgcagttcgttcatttccaaggagcttgcttttgtgtgctgtctctcggagctctttgggaaacctgtggtagcaggaaacaaaggatttagaccaatgccgatgatccccttgctccgatagagtgtgacatgatgctggtcaccttttggtatctaggaggggggacattgattttgtttgcggaagtgaaatgatccatgctggcctctttttttttttttttttttgagacagagtcaccctatcgcccaggctggagtgcagtggcgcgatctcagctcactgcaacctctgcctcccgggttcaagtgattctcctgcctcagcttcccgggcagctgggactacaggcgcctgccaccacatctggctaatttttgtatttttagtagaggcagggtttcgccatgttggccaggctggtctcgaatttctgacctcaaatgatccgcccgcctcagcctctcgaagtgctgggattacatgcctgagccactgtgtctggtccatactagcctctttgagtgctgaaaggttatctctgtaacttatttagtgagaaccctccatttgcccagggcattactgcctataatgtatgttcacatgtgctatctcctttggtcaataccacacactacaggtgaggaaactgagtctctgctgggacactgggtcaggaagcaggcagttaaggtcacctgtgcacagtggcagcacagggggacagccttctaggtagccagcctggcctgagggttctgtcacttttacctcccactcagtgttgtttctctttctttcccctccttttaagatccctccaggcccaggatctggggacaacgctggtggggagtgatctgggtgtctgtgcaggaaaccgctgcactgggtgagatgggcatgggagactgtgcctggctgaccagagacctcgttttcttccagacagagggggaagacggtggggcctccccacctgccccgcagaagatgcagttctttggccgcctggtcaataccttcagtggcgtcaccaacttgttctctaacccattccgggtgaaggaggtggctgtggccgactacacctcgagtgaccgagttcgggaggaagggcagctgattctgttccagaacactcccaaccgcacctgggactgcgtcctggtcaaccccaggaactcacagagtggattccggtgggtgatgctcagcgggaacatacttctctcctttcactcccccacgtctcggattggaggtcttattggccgagaagcagtttctttgagtctctgtctgaggggtctggagaggggtgggagagaggggagactgtactcttggaccagagggaagggcttccgagactccacacttctggcccatcagtgtcccagcacgaggctgaggatggaagcctgggttgtttctggcctggaggctcgacctatatggacaaagggaagaaggaaggacagggagactgagagtgtccacatcagataaggcccatggggagaacctttagccctggctctttatttttggttttggtttttgttttttgagacagtcttgctctgttgcccaggctggagtgcagtggcgcaatctcggctcactgcaacctctgcctcccaggttcaagcgattctcctgcctcagcctcctgagtagctgggattacaggcacccaccaccacgcccagctgatttttgtatttttagcagagacggggtttcatcatattggccaggctggtctcaaactcctgacctcaggtgatctgcccaccttggcctcccaaagtgctgggattgcaggcgtgagccactgcacctggcctagccctggctctttaagggcatggccgttctcataggggctgcccagggtttgcttaggaaggctggacagagctgttgcctcttggggcatgctgggactcccctgggcctgaagagaaggctcaaaagccaggacaggcctgagggaaccgggccaacggcagagctggttgggaaaaggggagaagcagccaaggttccaaatgcaggccccagcagtgcttggcagactggcatctagttgggctcagacagatatccctgtttccgctcacctatccatctggctgtcctgtcagccatccattcaacatgcaccaagcacctccagtgtctccagagtcctgggcttcgggccagtcctggctggcctgtgagatgacaaacatgtcctgtgtctttaaggaacgtacagtctggtgggggaggtccggtgcaaacaggcgtcatagcaccccttgaggagtgctgtgacagagggagagcctaggaaacagtgtggatcacaaggaggtgattgagagctactctgcgtctggaagagtgaggaggagcctgtgtggcagaacaaaatggataaggtcgttccagccgtgcagaagtgtggaggtgtgagcctgcaggcaggtggctctggttggatcccaggtgcatgcagggctttggtgagagtgaggctgaaggaagcagctggggactcattctgactaaagaggcatggcaggaggggtctctgaaagtgtcaggctgggggccaggggctgccaccaacagaagagcaaggcaggtatcagggccccatccaatcaggtgagaattcagagcctggctccacaaggaacctgaggcagaggcacccacagcaggtgcttgggctaaatgcagctcagtggccagtgcaggcaccagttttaatacagtggggccattccagattctgagtgcagatggggctgagcagaccgccttccagctggactcgatcaggactgaccctggacggggcaggcttgcacttgtagcttcagagctccactgcaggcacagctgaccagggcagcgggtccactccttggagagctggacagccccacttttgaggtacacggccctggggataccactaatctccacgtaccaataatcaccaagttctgtcagttgtaaaatcccttgacaggattccagatttgtctcagccagcttaagccccagtgtgggcagacctccatcccaggaggatttagtcctttgtcagcagcttcttagctacacgtaagctattctgtggtactttatagtttacaggattttttgttttcttttttttttttttttgagacagagtctcgctctgtcacccaggctggagtacagtgacgcgatctcggcttactgcaagctccgcctcccaggttcacgccattctcctgcctcagcctcccaagtagctgggactacaggcacccgccaccacgcctggctaatattttgtatttttagtagagatggggtttcaccatgttagccaggatggtctcaatctcctgacctcgtgatccgcctgcctcggcctcccaaagtgctgggattacaattttacaggatgtttttaagtatgttgggttagcacattctctgccaatccgtggaggtgggcaaggaaggcagtattccattttatgcatgagaaaatagccttgggatgataagtgattcatcccacttatacacaggaagcagtgaagaaacagaatcagtgtcttctggttcccaattcatttctctgtgctgctgtgttgtttccatgtatgtatgtatgtatttatttttttgagacgttaagtcttgctctgttgcccaggctggagtgcagtggcatgatcttggcttacagcaacctctgcctcctgggttcaagctattcttctgcctcagcctcccgagtagctgagactacaggtgcgtgccaccatacctggctaatttttgtgttttttagtagagacagggtttcactgtgttagccaggatggtcttgaactcctgacctcgtgatctgcctgccttggcctcccaaagtgctgggattacaggcatgagtcaccatgcccggctttgtttgtcttatttctaaattttattgatttatttattttcacagtcatagctctggagtcttttttatcttctcccctctaacctgctcccacccgaacctttccatttcagcagatagcatcattgcaacgggctgtgccagatccagccatcacatccacctttccagccaaagggagggtggaagggcaggatgcagaaggtcaatctccccctcctcagggacatttcatggaagttgcacgcattggccagaacccggtcacatggccacagctaactgcaaaggatgctgggaagtgttgcctgtgttgcagacagccacgtgccagtcgaaaatcagaggttctttctccctccgtcttgctgctggctcgcttctccagaccacagtcattgtgcacgtgtctcctgctgctccggctgtggcctgcactcctctcatcctcttccaagctgctgtcacagcgctgtttccagagggcaaatctgattggtcactcccctgctttactccccaagggcttcctgttttcttttatttttatttttattttcattttttgagatggagtctcgctctgtcgctcaggctggagtgcagtggcacaatgtcagctcactgcaagatctgcctcctgggttcatgccattctcctgcctcagcctcccaagtagctgggactacaggcgcccgccaccacgcccagttaattttttttgtatttttagtagagacggggtttcaccatctactcttagccaggatggtctcgatctcctgaccttgtgatctgcccgcctcagcctcccaaagtgctgggattacaggagtgagccaccgcgcccggccagcttcctgttttcttaacacatcaggtgcttaatgacttaaaagggcccagtgtgatcaagtttctgcctctgtgttctcagctcatgccgccttgtgctcctggcctttgcccaggctcttgctgtggcctggaatactcccctttctttgcctgccttccttcctcttgccctcccctgacctgcaggctggattaggagtttctgctgggcatcccatggcacccgtccctgcactggggatcctgctttcctggtaggccacagaccttgtgaggggagggactgtgtctgttgggttcatgacagtgtgcccagcccccagcaggtgcctggcgtagatcaggtttgtggaacaaatgaatgtgatatattaatttagctttagagtattcattgagggctgctgtgtgccaggccctctgtgccacctgggtggagggtggaggactgttgcattgagggcagttgaaggagtgagctgggaagtgggaggtggaggatggggactgggatgcagggtttgaggttatcaggggtcccagaagcagtaatgccaaggcctaggctgtgacctggagtgagggctgcgatggggtggggtggggtcgaggctgtggaggagggtcatcagggcactgctggagccctggggttctccagggccgggggtggtcattgcagtgttctcccagctcctctcaacaccctgcggtctgtggagagcaggcctggtgcactggacttgcctctggccagggctgagtttctgccttctaaacgatcttcctcctgtgttgccctagaggcctctggactgtcctgagtacttgacgcgtgttagagtgagcatgggctgctagccttccgctccaggtggaggagtttctgttgttcttttgctgctgttgctgcagtgagctgccaggctgagcttctggatggacctgggggatggaattaggagcttctgaattcttgggttgtataacctaaggccggagagtcccacagcactgctgctgggcggagagactggaccctgctgatacagacagcgacagcagcaggagcatctgcagtttcccagcaggtcctgcatgcctgggcttggcactagtctaagtagtaactcatgttatcctcacgacagtcccacgaggtggggtcattactgacctcctattacagatgaggaaacagaggcttgcagaatttgagatcacacagctggtcagcgtagcgattattcagaccctgtcacctggctccagaacccactcgtttacctttcttacatcagggctgctttgtagtgtggcgagctgagtggagctccacccgcctgggctgatcctggcccttcctgcctgacctatggtgcgggggccctggctctccccgtgtgagcccccaggggtcacttgtaatatgcctgtgtacactatgatagcatagatacttctgttcctggtacagattaatcatttacggctggcattgacttgtaacagatgacatttgatgaaatcaaccagcctctcactggtatctcagcagaaacagggctgtacctcccaggcatcctgggaaggatgatagaagtgtgtgatctgtgcttccctaccgggagctgacttttgaggctctctggactgggactttgccataaaactgcttatcagaaacctcagataagtggagtgccctgtgtcctggccacgtactctggggccagctcctccatccattcagtcctcccacatcccatcttcaccaagcagagtggaaagcggcaggtctctgcgagaaaaggaggctctgtacccagccttcagtgagataactttagagtggggccttgtattccctacacaggccttgtccccgacacggcctctttgcccttgcttctccttctgctaagaatgctccttcccaactccttggctggacacacggctcctgctctgtgggcctgtcctgttcccactcagagcctcagcaccccccatgtggccaagacacagcccctcttgccttaggttgccgtgggtctgtttccacatctgtttcccctccagactgcagggctcctgagggacagggcctggggccaagtctcctctgcgttcctgatgcctggtggtgtgccacgctctccgtgggtgcacggtaaatatctgccgagtggctagatgtatccatggttgctgaaggccaagtgtgttgaccagagggcgtgggaaaggctccactggggtggctggggtagagatagaccttaaggggtccagaagactccaccagctggagggaaaggccctacagagacaaggtactaggaaaggcccagaggacagaggaggggccctgtggggagcctgtgggcaggaagggcctgtgctgggctttgaaactggggactcaggtactgctctagcgtgagggtccttggcattttttttggtccaggaccccctgaggtccctggggaatgagaacaggctcacacagccactttcaagaggtttgcaggtcccctgaggcttagccacagacccctcccaccccagcagagacacagcagaggcttctgagtggaggccaggtggcttcagcctggggttctagaagggagggaagagacacacccccgtgtgtcctccagagcctcagccttctccctgaatctcccctttgcctcctcactgtaacccacacctggctctccttgaaggacccgcttgccccgcagcctcctgagagttttctctcccagtccctctcccactgggcctggaggtggggtagggtcctccttgcccccagccttgaatcttctgtcaccctacaataccacttgctgtcaccccggtgataggtatctacgagcctggggtgctcccccacatcctcaaagatgtgagcccctgactcagcgttgcctctggttcctgaccctccacattcacatgaccacgcgctggcctttatcatcgccagtgacagcagctctcccgtaaatacaagtttcaagcaccccactttccagtctctgccttctgtctttccagttcattccctctagtcctccacccacacagtgcttttccccattgacagggaattgctcctggccgcttttcccagccccatcccgttcatgtgccttgctttgtacccagcatggactccatggcctgtcattgtcactccttcacctatacttcctgcctccttgcttctctctctcttcgtcatcctggcatcaccaccccagaactgcttggtttcagttctccaccatggctaggggaacatacctttttgctgactgctctcactttctttttttttttttttcttttttttttttttgacacagagtctcgctctgttgcccaggctggagtgcagtggcacactctcagctcactgcaacctccacctccggggttcaagcagttctctctgcctcagcctcctgagtagctggtattataggcacccgccaccacacccggctaatttttgtattttttttagtacagacagggttttgccatggtggccaggctggtcttgaactcctgacctcaggtgatatgcctgccttggcctcccaaagtgctgggattacaggcatgaaccaccctgcccggccctattgctctcactttgaaatcacgacatgagccacagtgagcctatgatgtggtttgacgtctttctgcatttctctgttcacccctctcccagaaggcatgcctccttccctcccctcagcctgcagccccttcccctccacgcttactctcagctgatagccctgctgctgtctcgctgagaaaatagaaatagccagaggagaattccctctaccccatgcacacacctctgtccccgcctactccacattccctgttgtcagcaccgatgtgtttagctgagggtggtccccccattcaaggccatcatctcctgtcatctacttcttgacaccatttgaacaattatctcccctctttcctacataacactttccccttttctactatatattttttgctatggattgaaagtatccccccgaaatcatatgttgaagccccaatccctcgtgtgatggtattaggaggtagagcactatgggggtgattaggtcatgaggatggagccctcatgaatgggattagtgcccttagacgaagaggcaagaaagagatgatctgtctctgccatgtgagggcacaacgagaagatagccatctgcaaaccaggaagtgaaccctcatcaggaactctatcagccagcaccttgatcatagacttcctagcctctagaactgtgagaaataaaggttgtttaagcctcccagtctgtagttttctgttataatgtcctgacctaagttattttccatcgctatacaatgggttatttttttctttaaaaaaaaattatttcttgactctactttttcctccagagactgcttatattccactgtcttcattcttctcctcctgttttctctctttaaacttttcaaaaatagcaaaatataacacatatagagaaaatgatatacagctcagtgatttatcacaaacacctgtgtaaccaccactcgaatctagagataggacattacagcaccccagaagccctccttttgtcccctcttcccaaagaagggtaaccaataacttgccttttatgataaaggctttttttttttgagatggagtctcactgtgttgcccaggttggagtgcggtggcgcaatctctgcttactgcaagctctgcctcctgggttcacgccattctcctgcctcagcctcctgagtagctgggactacaggtgcccgccaccacgcccggctaattttttgtattttagtagagacgaggtttcaccgtgttagccaggatggtcttgatctcctgacctcgtgatccacctgcctcagcctcccaaagtgctgggattacaggcgtgagccaccgcccccggccaagataaaggcttttctatctggcttctttgttagcattttgttggcgagattgatacgttttgtgtgcagctgtctgtcattttcattgcaatagaattccattgtctactatatcacagttactcattctactactgatgaaaatttgggttatttctagtttttttggtgcatacatgcatacatttctggtagacatacctagaagtgaactggctgcattatgggccataacttgtcttcaacgttagtaaataataccgcccgtctgttttccaagcagcagtaaatggcactttctgttacttcatatcttctgttacttggtactgtcaggttttaaaattttagtcattctgtcgggtgtctagtagtatgttattgtggttttattttgcatttgcctgattgcaaatgaagttgagcactttttgatacagtgattaaccatttggatatcctcttcagtgaagtatcagctcaattctcttgactatttaaaaaataaagttgtttatctttttcttacagagttttaggaggagttttttggtacatgtgcagtccaaatacacaccttttgtcagtgatacgtgttcagctgcacacacggtgttttgcctttttattcttttaatggtatctattgataaacatgagttcttagttttaatgaagtcaaatttgttcatcttctttacggtgtactttttgtgtcttgtttaaggaagtccttctctatcttaaagctttgagaagcattccttctttctcctattttctaaaaattgttgaagatctccttccttccttccttccttccttccttccttcctttcatctatctctctctcacccaggccaaacttcagtggcatgatcatggctcactgcagcctcaacttcccaggctcaagtgatcctcctgcctcagcctcctgagtagccaggactacaggcacgcaccaccatacctggctaattttaaaaattttttgtagagacacggtctcatcaagttacccaggctggtcttgaactcctgggctcaaacaatcctcccacctcagcctcccaaagtgctgggattacaggcatgagtcacatgtctagcctgtattctttctttcttaaatgtttggaagaattcatgggtaaaaccatgtgaccctggagtttatttgtgggaagcttttaaaacatggattcgatttctttaacaaatataggactatgagattttcatctcatgtcggtttgggtatgttgtgttttcaaggaatttttctattttatcgaagttgtcaaatttgtctgcaggtccccttatttcctttttaatgtatggaggatctgaagggatggtactttgtgttgtctctatttcttgtttggttttgctagtgatttgccaatttaaaaaatctttccaaagaaccaacttttggctttgtttattttttgaaaacctgagtagctgggattacaggcgcccaccaccacacccggctaatttttttatttttagtagaggtggggtttcaccatattggccaggctggtctcgaactcctgacctcagatgatccacccgcctcggcctcccaaagtgctgggattacaagtgtgagccagtgtgcctggcaagccgctttttaaatggcaccaatcccattcatgagggcagagccctgatgatcgaattacctcctaatggccccatttcttaatactatcacactgagaattaagttttaacataagaattttaggaagacacaaacattcagaccatggaacatatataaaacagttgtcctaccaactaacagaatacacattcttttcaagaacacctatataaaaattatagacactgacctatgctggccataaagcaaatatgaacaaatttcagatacctgaagagatttagactatgttctccaactacagtgcaattaagctagaaatcaatagcaaaaatgtaactataaatgagcccgtatgtttgaattttaagcaagatatatgtaaattatctatggttcaaaaaagaagtcacagtgaaatttagaaaatatcttgacgtggcgggttgcagtggctcacgcctgtaatcccagcactgtgggaggccaaggcgggtggatcacctgaggtaaggagtttgagaccagcctggccaacatggtgaaaccctgtctctactaaaaatacaaaacattagccaggcgtggtggtgggcacctgtggtcacagctacttgggaggctgaagcgggagaatcacttgaacccgggaggcagaggttgcagtgagccgagattgcaccactgcactccagcctgggcaacatgagtgaaacttcatctcaaaaaaaaaaaaaaaagaaaagaaaaagaaaatatcttgacccaatgatgatgcaaatactacgtatcaaacttgtaggatgaacttccacttctggccatgacagaggagcctgtatcagactagccttcctatttatatatttatttttgagatggggtgtcgctctgttgcccaggctggagtgcggtggtgcaatctcagctcactgcaacctccacctcctgagttcaagtaattctcctgtcccagccttccaagtagctggaattacaggcgcccaccaccacacccagctagttttttatatttttagtagagacggggtttcaccatgttggccaggctggtctcgacacctgacctcaggtgatccacctgcccctgcctcccaaagtgccgggattacaggtgtgagccactgcgcctggccgtgagtgacctttttaatgtgttgttgaatttgatttgctggtattttgttgagaagttttgcatcaatatccatcagggatactggcctgtagttttctttttttatatgtctttgtctggttttggtgtcagggcaatactggcctcatagaatgagtttggaagttttctctcctctgtttttcataatagtttgagtagggttggtattagtttttgtttaaatgtttggtaaaattaagcagtgaagccactgggtcccaggcttttctttgctgggagacttttcattacagctttgatctcattacttgttattggtctatttaggttttggatttcttcacggttccatcttggtaggttgtgtatgcctaggaatttatccatttcttctagggttttcaatttattggcatataattgttcacagtaacctctaataatcctttgagtttctgtgatattggttgtaatatctcttttgtcatttctgatttttttgtttgggttttctctctttttttgttagtctagttaaagatttattgattttgtttatcttttcaaaaaactttattttgttgatcttttgtattgttttgtttcaatttcatttatttctgctatgatctttattatttcttttcttctactaattttgggtttggtttgctcttttctagttctttaagagacatcattagattattttgaagtttttctacttacttgatgtaggtgcttataggtacaactttcctcttagtacttctttccctgtatctcacaggttttgatatgttgtgtttccattatcatttgtttcaggatgtttttaaatttccttcttaatttcttcattgaccattcaagagcatattatttcatttccatgtgttcgtatggtgtgcaaaataccttgtttttgatttgtagttttatttcattgtgatcacagaagatacttgatatgatttcaaatttaaaaagtaatttggctgggagaagtggctcatgcttgtaatcccagcgctttgggaggccgaggcaggcagatcacgaggtcaggagatcgagaccatcctggctaacacagtgaaaccccgtctctactaaaaatacaaaaaattagccaggcatggtggcaggtgcctgtagtcccagctactcaggaggctgaggcaggagaatggtgtgaacccgggaggcagagctggtagtgagccgagatcgcgccgctgcactccagcctgggtgacagagcaagactctgtctcaaaaaaaaaataataacaataataataatttaagacttgttttgtggcctaccatatggtctatccttgagaatgatccatatgctgaggagaagaatgtgtattctgcagccgttggatgaaatgttctgtaaatatctaataggttcatctgatctatactgcagactaaggctggtgtttctttgttgattttctgtctggatgaactgtctaatgctgaaagtggagtattgaagtctccagctattattgtattgaggtctatctctctctttagctctaagaatacttcctttatatatctgggtgttccagtgttgagtgcatatgtatttaaaattgttacattatcttgctgaattgacccttttatataatgaccttctttgtctctttttatagtttttgtcttgaagtctgttttgcctcatagaatagcatagctattcctgctcttatttggtttccatttgcatggaatatctttctccatccctttagtttcagtctatgtgtgtctttacaggtaaagtgtgtttcatgtaggcaacagatcactgggtcttgtttttctatccgttctgccactctgtgtcttttgattggagagtttagtccatttatgttcaatgttattactgacaagtaaggacttactcctgccactttattaattattttcttgttgctttgtgatcttctttctttccttcctgttctccttttagtgaaggtgattttctctggtggtatgttttaatttcttgctttttatttttttgtgtgtatctgctgtatgttttttgatttgaggttaacatgaggcttgcaaataatatcttataacctaatattttaaactgatgacaccttaacactgattgcataaacagacaaacaagcaaagagaaaactaataaaaactctacattttaactttgtccccccactttttaacttattgtactgtttatgtctgaaaagttgtagttattatttttgattggttcctcttttagtctttctactcaagatatgagtggtctacatatgacagtgttataatattctatatgtttctgtgtacttgctattaccattaagttctgtactttcaagtgatttcttattgctcattaatgtccttttctttcagattgaaaaactccctttagcatttagcagtatgtgaactgcatttttcaagtccagaatttctgcttgattcttttttttttttttgagatggagtcttgctctgtcgcccaggctggagtgcagtggcgcgatttccgctcactgcaagctctgcctcccgggttcacaccattcttctgcctcagcctcccgagtagctgggattacaggcgcccgccaccacgcctggctaattttttgtatttttagtagagatgggatttcaccatgttagccaggatagtctcgatctcctgaccttgtgatccgcctgccttggccttccgaagtgctgggattacaggcgtgagccactgtgcccagcctgcttgattcttttaaattatttcaatctctttgctaagtttatctgttaggattctgaattccttctctgtgttagcttgaatttcactgagttccctcaaaacagctattttgaattctctgtctgaaaggtcacatatctctgtctctccagaattggccactggtaccttaattagttcatttggtgaggtcatgttttcctgtatggtcttgatgcttgtgatgttcgtcagtgtctgggcattgaagttaggtatttattgtagtctttgcagtctgggcttgtttgtatctgttcttcttaggaagactttccaggtaataaaagggacttgggtattgtgatctaagtttttggtcactgcagccatatctgcattagggggcaccccaagcctactaatactatggctcttgcagactcgtaaaggtaccacttgggtggtcttggataagatctggaagaattctctggattaccaggcagaggctcttgttctcttcccttactttctcccctaaaagtggagtctctctctctgtgctgggccgcctggagctaggagaggggtgacacaggcacctctgtggccactatcactaggactatgctggctcagacctgaagccagcacagcactgggtctcacccaaggcctacagtctccactgcctggctactgcctacgtttgcttaaggcactagggctctacagtcagcaggtggtgaagccagtgagattatgtccttcccttcaaggcagcaagttccccctacccccatcctgggaaggtccttagatgccatctgggaggcagggcctgcagtcagaaaccttagtaatctccccagtgctctattctattacagcctggctgatacccaagccataaggcaaagtccttcctgctcttccctcccctttccacaagcagagaagtctctctccatggccaccactgccccagccctgtggcagtgctgccaggccactgccaacgttcattcagggcctaagggctcttgaagcaactgaacactgccaggcctgggactctccctttagggtagtgggctcccctctgacccagggcaggtccagaactgccaccccacagccaacacttagaatctgggaccccaagagccctcttggtgctctgccacactgtagctgagctggtacctaggctgatttttgctttttatgaaggtacttttttgtgtgtatagttcaatttggttttcctccagggaggacaattggtggaggtttctatttgggcatcttttttttttttttttgagacggagttttgctctttcacccaggctggagtgcagtggcgcgatctcggctcactgcaacctctgcctcctgggttcaagcgattctccagcctcagcctccccagtagctgggattacaggtgcctgccaccatgcttggctactttttttttcaattaaaaagtaaactttaatgtcgaaaatgcaaacttggggaaggcagaaagatcacacacaaggctgtcgcttcacacttggaaggttgcacggcggccaggagaggcactcctcacttcccagacagggcgggggccgggcagaggcgctcctcacttgccagacggggcggcggccacatgcctggctaatttttgtatttttagtagggacggggattctccgtgttggccaggctggtctcaaactcctgacttcaggtgatccacgcacctcggcctcccaaagtgctgggattacaggcatgagccaccgcgcccagccctatttggccatcttgctttgcctccaccttcatttgataacagaacacccccatgtaaccaccaccacaatcaagatataagacatttctgttattctccaaatttccttcaccctcctttatagtccatggcacccaccccatccctgggcaacacctatgtgcttcctttttttttttccccgcaggaggacgtcttcctatacctatgtgcattccatcactgctgcttttaatcatatagcgtgtagtcttatgagtctgactttttcacttagcataatgcttttgcaatttgtgattgagcgttttcatatgattctgttttttctgtctcttagcttggaagttatacactttttagtagtaactgttgggagatcgttctccaagagtctctctcatatttccatacatcctgctagcagagacattgactacctgtttttgtctgtttagtgttgctataaaggaatacctaagtctgagtattatacatagaaaagaggttttatttgtctcatggctcctcaggccatacaagaaacatggtgccagcatcttaccagtgtcacatggcaagaaaggaagtgaggaagagaaaataagttgttaactggttgttaaaaagtgccaggcacgggccaggcacagtggctcgtgcctgtaatcccagcactttgggtggccaaggcgagtggatcacctgaggtcgggagttttgagaccagcctgaccaacatggagaaaccctgtctctactaaaaaaaatacaaaaaaattagctgggcatggtggtgcatgcctgtaatcctagctactcgggaggctgaggcaggagaatttcttgaatccaggaggtggaggttgcagtgagccaagatcacctgggcgacaagagcgaaactctgtctcaaagaaaaaaaaagtgccaggctctttttaacaaccagttcttacaggaactaatagagtgaaaactcactcacccccaccccacagggagggcattcattcatgagggatccacccctatgacccaaacacctcccattagccccccacctccaacattggaatcaaaatttaacatgaggtttggggggcagaaatccaaattatagcactacctttgttccaggctaccttcaaaggatgtttatacagcaaacagccttggaaaatagagttagggtctccttgtagagcacagggtaagtttgcttacttttcagcataatcaagattgtgtcttcttctggagcaaaactttgacaacaacaagcggggcaaagtctgaaaccttttgcacatcttgacagaaccttagagattacgagatttatctctgccttactcaaggtccattagtatcttccagaacaataagttggtcttagaatcctttagctatgtattcccttccaggcttcgatgctgtgtgctgttgttttatttagtttttattttaaacccaacaagacgctataccatcaatacttatttagatccccccacatatttaacttgccatggtgcttcattctttcatgcctctttaagcatccatctaggatcgtgttcattccacatgaagagaaagcttttggcccagcacgatggctcacacctgtaatcccagcactttgggaagcctaggcgggaggatcgcttgagcccaggatttccagaccagcctgggctacgtggcaaaaccctgtctctactgaaaatacaaaaaattagccaggtgtggtggttcacgtccctgctactcgggaggctgaggtgggaggattacttaaacctgggaggttgaggctgcagtgagcgttgattgcaccactgcactccagcgtgggtgacaggagtgagaccatgtctccaaaaaaaaaaaagaaggaaagaaaaagcttttgtatttcctttcgtgtaggtctgctaatgacaaagtctctgggttttttgtttgactagagaaatgttttaattttaaccttattcttgaaggttttgtttttgttttcattttgttttgtgtgctaagtacagaattctcattggcatttatttatttagagacagagtcttgctctgtggcccaggctagagtacagtggcacgatctccgcctcccaggttcaagcgattctcctccctcaacctcctgagtagctggggctacaggcatgcaccactacacctgactaatttttgtatttttagtagagacggggtttcaccgtgttgcccaggctgatctcaaactcctgagctcaagtgatttgcctgccttggcctcccaaagtgctgggattataggcatgagccgccgtgcctggccagcatttattttcttttcagctctttaaggaagtcattccattatctctgggttccattgttgagaagccagctgtcattctaatggttgccctttgaagataacttttttccctctgctattttaaatatttcctccttgtattttattttcaacaggtgtaatgtggcacatatatcagcaattgttatgttacatacaatacatattgtgcaacatatgtatcattatcagttattgctgtgtaacaaactactccagaacacagtggcttataaaaggaatcatttatttagtccttaaatctgcaatttgagcagagctcagtgggaaagcctcagctttactttatatggcaccatataaggtaactcgcaactggcaagttggtgctggctgttggctggtagttcattcagggctcagggcccaggaccaagagtcgtcaccatggcttgcttcagcctccttgaggcatgatggctgggtcccaagagaagagaaatagaaacttccagtctcttaaggcattggtctggaagctgggacggcatcacttttgccatattctgttggtaacgcagttacatcgccagattaaagggtaaagagatacaaattcccactgctcagtgcaaggaatatcagtgattttagggggccctgttttaaaacccctacaaggtgctaagcgtggatttctggggctttcttgttttttgtttttttctatgtgtttttttttttttttttggtggtggggtcagggagggcttatagggtatgttaaatcagcagaataattttatttatttatttggagatggagtttcactcttttgcctaagctggagtgaagtagcgtgatcagagatggagtttcactcttttgcctaagctggagtgaagtagcgtgatctcggctcactgcaacctccgccccgctggttcaagcaattcccctgccttagcctcccaagtagctgggattataggcacccaccgccacgcccggctaatttttatatttttagtagacatggggtttcgccatggctagtctggaattcctgacctcaggtgatccacccaccttggcctcccaaagtggtgggattacaggtatgagccactgtgcctgacctataatgttttttaaaaatcagttttggaaagtttgcagacattaacttttcaaatgtagcttccatttgattctttttctactctgcctctgatcctccacttatgtatgtatgctagatcttttattagatagtctgtgtctcttatgtactctactatattttgtattcttctgtctctccatgctttattctgtttactctttcctgattatattttttaattttgtaatttccatttgatgcttttttgatcattcaaaactcttcaccaaaattctaaatttccttttttaacctctcgaatgttatcacagttactttaaagtctattttggataacttaaatatttacagtcccctcacagatatgtttcttttgtatattgtttctgttggttttctttcatgtcttatctccacatatgcctggtgagttttgattatgtgttggtcattgtatttgcaagtatgctcgtagaaataatctggaatggccgggcgcagtggctcatgcctgtaatcccagcactttgggaggctgaggcaggtggatcacgagatcaggagatcaagaccatcctggctaacatggtgaaaccccatctctactaaaaatacaaaaaattagctgagcatggtggcacgttcctgtaatccctgctactcgggaggctgaggcaggagaatcacttgaaccaggaggcagaggttgcagtgagccgagatcacgccactgcactccagcctgggtgacagagcgagactccgtctcaaaaaaaaaaaaaaaaaaaaaaaaagaaataatctagagcctagtttgatgtttccttacaaagaatgaatttatttttgcttctcccattgcaactaggataacctcagtctagtttctggaactgaaatcacttgaggctgaactgtggtctctgtgagagcgtgtctgtgtatggctcacccttattcctaggctacgtagttctttaggaccctaacccaaagtaagagatgttcatcagggctctcctcttggcagacgcctgggctccagtccctgtgtcctgagccccatgaggctgttactggtgctgctcgtctgcccatcctctccagtaacagccacctgaacactgcaattcctgggtttccatcattccttccagcctggtgagtcatcagtgtcttttgaggtatccagtgcctgccagcagatgttttttaataatttgtccagcatttctggctgtcctcagtaggtggtctgtttcacattccctagtctgctgttaatggaaagtggaagttctgagagagaatcatcgttcccgtcagcattcaaatgcctgattacactttccccattcgctatcctttcctttatttgctcctcaccacagcaaaactcctcaaaaatatctatctttgcaatcttcagattctcacattgtgtccttaaacccactttaatcaggccttggttccctccattccactaaaagtaatgttgtcaaggtcgtgcatgcctccgtgatgctaattccagtgatgagttttcagttgtcattctctgacatatcggcaacacttgatgtggagtaccctgatgttgagaggctggtgagatgaaggaaaaacccagccaagggcaatgaggaatggcttccttccgcctcctccttccctatctttgttgtggtttttgttgtttctgtaacactgattacgttatagtttatttaatgtacttccttattctatgtttttactttagtcattttgttgatctcctccataataacataggctcgggccaagcacagtggctcacgcctgtaatcccagcactttgggagaccaagatgggtggatcacttgaggtgaggagttcgagaccagcctggccaacatggcgaaaccctgtgcctactaaaaatacaaaaattagctgggcgtggtagcaagcgcctgtaatcccagctactagggaggctgaagcaggagaattgcaggagaatcacttgaacccagggggcagaggttgcagtgagctgagatcgcgccactgcactccagcctgggtaacagagtgagactctgtctcaaaaaaaaaaaaaaaaaaaaggcttcaggagggcagagcattttatgcaattgttcattaattgacccctccatttggcacagatcacatgcccagtagttaactgttaatcaacgcactctctgtggaacaacaggctggtcccgttgagccaacactctctgggcactgccttcactagactctggctggctgctgcgcttgtagaggtatgcaagacaaaaccttttggtatgttaaaagccctggtcagaactttaagtaaccatcactgacatataatggttatggttttgaaagtgcttttatagtggtttttcatctgtcctcacagcacctctgggaggtaggtaggacaggtacagttagtctcatgtttcaaatggggctcagagagggaaaaggatttcccaagatcacacagcaccttagtagcaaaacttggactcaacctcaacacttaaaaatgaacaaagctggccgggcgcagtggctcatgcctgtaatcctagcactttgggaggcccaggcaggcaggtcacctgaggccaggagtttaagatcagcctggccaacatgacaaaactctgtctcttctaaaaatacaaaaaattagccgggcatggtggcgggtgcctgtaatcccagctactcaggaggctgaggcaggagaatcacttgaacctgggagatggaggctgcagtgagccgagatcgtgccattgtactccagcctgggcaacaagaatgaaactccatctcaaaaaaaaaaaaaagaaaagaaaagaaaaagaaaagtttccctttttttaaatatctcattttaatgactgcataatagtttattacatagttataccataatttatataatattttgttgctgtacatttaggttaaacaatacttacttagttcctactatgaagaggggccaagtactcgaggctggagctctcacatgtggcaatgaaattagaaagtggatatggcagggctgtggtaaaataaaatataaaaataataaatgatattaccaaagaaaaggaaagtttttcaaaataaaggaaaatctagacaagcatagtggctcacacctgtaatcccagtacttttggaggctgaggcaggaggaacacttgaggccaggagttcaagaccagcctgggcaacatagcaagaccccctgtcaacaaaaataaaaaaaaattaggccaggcacagtggctcacggtggctagtgcctgaaatcctagcactttgagaggctgaggggggtggattgcctgagctcaggagttcgagaccagcctgggcaacatggccaaaccccatctctactaaaaacacaaaaaattagccaggtgtggcagcacacgcctttaatcccagctactctggagactgaggtaggagaattgcttgaacccgggaggtgaaggtcgcagtgaggtgagattacaacactgcactccagcctgggtgacaaaatgagactctatctcaaaaaaaaaaaaaattagctgggcatggtggtgcatgcctgtaatcccagctactcaggaactaaggtaggaggatcccttcagcccaggaattcgaagatgcagtgagtcatgatcacaccaccgcaccccagcctgggttacagagcaagaccttgtctctaaaaaacaaagaaagtctaacctaaacgccattatgtcatttacatgtgtataggggtgtgtgtgtgtgtgtgtgtgtgtgtgtgtgtgtgtgtgtgtgtgtgtgtttgcttgggaggggagtcgggctggagctggccaggccgcagcctggggaccttctgattccagcagggatgtgggccgagggtcccgccttactcatttcgggtcttgctcctctgtcctggctctacagactcttccagctggagttggaggctgacgccctagtgaatttccatcagtattcttcccagctgctacccttctatgagagctcccctcaggtcctgcacactgaggtcctgcagcacctgaccgacctcatccgtaaccaccccagctggtcagtggcccacctggctgtggagctagggatccgcgagtgcttccatcacagccgtatcatcaggtgagcaagggaacaagaccatttggacaacgtgtgtgtacctgcttgtgtgggcagtgggggccgcaggcctcggttcccctccatagtttgacttaaaaaggagcagggcctggcatggtcgctcactaacgcagtcccagcactttgggaggctgaggagggaggatcacttgagactaggagttcaagaccagcctggcaaaatagcaagaccttgtctctacgaaaaaattaaaaaattagcatgtgtctatactcctagctacttgggatgctgaggcaggaggattgcttgagcccaggagttagagtttacagtgagctatgattgcaccactgcacttcagcctgggtgacagaatgagaccttgtctctaggaaaaaaaaaaaaaaaaaaaaaaaggtgctgcgttgctaccagattaaaatgtaagaaggacaatgtaatgtttccagagtccggagtgctcaccaggtgccaggtctgtgggagctgatttctacccaccatgaaattgaattttcccaacccccacaaggtatcgtcattttattttactttattttattttattttattttattttattttattttattttatgttacgttatgttattttattttgagacggagtcttattctgtcacccaggctggagtgcagtggcgcgatcttggctcactgcaccctctgcctcctgggttcaggtgattctcctgcctcagcctccggaatagctgggattacagtaatgtgccatcatgcccgggtaattttttttttttttttttttttttttgagacggagtctcgctctgtcgcccaggctggagtgcagtggcgcgatctcggctcactgcaagctccgcctcccgggttcacgccattctcctgcctcagcctcccgcgtagctgggactacaggcgcccgccaccacgcccggctaatttttttgtgttttttagtagagacggggtttcaccatgttggccaggttggtctcgaactcctaacctcaggtgatctgccctccttggcctcccaaagtgccgggattacaggcgtgagccaccatgcccggcccaggtatcatcattctagagagagctaacaggacttgtgcaggtcactcagccagagagggtgaaagaggggcttggatccttggtgtctgcccaggctgctcttctggaagctgaaggcctccttttgtgaatccattcagccagcagatggagcagctgttgcccctggtgagggcactgtccccacccttgcacagggcaccagttggccatcttgtgcagaggtagccacacctcctctgagtctctatcctagatagctcagttaagctcccaggcccagaactcaaaacctcactgctggccgggcgtggtggctcacacctgtaatcccagcactttgtgaggccgaggcgggtgtatcacttgaggtcaggagtttgagaccagcctggccaacgtggtgaaaccccgtctctactaaaaatacaaaaaattagcaaggcgtggtggcgcacgcctgtaatcccagctactcgggaggctgaggcaggagaattgcttgaacccagaggcggaggttgcagtgagccgagattgtgtcactgcattacagcctgggcaacaagagtgaaactccacctcaaaaaaacaaaacaaaacaaaaaccctcactgcactttagtttccaggcgtgcttttggacagcactgtctcatctcaccatcactctgtccatttcctggggcaggcacagcagcttgtgtcgataaggatattgacgcccagaaaggttaagtgaattgcctgaggctagtgagatatccgtgttctgtgaccctttcctgtgccaccaccctgcccacttcctgctggtgtggccctggggcccatctcttgtacgagtgagcaaactgaacagaaacctgatacaggtcacatcagatataattacattcaaatcagcccaactagctgagtggcgggaatgctcttgagctcaaataaaccagaaagtccgagtttccgagtgcacttccctgcatgtgcacttaggtccccctgccaccttgtaccacacctgctcacctctgctcaccctggccctctcctgcagctgtgccaattgcgcggagaacgaggagggctgcacacccctgcacctggcctgccgcaagggtgatggggagatcctggtggagctggtgcagtactgccacactcagatggatgtcaccgactacaagggagagaccgtcttccattatgctgtccagggtgacaattctcaggtgctgcaggtgagcagggggaggggcagggtgactggtactgatacctcccggtgtccacggttccctttgggcccctaggctcaggtgtcactctcaggcctctcactgtcccccattggtccttgaggcctgagctccttcatggagggtgcagacccctccctggctcttccctcccagcccttttccaggagccacgtcctcagtctctttgcttgataaacctggggacggcctccaacccagcaaaataaaccccaaaaaaggcccagctccagtcagttagttcagttccacttttcctgagcacaaactgtgagccagatgcctgcctggaggggctcgtgggccagcgggacctgggcttaaccttttgcaagcttgtccaatctgtggccctgcaggctgcatgcagcccaggacggctttgaatgtggcccaacacaaattcacaaactttcttaaaacattatgagatccatgcatggaccttttttttagatcagctgttgttagcgttcatgtattttatgtgtgacccaagacaattcttctgatgtggcccagggaggccaaaatattggacaaccctattttacaggaattcaaaccaagcaaaccaaactgtctccagttcctgtaggcatttgtgccagaggccctcctgttaacgtttttgattacctgggcaaaagatgtgattttttaattgtgggcaagcagatggggtgatactattaaatagctatttcatatattagattgaacagaaaaggcaggatgttggattatgttttattgtctagaattagaaaattcttctaaagatcatgttctctctgccttggcatcagaatgcaactacgttataccagaaaatgtggattcctttttttttttttttttttttttttttgagacagagtttccctatgtctcccaggctagagtgcagtggtgcgatctcggctcactgcaacctccacctcctgggttgaagtgatgctcgtgcctcagcttcctgagtagctgggattacaggcatgtgccaccatgcctgggtagtttccgtatttttagtagggatggggttttgccatgttgcccaggctggtctccaactcctggccttaagtgatccacctgcctcagcctcccaaaatgccgggattacaggtgtgagccactgtgcccggcccagaaaatgtggattcatatcttatgcttcttgctctcagggaagggaattctccacccactgttgaactccactttcaccgagaatcctctgcgcacccagcatggtgccgcgcagaccctgcctccatgcgggggtgtgcacacccgcttctcgatagtcatgcacgactgcagctgtcctttatccggtgctgattggtgcctgaccttgaactgagtgttgtatgtgttccagttaattcttagaatacactcatggggtggaggtcattattcccctttcctctccgaagaaactgaggttcagtgttgttaattaagaagcgtgcccagggagggccacaaagctgagagagtggggcttgaccttacattggcctcgatgccagccctttgctcttcctgctgtgtctctggcctgccttcaggtccagtgggactgctgtgaggtgaccctggtgtcacatgggtacactgtggttgtaatgaacctcatggggacagcactgagccaaaagtgagacagtaaaaccctcctagcactttcttttttttgagacagcatctagctctgtcgcccaggctggagtgcagtggtgtgattgtggctcactgcagcctcaacctcctggactcaggtgatcctcccacctcagcctcctgagcagctgggactacaggctcgtgccaccacatgggctaattttttttttttttgagacggagtcttgctctgtcgcccaggctggagtgcagtggcgcgatcttggctcactgcaagctctgcctcccgggttcatgccatcctcctgcctcagcctccagagtagctgggactacaggcgcccgccaccacacccggctaattttttttgtatttttagtagagacagggtttcaccgtgttcgccaggatggtcttggtctcctgaccttgtgatccgcctgcctcggcctcccaaagtgctgggattacaggcgtgagccaccacacccaggccacgccagctaatttttaaaatttttttggtaaagatggggtctccctatgttgccgaggctggtatcacactcttggtctcaagtgatcctctcacctcccagtgtgttggaattacaagcatgagccactgcgcctggcccctggctctctttttaatactgctgttctttcattgaaaacatagtacctgcatgtagaaaaaaatcagtcaggacagaatgaaaagcaagaatcattcccacctggacccccagtgcccatcctgagatacagctaccttttaagttccttgactcagaaatgtttcatgtgagccacagtcatgccaggtcgaccccttccctcccatccacactggcacttggctttcctggtgcttctctttacgttctttttttttagacagagtttttgctctattgcccaggctagagtgcaatgatgcaatctcagctcactgcaacctctgcctcctgggttcaagcgattctctttcctcaggttcctgagtagctgggattacaggtgcctgccaccatgcccggctaatttttgtatcgttagaagagacgacatttcaccatgttggccaggctggtctcaaactcttgacctcaggtgatccacccaccttggcctcccaaagtgctaggattacaggcatgagccactgcgcccggcctctttacgttcttatcagcatcctatggagtcaaacttcccttcctctttcatcagctccttggaaggaacgcagtggctggcctgaaccaggtgaataaccaagggctgaccccgctgcacctggcctgccagctggggaagcaggagatggtccgcgtgctgctgctgtgcaatgctcggtgcaacatcatgggccccaacggctaccccatccactcggccatgaagttctctcagaaggggtaagacctcctcccctccccatctgctggcctgctgggctccagctctcctgtcacctgtcccgtgcctgaggcaagcagtatccaccatagatcttagcatctccagcctcagagcagaggccccgggttcacaagcctcattaggccccgcctggcccaaagaaggtgctccatcattgtatcatgggtaggaatctcggttcacaagttcagctgtgcaaggaggagactttaaaatttttctggctgggcgcggtgtctcacgcctgtaatcccaacactttgggaggctgaggtgggcagatcacctgaggtcgggagttcgagaccagcctgaccaacatgaagaaaccccatctctactaaaaaatacaaaattagctgggcgtggtgacacatgcctgtaatcccagctacttggaaggctgaggcaggagaatcggttgaacccgggaggcggaggttgcagtgagccgagatcgcaccgttgcactccagcctgggcaataagagcgaaactgtctcaaaaaataaataaataaataaataaataaataaataaaaataaatttatttaatgtaccttaattcctaggagtgaatctccctctataaaactggagacaaccaatcttagccctctttggggtctcctctttccagctcccctccaggtggtgctccagttctggagtctgatgcaaccccaaggcccacctggcccctcctctaacccagcccagcctgatctgaacagccccccgatggcttcagtgctccttggtttcttgtgtgcccagctcaaagcctgggaaatgcttggtaaggtggccgagtgcccgtccacctagatgcctctttcctttctggctggtggcacgttgggaggcaggtacaggctcatgttttgggagcctgggaacccctggtgtcaggaaaattgtcttcaaaggggtaggggatgagataaaaagataaatgaatatctcaaatctcaaaatactatctaggccaggcgcggtggctcacacctgtaatcccagcagtttgggaggccaaggtgggtggatcacctgaagtcaggagttcgagaccagcctgaccaatatggtgaaaccctgtctctactaaaaatacaaaaattagccaggtgtggtggtgtgtgcctgtagtcccagctactcaggaggctgagacaggagaattgtttgaaactgggaggcagaggttgcagtgatttgagattgtgccacagcactccagccagggcgacagaacaagactccatctcaagaaaaaaaatactatctaacaggaacaacatctagaatgaatgaatgagccaatgagtccttcgatcctggcactgtgctaaagcaccagcctcaccgaaatgaataagccactccaggacaggagacaccccagccacccagaatctcatagcgcagtgccagacaagcagtgagaaggcatggacgggcagcactcaggcagggaggctggcacttgtgcctgtcctcaggttgttccttcctctgggagctgcatccaccttgctagccccatggggcattgctagcccttctaagggctggaccaagcctggacaaaccctcctttccttgaatctcccaagcacagccagaatgagctagagctttcagaaatacttgaccaaacagagaagataccaacacccccagccccgcagtcaggttccccatttgcaggttgtgacctgagtggacaccaggtgatgctcttctctacccagagggctggcacatggccccactcttgcttgtctccagccaccctgagctgtactgggcaggagctgtaattgaccagttttctctctcttcaaacaacctcagccctcaccggtccctctgtccccacacaggccatcctgggtgggtccagcgtcccatcacataagaggatctttgcacagaagacaaaggaagaggctcctaccttgagtggagcagggagatcccttatcgacttggcagccagcacagccctactccaagaatcccacggcctcagtgttactgacaagtggttccctcacagctcagactaggagctccctcgctgtttttctttttcttttcttttctttgttttgtttttgagacagagtttcactctgtcacccaggctggagtgcaatggcatgatcttggctcactgcaacctctgcctcccaggttcaactgattctcctgcctcagcctcccaaggagctgggattacaggtgtgcgccactatgcccagctaatttttgtatttttagtagagatggggtttcatcatgttgaccaggctagtcttgaactcctgacctcaggtgatctacttgcctcgccctcccaacatgctgggattacaggcgtgagccaccgcgcctggccacctctgctgtttttcaatgcagctgacctttcccacaaagctcggtttgtgcctgcggttctcagatggttaagcccctgctgaggaagggaaacagataatcccagacagtgagatggaggctgagactgaggatgcctgggggctgcactaggagctcagagacggcatcaggcagctggagttcagggaaggtttgggggcagcagagcccgagccaagccatggacactagccggagctggccactcgggtgaagacttggggggctccagagggcccagggaaagaagctgggcctgactccatgtgcctagtgctgagcaccaagcgctggcataagggctgtagggagctgggcagcataaatcctgggcctgtgctgggcacccctaataatagagaacagcagctgaacactaacgctgtcccagccaccggcttagccttcatgtgggctatttcactatagcccagagagctgatgtattttattccccctctaaagctgagggccaagtgtggtggctcatgcctctaatcccagcactttgggaggctgaggcaggaggatcgcttgagcctaggagtttgaggctacagtgagctatgatcatgccattgccctccagcctgggtgacaaagggaaatcctgtctcaaacaaacaaacaaaaaacagatgaggaaaccagggcttagagagattaagtaatttgctcaaagtcaggcagtcagtaagtgccagacctgggaattaaacccatgtgggctgtcctagtaattgcactaaaaaaaaaaaaaaaaaaaagctttattgagatatagttcctattccatacaatccacctattgaaagtatacaatgattctgatatattatgtttattttttccaactgtgatagattatatataacataaaatttgccattttaaccacttttgttttttgtttttgagacagagtttcgctctcgttgctcaggctggagtgcaatggtgtgatctcggcttaccgttacctccacctcccgggttcaagtgattctcctgcctcagcctcccgagtagtagctgggattacaggcatgcaccaccatgcccagttaattttgtattttttagtagagacagggtttctccatgttggtcaggctggtctcgaactcccgacctcaggtgatccacccaccttggcctcccaaagtgctgggattacaggcgtgagccaccacacccggcccattttaaccacttttaagtgtacaattcggtggttttaatcacatttacaatgttgtccaaccattacccctttctaaaacttttcttatcacctcaaacagaaactgtaaccattaataactcccgattctcccctccccacagcccccgataagtcccatatcctctctgtctctcagaacttgcctgttctagaacctcgtatcagtgaaatcatacagcgtttgtccttttgtgcctggcttatttcacttagcatgatgtcttcaaggctcatccatgttgcagcacgtatcagaatttcctttctttttaaggcagaatactattttgtttatccattcagtccttcactgatagacgcctgggttgtttccaccttttgtctgttgtgaagaatgctgctgtgtacatgggtctgcaaatgtccattcaagtccctgcattccgtcctttgatacttccgacctcaggtgatccgcctgcctcagcctcccaaagtgttgggattacaggcgtgagacaccgcgcccagccagaaaaattttaaagtcttctccttgcacagctgaacttgtgaaccgagattcctacccatgatacaatgatggagcactttctttgggccaggcggggcctaatgaggcttgtgaacccggggcctctgctctgaggctggagatgctaagatctctggtggacactgcttgcctcaggcaccgagtagaaagcaattgtgctctttcccactctgtcatactgcttcctatagcatgcaggtcactgtgtgactcactgacagtgtggtaaggaggtggagggtggctgtgtgccaggcacagaactgggctctgaaatgcctggtcttccttacaccccagccactcctctcagcactctctccatgttgctcagcttctggaggccaccagtgaggaagctggggcttgacttcaagcccatctgactctaaagccagtaccagggagggtgatcattgctggtggcagcatcaggaaggcttcctggaggagggggttagttgtgccttgaggggctcagtacagccttaaccatggtgagtgtgctggttgggtttgctgaactttgtttgcagtgatgctctctgtaagcagtagatgaagctccaagtcctggcttcatcccacgccacgcagaccctagcttctgctcaccaaccggggcccctctctcaccaggtgtgcggagatgatcatcagcatggacagcagccagatccacagcaaagacccccgttacggagccagccccctccactgggccaagaacgcagaggtgagtggatcctgaggtgggtgggtggggcagggggccgggccccgcaggtcctcagggccctcaggaagcaggttcccgagaggaccctgaggctagcacttgggggctgaccttgcagtgggtgtgcaggcagagaagtccatgaagagctgggatcctggcagggctctgctgctctctggctgggcggggggatccgccctgtgcctcagtttcctcatccatgaattctgctttggcgatgtgatgaagtcagcaaggcagtgtgtgacaaaactcggcacaaattgtaaagtgcttcccaaatagaaggtggcgtgatgatgattgtattattagtcaggattctctagagggccagaactaacaggagatatatatatagagagagaggggggtttatttttttattttattttttttgagacggagtctcgctctgtcgcccaggctggagtgcagtggcacaatcttggctcactgcaagctctgcctcccaggttcatgccattctcctgcctcagcctcctgagtagctgggactacaggcgcccgccaccacacccggctaatttttttgtatttttagtagagacgaggtttcaccgtgttagccaggatggtctcgatctcctgacctcgtgatctgcctgccttggcctcccaaagtgctgggattataggcgtgagccaccgtgcctggcctaaagggggatttattaaggagcattaactcacacgatcacaaggtcccacaataggccatcgcaagctgaggagcaaggaagccagtccaagtcccagagctgaaggacttggagtctgatgtttgagggcaggaagcatccagcacgggagaaagatgtaggctgggaggctaagccagtctagccttttcacatttttttctgcctgctttatattctggccgtgctggcagctgattagatggtgcccacccagattaagggtaggtctgccttcccctactgactcaaatgttaatctccgttagcagcaccctctcagacacacccagggtcaatactttacatccttcaatccaatcaagttgacactcattattaaccatcaagatgatgatgatgatgatggatgatgatggtggtggtggtggtgctgggcctagctgcacacacagggagcctggctgggcatctcctctgagttcttcccctaagctaagctctgtcctcctgggaggatggaggcctctggtctcatcaccaggaagcacagcttgacagagaatgggatgccccagagttcatggcctacttctcaatgtgatgggccaggagggagggcactgccagcctcagggtacctctgcattccaggagccggacaccgagtcaggcccttccgtgtaggtttggtcactcattgtcatcacatgctgtgaggtggggacttgcattcccatcttcacagaagccctgaagtgcacatggctacagtgacccatccaagcgcaggcagctgggatgagtgaagctgggctttgggctcaggtctgtgactccaaagccaggctcccctccctgttcccaaggctctgccagggatgtgcattgccaaggcccagtgagaggtgatacctttgcagggttccagggagggatgcagggagcggggtgcttcaggacaggccccagaggagcctttgcaaggagagtgggttctgttggcactaggaaaggaccagaagcctcttaaaacagtcagcacatctttggctttttgtccctagtcttgggatgctgatgggatgggaggcagtctaggcccccctagaactggggcctgcccctggaatcctcttgctagcgctttccaacatcccagtacctgtaggcctctcagagcagaagtggcagtgcccacgtgtcccggggtgcggcagctccccgagtgcctgtgctaactcagcctgaccgtctcccgcagatggcccgcatgctgctgaaacggggctgcaacgtgaacagcaccagctccgcggggaacacggccctgcacgtggcggtgatgcgcaaccgcttcgactgtgccatagtgctgctgacccacggggccaacgcggatgcccgcggagagcacggcaacaccccgctgcacctggccatgtcggtgagcccaggaccgcgtgtcctgccctgtggggccccggtgggaatgcaggagggctgtccggactggagccctcctccccactgtctccctcctatcgtcagctgctccaaatcatcttcccacccaaagctcagttcagaccctgactcctccctcaggaagccttccaagtccccctctcagcccaaaataacaccacctcctgtgtgctgtggtaccttttccacctgtgcccccatttggcacttgcatggcacgagagggaaaaatgacagctctggccatagactggccctgagcaagccatgtcacctgtcagcctcgatttcctcatctggaaaatggtggtgtcaatacttatctggaagagttgtggaaaagttatggtggacacttggtcaccctctacagaatgtctaagtgacacacgcagtacctggcccgagtgagcatcctgcttcccttcactggtccgcgtgttgctctcatcttccctgggaggctgtaagatcctggcaggcaaagcctgagtgtgcagcccagcagcctgtggcaggtgccaggcatattcgttggtttattatagaacacagttcctgccctcaaagcccttactgtctggttacacatctagagtatgaacatattaaacctagcagaggaggacgttactgtgttacagacatatgtgtgtgcatgtattcttttttttcgagatggagtctcgcactgtcgcccaggctggagtgcagtggcgcgatctcggctcaccacaacctccgcctcccaggttcaagcgattctcctgcctcagcctcccaagtagctgggactgcaggcacgtgccaccatgcccagctaatttttgtatttttagtagagacggggtttcaccacgttggccaggctggtctcgaactcctgtgttggccaggctggtctcaaactcctgacctcatgatccacccgccttggcaccccaaagtgctgggattacaggcgtgagccaccgcgccccaccgtgtgcacgttttctatagcaataccgtatgtacagaagtctgtttactgagtctcagtgacagaacatgagagacccccgggactctaaaagctgattcaggacacattcagagacatcctgttttataccaaaggtcaaaacttggaagagatgttgttgcccaaaaggctgaaactataaatagtttcatttttgaaactgtggacatttttagcactgggtgggcccttggaatgatctaactcagcagttctcaagttttttggcctatttgatccctttatactctgaaaaattattgaggatcacaaagattttttaatcatctggattttctttatctatatttaccattttagaaatttaaagtgtgaaaatttcaaaatattaattcatttaaaaataacaataataaatatatatgcctactatgtacccacaaaaattaaaattaaaaattttttaaaaaacttaaaaaataactggccagctgcagtggctcgtgtacaccagcactttgggaggccaagatggtcagatcacctgaggccaggagttcgagaccagcctggccaacatggcgaaagcccatctctactaaaaatgcaaaattagctgggtgtgagacctctgaaagggtatcacgtgttcacaggggtccccaggtcttactttaagaactgctgatagactttggtcatcttcatcccatcttcacagtttttggcatattcatcaaccacctttacaattatgtacttaatcacctcttcaaattggcttacttttatttatttattttgagacagagtttcgcttttgttgcccaggctggagtgcaatggcacgatcttggctcaccgcaacctctgcctcctgggttcaagcgattctcctgcctcagcttcccgagtagctgggattacgttcatgcgccaccacacctggctaattttgtatttttagtagagacggggtttctccatgttggtcaggctggtcttgaactcctgacctcaggtgttccacctgcctcagcctcccaaactgctgggattacaagcgtgagccaccgtgcccggcctggcttacttttaaactgacttaaatttattttgagagaaatgttgcatcactaccataaatggccatccatccatccagtgccaaccataaaaggtaaccaatgcagggcgcggtggctcacgcctgtaatcccagcattttgggaggccgaggtgggcgaatcacgaggtcaggagttcaagaccagcctggccaacatggtgaaaccctgtctctactaaaaatacaaaaaattagctgggcgtagtggtgggcacctgtaataccagctactctggaggctgaggcaggagaattgcttgaactcggtaggtagaggttgcagtgagctgagatcacgccactgcactccagcctgggtgacagagtgagactccgtctcaaaaaaaacaaaacaaaacagtaacaacaacaaaaaatcacagttaatgctgaaaacacacacatatctgtagccatagaagtcctaatagaatgtgaagaactgtttggaaaaccccattctagacccacagcttcattctctaggcagggaaatcgggtcccaagaagaggaaggtgacaaggccagagcccacagttccaggtggccagtgtgtcctctgaaaccatgccatgctctgcgcccctgcccggcctccaggtgtggaaatgtgtgacgttcttcgtggggacactcccccgaaggctgccattaggggcacgtgtgttcggttacccctcagggatgacaccctggactgggtgggcaagatggccttccctgccctcacccaccctctccttgctactcctgaaagccatcagcagctgacctactgtgtccccatggctcctgggtcggggtcacagatgcactgcatctttggaggcggagctggcagagcaggggcgagtcacttctagtttctgcctgggttcttacaccctcccctgtgggtgcttttaagcctgtttgtcaggtccccagccatcaaatggcagactttggactaccagattgacttgggtgggggtgaggagggttccagtgtctccccgtgctgaggagaggcccgctgggtgagttgacaggttggggctggcagccaggggcccctttgttcttcacttccccggcagttgcacgtcttatcctctctccatctccaacagaaagacaacgtggagatgatcaaggccctcatcgtgttcggagcagaagtggacaccccgaatgactttggggagactcctacattcctagcctccaaaatcggcagacgtatgtgctctgcactctggggctggagtggggtgagggttgggtggatacagggaccgaggaggagggaagtcccaggcatcaggtgccagcatcctgtgctgacccgccctgctcagagctgccaggagcacctcgtactcagagagggggcttccttacccaagcacaagggccctgagcagtagatgcaggcccaccacggggcttgctataccagcatcctctcccgtgcagcgccccccacctcagggagctaagattcccagcaggggtggggacaggagagccagcagcagccttctttccccaccgttggggaattcactgatggaaccactggctagaatgaccaagggtgcatgcactacactgcacgagctctgggcatgcctgtgtgggcagagtgcatggccatgtgctgcacgctcgcacagtgagccttagcttcagagctggacagagcagatcctcctcaccagaggcctggagcccgctctggagggtttcagcagctgtgggggtcactgtgggcaggtacctgatggcagcagtgtgtgtgtgccagtgcacacgtgtgtgtctgcatgcaccgcatctatgacctccttttcagcaatcccatccatcaaatggagtaggtgccccctggctggctcattagtccctttggaaccctgaactatcacttagcatttttgagaatcactgaatgtggccatgggattcctgctttcttggctggagtagaaggaaagaaggggttcccacaggcatcgggcagggtgacactgacctcctcctcccatatcctccttccctggccttaggaagctgcttgggatgtaccagcctgggggcagcactccctgtcagggtgggctgaggcctctggagcagcccacgtgcccagggcctgggagctgggacaggggacggagtgtggaaaggaggggcctctcctttgcatgttgacatcatttctgatcctgtgccatctccccttccccaaaccatgacaagttgtcaccaggaaggcgatcttgactctgctgagaaccgtgggggccgaatactgcttcccacccatccacggggtccccgcggagcagggctctgcagcgccacatcatcccttctccctggaaagagctcagcccccaccgatcagcctaaacaacctaggtaggcctcgcctcccgactccctcttctccagctggttcccaggcccctggatcacagcaggccccaccaaagcaacaggatccctaggacggaagtcactaaaggaagccggggaggatggggccggagttgtcagcctctaggcagccagcaacccacagatcccagaggcctagggtgtccctggctgatgtcccatgctccgttgcccctgagaggatgtgtcctgcacacagtctcaggcctgggcatttccagtggcacccatgaggtggctgctgttactgccctcctgtccccagggcgttcagggtgggcagtgaggagtgctgtcgggggactgggggcccgggccctctggcttcacctgtccctctggcttcacctctatcacactgtttgaatctcggttgggcctgagacctgtgtgcccccttcctggccccgtggtgactttcagacgttgaatgtggccaggcagccagcatctgccccggtgcattccttggtgcccagggagacatccccagactagacaggacccttctctggactttctgtgggctggcccactcagggacctccattgtttgggagcggggtcccctgaacagagggcagccaggagccagtccttggtgagccagacttcactgtggaggcggcagcaccttcagccagggtagcccgaccaagcctggaactctggagaggcaccgtgactgtggcttctagtcctggctccacctctctctcccctcccaggaactccccctccacctcccatctttatctctcaattttgcaggcagtcacccaagccaggccggatggtgggcctggggtgcggcgtcagatgggtaacgccctgggcctggagaggccaccgagcctagccatgcggcattagctctagctctcactccctaatccgtccttcttagctgcgcacacaccacacgccccctcccctgcaccctgtccccggcctctctcagccactcttctgcttcccttgttcactgtggagccgtgtgccctggggagggggagacaccgcttcgcagccctcggttctgctttgctgcttctagactctgcacagtggtggggggctgtcagagttggggtcacgcgggctgctgcaccaggcacctggggactgggctgcttgtcaggaggggcagctagtcagttgggtggacgtcaggcaggccttggacacaaaggaagacatggacagagtggatggtgggcctgatcccggaggccactgggatttccagacctgggatcaggacgagggatgtctcctttcatccatggacttaaaccccgaggaacgtcctgactcagccttttgactaaatgaccttgggtgaattatggaccctcttagagcctcacctgtcaatagggaataagaattcttaggccccaggtggttattgcagcatcggctccgatgcaagaagaagcactttgtctgaagaggacacgcaagggtattcatgccttggggtttcaagaggaagagattgaggggaacctgggagctggctgggcagggtggggagcccttcccagagcagtgggcccccctttccactccagcccatttctctcctgtggcctgtggctcagctttctcctgggacagagtccttcctgtggggaagggacagatgacagggggagtggggggatgagggcgtggccgtgggcgaggcacagcccaggtttgatctagggacctctggggtagcagggcttggggacccacctgaccacagcatgccctgctctgtgcctcacagaactacaggatctcatgcacatctcacgggcccggaagccagcgttcatcctgggctccatgagggacgagaagcggacgtaagtggatcgagatcgggggcagagcggggaacgtgtgcgctttcctgcccctcacccaccccctgttgtgggctcagggctttactctctgcaccctcacagccggcgaagtggctctgctcctagtcttatagttctcagcagagacagaacatggagagcctgtgtcgctcgttcattaatgctgggcggtgcaggctctggagaccagcccagggtgccaggcttcttggacttggtggggctggcgcagtgttctggcctccctccctgatctccttatggctagaagagggggagatgcctgggtcccccctggggagatctcagcagctgcttcccactgctcctactggcttccttaaccacctcccactgcagaatagtggcgtgggctgccttccccagcacctgctgtatacctagtcccattgtaagaggcgggcctgggtgacaggatgcaaagagaagacgcccaggccttgcccttcaggcataatcccgggtgcttgaactcagtgccagctggcacggcaaggtaccaggacaaatgcgtttccagccactgtgctgtcgccacctcccttgattgctgcagttgattcatttattctttattagtctctcatgttcctaatagccttcccagggaggaatttgtaaccttgttttacagatgcagaacctgagcccctgagaggtgaagtgacttgctcaaggtcacacggagtgagtgtcagggtggcaactcacagccgggtcttccgaacccacgtcctttgtgctaccgcaggctctctctgggttctctgtggactctatacctagtgccagccctctgcagggaaagctctcttctcagaatcagaggcagctccactcccagggccaggcagtgatcgtgcagctctgtgggtcctctcacttcgcactcacttccatgctaccctgttgtgtgccctggaggttcccctgccccatcagcattccctcccctgtgccccctgcatgctcttgcacgcgggcacacgcacacacacacgcacacatgcacgcacacacacccacatgcacatgcctgcgggttgcccacatgcatgtgttgcccacatgcaaacacatggacacgcacacacatgcacacatgcaaacacacgtgcatgcacacacatacacatgcgcacacatacacatgcatgcatgcacatggacacccacacacatgcacacacatgtacacacatgcatgtacatacacacacctgtgcaggggctgaggtgaggcagctgcacctgaaggggggacccacatttcccaagggaggaaaagcagattccccagattctggagcctcagaaccctgcctggagcggggctgaggcaagagtcaggagacccctcggtagctccccacttgggccttccaagctacagagccctgcgccctctgggttgatctctgtcgccagccccgcatcttcgggagtttgctttggcctccagcaacagtgtagtctctcccctgccacctctaggcttgctgtggggctgggtacctggtccaggaaaagacccctagaggtgggacccgggcctcctccatttatcagccctcttgggcacctcctgcatccccttgacacacagcgctgcccagagcagaggcggcttctgccctggtggagcttccaggtcagcgcaggagagagtaaaagaaagattgcgaatggaatggaagcagcctccaccaggaagcaggtggagcagcaggcgggctgtgagggagggtctcgatggcatcagggcaggcttctctcagcttcatcaagctgagatgggaagatgagaagatcagaggaaggttccagactgaaccaaccacaaaggcattcccccagggcatggccaatgaggacaggcaggatgtggggagacgtgtcagggcgcgctggagagcatgtgactcaggaggcggcagacctgggtccaggtccagtccgcatccatatgacttggttcccgtcacctaacctctgagctacactccctccgtcactcaaaaatatgcacagagagtaggcgcagtggctcctgcctgtagtcccagctactcgggaggatcacttgagctcagaaggttgaggctgccgtgaactgtgattgcaccaccacacaccagcctgggtgacagagtgagaccctgtctctataaataaataaataaataaataaggctgggcacggtggctcgtgcctgtaatcccagcactttgggaggccgagacaggcggatcacatgaggtcgggagttcaagaccagcctggccaacatggagaaaccccgtctctattaaaaatacaaaattagctgggtgtggtggcgggcacctgtgatcccagctactcgggaggttgaggcaggagaatcgtttgaacccgggaggcagaggttgcggtgagccgagatcgcgttattgcactccagcctgggcaacaagagtgaaactccgtctctaaataaataagcacagggatgtcagggagggtctgcctcagaggcgtttgggacaatgacatgagctaatgctggtagcacccctcccatagcccctggcatgaacctctcccttcctccctgccccctcctcccctgcttcttccaccttgtgtggaggccctgatactctgtcactgcccattcctggcctggctgtagggtccccgcccctccttccccagccttatttaattccaacagactttatcaggcacctgctttggatcaggcctgatactgaccaaaatcaggtgtcccaagttggggagactggccgagatcctgctgggatggcgcctggtcagtgatgctatcccccgaccttcctttccctttctctgttgcactctccagcccctgaaatactagacatttgttcctttactgccctcacccccaccctcgctgtcctgcataggacagaagttcctcgggtccgtctgggtctgtctgccaggacacagctgcaggggacaagggctatgagggtggatgtaaagtactgggctgtggcaggaccctcctctctcccactgctgttcccactgcagccacgaccacctgctgtgcctggatggaggaggagtgaaaggcctcatcatcatccagctcctcatcgccatcgagaaggcctcgggtgtggccaccaaggacctgtttgactgggtggcgggcaccagcactggaggcatcctggccctggccattctgcacagtgagggcggcccctggggatggggccaggcggggctgagacctgtgtcctcaaggggccgagtttgtcttcagggctttgcaaaaagagagtggaggagtagaggagggctataagcactttgaggaggcaggggcggggctgcaggtgctgaggtcccaggctggaaggagaagggctgggcccatgggcttgggtttggggatcccccgccctctggccacagagggtagagctggctgtgtgaaattttggcataggaagcgtttcctatcgactgccttaacccctcctcccctcacccctgcaaagcaggcaccaggggccacacagcctgctgcacataaggaatcccattcccagggtgcacgcagcaggcagtctcaggaatgaggagccactgagcctcaggatgccagagccctcgcctgcacacttcattttactgggaaattttactgggaaattaagttcccaggtggggagggatgacgtgaagtcacatagctcatccatggggtcgctgggctggagcacagtcccctagactcccagcctggcacctcctaggccacagggcactgtgtagtctcctttcactgccgctttgcgaaggcgcctggcttgctggacagatagccgggtggtcagtgttgtgacggctcctctgtggagctgtctgagcttctaggtgctgacaggtggggaggggcactgccagatcagggtcctcagctccccccaaccccctggacattgtcctgggactcaacatgtctgactggtgcccctgcccctgtgctggtcagattccattttctccagagcgcccccacatctggatcctggtcatgcaaagtcttggaggtgcccggggaggactccccaccctagggtgggtatcagggcctgtgggccaggcctgtgttggatgctggggatgcagagctgagccaggcataccccagcctcaggagcagggggctcagccagtccaggaggtgctggggacagagtcccatgggcggaggaggagagtcatctgtcaagttgccgggacgttagtgtccacggcggtttattgactggtatttcatttccttttgatgattctcaccatagccctgcggggtgagcagatggggaaactgagaaccagagaggatcagccagtgaattgggcagtcaggactgggtctccagcagtgtgcccagctctctaccccagcctcagggtcccagcatcccctctctggtcttccacagggtccaagggcgggcacgaggtctgagcaggcagactgggcagagtcctagcttcttctccaaaagggccacgtccttcttcagggaccatttcttccccatccggggtcttgagactcccaggggccatggaggggatttgagaggtctcctggctgatcctccggtgtgggcagatggcctcctttcagctaccctctgcttgtacatccctggccctggggaactcactgcctcacgggggaagtggggcagcttctccttcctggaggtgcagccggccccttggccctgtctgttctgaaggctcaaaggacagggctattccttgttttctgtgacaaacaacgtgggtctagcttttataagcttttactcttgaggggctcttctttaaggaaaataatacaaaatcatgaatacaagatgaagtgcagagccgtggggcttcagtggtttttgagtctctccgttgcccaggctggagtgcagtggtgcatcttggctcactgcaacctccgctcccgggttcaagcgattctcctgcctctcagcctcccgagtagctgggactacaggcgcccgccaccacacctggcgaatttttgtatttttaatagacggggtttcaccatgttgggcaggctggtctcaaactcctgacctcaagtgatccacctgcctcagcctcccaaagtgctgggattacaggcgcgagccaccatgtccagccggaaggaggtttctctctgtctgtctgggaggttgcaaaggaagggcccagaatttgggtttgcttaggcctcggtaaacccgcttcctcctgccacctcctgcgttcaggcgctctgcaggctgttctacgggagccctgcgtgtggccgctgcatctccccgcctctgacccctttgttcctaggtaagtccatggcctacatgcgcggcatgtactttcgcatgaaggatgaggtgttccggggctccaggccctacgagtcggggcccctggaggagttcctgaagcgggagtttggggagcacaccaagatgacggacgtcaggaaacccaagtaagccctggcgcactggggccgtggccgcagctgtgcccactgtggctgttccctggggacagagggctccctgtcctgctgagggagggggaagagcgccccacgcttgaggggagcagagggaacccccttcccagggaggcagagggctggggtgtggctctcacttgggcatgcagacacctgctgagcgcaggaggggcgtggcctggtgggcctggctctgccctgcctggctctgccctgcccggctctgccctgccggctctgccctgcctggctctgccctgcccggccaggggtctggggcttgcctggagagagcctgggccacccttctctgagaccacctgggcagaggctgggtttttgctgcccaggcaaaaggaacccactggcctttcaaatgacacggctaaacattttctcacatttcagacagcactcgctcccaggatcggactactaggttataatcagagggcttcagtcttacctttaatttaaggcctacaagacttgaactaatttaagtcagactgaaggagaaagtcacatttccaggaaacatttgtttgggaagcccaaatcctaggactaagcaatgcatcccgttcggggctggatgaatggtgtgttccaagaggagtgttttgagcatttctgagtgattttttcatattttgaaagtgagtgtcccccagtcttaggggcccggcatcccctctgcggtcttccctagggtccaaggccagggaccttcaatcttttttcccactctgtggcttgtctttctgctctgtggtgtttctaggtttttgttttttgttttttgttttggttttggttttggtggcccatgttcttaatgaggtagataatatttataaatatttttcttcttgtagtttgtgattttttcctttctttctttcttttttttgaaacagggtcttgctgtggggcccatgctggagtatattgctgtgaacacggcttactgcagcctcgacctcctgggttcaagcagtcctcccatctcagccgcctgagtgcctgggactactagcatgtgccaacacatgtattttttgtagagatggggtttcaccatgttgtccaggctagtcttgaactcctgagctgaggcgatcctcccgccttggtttcccattacaggcatcagccaccatgcccagcctagtttgtgctttttatttctcgttcataaacccctttgctgcccccaagcagcacacgattctcctgtgtcgagctggaaagctctctagatctgccttttacattgaggtcttttatcaacctggaattgatttttgtatgagggtgaaatccaagatccaatttaatgttttccacgtgattggccaatttttcccagccccatctgtgaagtctgtccttccctccgcttcctcagcagtgggtcaagcatccctctgctcttggatctgctccaggctgtgttttgttccactggttggaaagctgtctctgtgcccggaccacagagcataaaaaactaccgctgtgtggtgagtcctggtgtctgggtggcagatcctccaccttggccttcttcaaaaacatcatggctattcttgggggcagtagagagaagtggatacaagcatagaccctgaagtttctacctcttctcaaaaataggaatatgccaggcatggtggctcaagcctgtaatcccagctctttgggaggctgaggcaggaggatcacttgaggccaggaggtcgagaccagcctgggcaacatagtgagaccctcatctctacaaaaaatttaaaactaacaattagctgggcatggtggcactatggctgtagtcccagctaattgagaggctgaggtgggaggatcacttgagccccggaggctgaggctacagtgggctgtgatcccatcactgcactccagcctgggcaatagagtgagaccctgtcttaagacaaaaaaaaaaaaacaaaaacaaacaaactcacaaactataaaaagaaaaaatatttataaattctactccattaagaacatgggtccatccaaataaataaataaaacaaaaacaccataaagggagtaaaaagacaagccacagagtgggagaaaagatttcgaatccatacatccatcaaaggactcattttcaaaatatgaaaagatcattcagaaatgctcaaaatagtaaccaccattttactttctcttcctatgagtttaactgctccaggtactgttaagtaaaatttttaggggataattgatttggaccaggattctgtaccaggcccaacagaagaaacgaatatggagtcattcatgccaagtgaacctagttagcttaggcgtatacccatgtaacaaatagctgagttctggttagctacaacagctaagctttaatcaatcatagatggccacctgattcaaacaaggcaaaccaattaagctccacacctcactttggttttcagcccatcaacactgcctgaccacgttgcaggccagagttctttgaacctattctggttttgtggcctgcctgactctcagttcatcaataaaagccaattaacatctttaaatttgttgcaattttatctttgaccgtaccttatgtaagtggaatcatacagtatttgtctttttgtgactggcttatttctttctttttttttttttttgagatggagtcttgctctatcacccaggctggagtgcagtggcgcgatctcggctcactgcaatttctgcttcccaggttcaagtgattctcctgcctcagcctccggagtagctgggattataggcgtgcaccaccatgcccggctaattttttgtattttagtagagacagggtttcaccatgttggccaggccagtctcaaactcctaacctcgtgatccacccacctcggcctcccaaagtgctgggattacaggggtgagccaccgtgcccggccatgactggcttatttcacttggcatccatgttgtagcgtgtgtcagaatttccttcctttttaaggctgaaaaactccattgtctgttggatacacgttttgcttctccattcatccattgatggatattttagttgtaaattgactgctgtcaatgtcggatgtgcaaatacctgtttgaggcctactctctcttactggtgccttctctagagagaattctgatgggttcagtttgatcatattttgtttaagatttttggccaggcgcagtggctcacgcttgtaatcccagcactttgggaggccgaggtgggcggatcatgaggtcaggagatcaagaccacagtgaaaccccatctctactaaaaatacaaaaaattagccgggcgtggtggcgggcgcctgtagtcccagctactcagagaggctgaggcaggagaatggcgtgaacccgggaggcagatcttgcagtgagccgagattgcgccactgtactacagcctgggcaacagagtgagactccgtctcaaaaaaaagatttttgtgtccacgctcgtgggcgaacttgacccgttttttcctattttgggttttgaggaaatatttcctctttttatttttcttggaagagttagtataatagtttattttgaatttatggtagaacttgatagtaaattcttctaggcctggagtttgcttggtgggaggatttttgatgatggaattaatttctatagtggttgtgagactgaccactcggggtttctaaatacctttttgagttagttttggttaagtgaggtttttctaggaatgtgtccatttcatctaaatctttaagcttattggcttagagttgttcaaaatattctgtttttttttttttttttttttttttgagacggagtttcactcttatcgcccaggctggagtgcaatgacgtgatctcggctcactgcaacctctgcctcctgggttcaagcaattctcttgcttcagcctcccaagtagctgggattacaggcatgcgcaaccacacctaatttttgtattattagtagagacggggtttccccatgttggccaggctggtctcgaactcctgacctcaggtgatccacctgcctcggcctcccaaagtgctgggattacagacatgagccaccatgcccagccgattctcctttttctaacgtctgcagtgtgtgttggtgcggcccccttttctttcctgattttgataacagataacagccatgttttatcagtcttgcaacaggtttttccattggattagcctttcaaaaaaaccaacttttgctgaattgtgcccccaaggttggaccaatctgacactcctccagcactgccggagagagcctgttttgcggggatggtgcggggagaagcccacctatcccgaacagaggttggagtgggcactctgctacccaaggccctggggtgtgaattgtggggaaagggaaaggtggatgggcgggtggctcagccgtcctcctgcctcatttctctccagggtgatgctgacagggacactgtctgaccggcagccggctgaactccacctcttccggaactacgatgctccagaaactgtccgggagcctcgtttcaaccagaacgttaacctcaggcctccagctcagccctcaggtttaaaccatgtttgatgcatccatgggaagcgactggcccgagaggctgtggggtggtgggtgggagtcgtgcacttgccatcaggcaccctcaccgtgccaccagcccacccgctgcactggtctttattggctgaggacagggattgcgggggagctgtcaggcccctggcaggttagaaaagtccctggaaagtcctcagctgtacctgccttccaccaggacgaactagccagagagtgtggcttcgtgggtcctgcttctgaagagttcccagcctcccctcttcccgcacccccagcccccaacacgcacaccctgagatctggagtgcatgggttttatgccagtcccttgtgccactgggccgccctccttccccgcccctagaccagctggtgtggcgggcggcccgaagcagcggggcagctcctacttacttccgacccaatgggcgcttcctggacggtgggctgctggccaacaaccccacgctggatgccatgaccgagatccatgagtacaatcaggacctgatccgcaaggtgagtgccgtaggccagagggcctggacccactgctccctggagccaatcctgtgtcagcaaaccatgctagggaccgacccccaggacagcaggtggcttttacacacgcactcattcatatgtgcacacagggcaaattgatctcactggaacctgttccatgggtgggatctgcctgaagcactgtgctaagggggatctgaggaccactgtgctctaagtgtgcatgagtggggagggcggcatgcataccatgaacgtgccactcgagccagcctggggacaggacacatgcttgcccttgagctcacctctgtggatagacagtcccacaggaatgcctgtccccacgggttgccggtgctgtggtggaggaccgtgaggcctctgctaaaaggcctgggggctcggaaagggctccatggaacaggggacccatcctgaggcccttggggacagagcagtgcagaatcagtgatctggaggaagagcagcagccctctctctgcagaggtacagcagaggctggcaggacccagcatgctaggggaggccctgtggcgtggcgggcggtgggtgaccggggtgggcgagcgcggtggctgagctcagaccctggagccagggcgcctctgggggtccccgttctgcctgcactcactgcagctacctaatggggccatcatagcgcctgcctggggaggctgcgaggccttggcatgctgttgtctgtgaaatgttcacagcactgccgggagcctgagctgcatccttgctgctgtggtttcccgaagccccagggcgtcctgggcagcgcagcagaggctctgggcagacagagaagcgccctctaggggccagatcgggcagggcgggcttcctgcaggcggcagagaccgtcagactgtcagacactagccagtctaactctcctattgcgtgcggatggggagcctgggacccagagtgggaggcatcacccaagatcatccagcaaatcggcagcagagcttgttcggaagcaaataagagaggcagcggccgggcgcagcggctcacgcctgtaatcccagcactttgggaggccgaggcaagtggatcatgaggtcaggagatcgagaccatcctggctaacacggtgaaaccctgtctctactaaaaatacaaaaaaattagccaggcgggcatagtggcaggagcctgtagtcccagctactcgggatgctgaggcaggagaatggtgtgaacccaggaggcggagcttgcagtgagccgagatcgcgccactgcactccagactgggagacagagcgagactccgtctcaaaaaaaaaaaaaaaaaggcagcacccagggctcaggttcaagccttagcccctacttccctaccacgtggcccctgcagctgcttcccggcctgagcttcgctgagagccctcatttgcaaactgggtgatcagtgccctctccacagactggctggagattaaatgaagtaatgatgcaaatacctggcaaatcaccaacaccaaggaacaccgtctgcctttcctcccctggccacgacttgacttgggccagcatcagatggggtgggcgggatccttcttgcagctggtgtatgtgtggtcctgttggtacacagatgctgtcctgagcagatggcatgtgatgcccgcaccagccgttctggggtcacgtgcaagaggctggctggaaatcatgccaggcatgctcttgccaccagagacctcttgccctgttctcatgtgccccagagcccagtcttgggcctccccttgacgctccccttcgtgccccctacctgtggaaggtctcttctgactgcccctgtcctgttcccaacagggtcaggccaacaaggtgaagaaactctccatcgttgtctccctggggacagggaggtccccacaagtgcctgtgacctgtgtggatgtcttccgtcccagcaacccctgggagctggccaagactgtttttggggccaaggaactgggcaagatggtggtggactgtgtgagtgtgggcccctcccccaggccacttccctcagggtctgtagcccaggtcgatggcttcccctcatcctgtggggcctttggtgttggaggagacagcagggctctgtccatcgcctttagccagctggagggagagagagtccacagttcagagtctcagtgcggggcagggaccctcagtgaccaccagcaggggggttttcaaacgctttttagctgcggatccctttctgcaaacatagcgcagtgtagaagcccagaatggacaaaggctccagagcgggctgggcgctcaccctgtaatcccagcactttgggaggccaaggcaggcggaccacttgagcacagcagtttgagaccagcctgagcaatataatgagactttgtctctaccaaaaaattaaaaactagctggacatggtggtgtgtgcctgtggtcccagctactcaggaggctgaggtgggaggattgcttaagcccaagaggcagaggctgcagtgagctgtgatcatgccactgcactccagcctgagcaacagaaggagaccttgtctcaaaaagaaagaaagaaagagagagagagagagagaggagggagggagggaaacttcagggagaggggacatggaggcctgtcgactcagccgctaccctttcccccactcatcatccctgaaagggcactgctgagacctctgcccctctgattgcacagctgggacagtccctgcagtcccaggaaggggttttgcccgagccgctctgctgctgtgtggctcagcctgactcgaaagagcctggggctccccaggctggggctccgagagtgcagggcagggccgggcggggtgcgggccgggcggggtgtgggcccggcactcaccaaggctgcttctcaccagtgcacggatccagacgggcgggctgtggaccgggcacgggcctggtgcgagatggtcggcatccagtacttcaggtgagggctcagccgccccagcccttggccccgtgccctggcgtggtcggactcaccgaccttcccctcccagccctagtgtggactttcccttccccaagggtctgctctgttccccaagcccaccctggtcctagctggcgtcccctgcccagcctgagcatcctagggtgaccccctcctccctggcccgaacagattgaacccccagctggggacggacatcatgctggatgaggtcagtgacacagtgctggtcaacgccctctgggagaccgaggtctacatctatgagcaccgcgaggagttccagaagctcatccagctgctgctctcaccctgagggtccccagcctctcaccggccccagctgacctcgtccattcagcccctgccaggccaagcccagccactgccctcccgggcagatctgggcccaggcacctctgagtccatagaccaggcctgggagaatgccaagctgcctgcccgaggctggtcctgaaggcctgtctcccactaaccccgccttccagcactttctgtcattccaggctgggaaagtctagagccccctttggcccctttccctgactgtcaaggacaactgactcccccatcagctcaaacattaagggtacccgggcacaaccgtacccctgcccccagccccagcctccctgagggcctgccgggctgcctctgccccagcccccagcaagggcactcccaggcttcctggtgggtgcagcccactccctctgccctctgctccgttccctgggggctgggactaaagaaatgggtgtcccccaccccatcagctgggaaagcccaggccgcaggagtgggatgcccgttggactttgcccctcacactggcccagcccctcacactgccccaccccgagaaccctcagct

SEQ ID NO: 15726 - DNA, 70004 bp, Homo sapiens
gtttgtttgcggaagtaggaggaagtagaagtgctgagtaagccgaggtgagtgacctcgcgggtgggcggggcctgggggtccgttccccaacttcctcggcgctccggactcccaagtctccgccggaccctcctttggatattcctcgtgtctccgattctgaggcatgtcctccattaacccttatgtgactccctgagtgcccccaccttccatcttttcatccccctgcgtccccaattcccatcccgagaccgcccgtgtctcatctcgaacttgtggaccccagggaccccagcttcgaccctgagtttctcccctgaaccccagtctcctccgtgtgtctccctcagtatccctaacttcccgagtcaatccatctcttctctttccccgaccctcagtgcctctttaggccccattggccgtcctaattttccttcctgtgctcctctaagtgctcacttgattccccacttcacgtccgtctccacctttcgtggtgcctctactcatttctcactccctgcttctcctgcctttcctccctgctttttttccttgcctttcctctctcgcgtgcctccagacctgcccccgacatgctccctccttcccctcagcctggccaccccagagtctcccacccctaatcctgtgtccacctcctgctcccacagatgacttggaagctggtgacagggagcatgtgaccagggtgatcatgggactgggtcggggcaagcctgtgggtgtgggacagggagggcacagggcaaggggacctgtggccgtatttttaatgggctacccacatgaccccaacgaatacctccccctagcttctgggtctttccctcacctgcctcttacccgcccaacaggatgtcaggcaggttcggtttggcaacgttgaggctgcacccttgggctgaatgcattgtttttgaatgcattgtttttgttagagtttctgcctggagtttggaacctgttttctgtccaagtctcagtttcctcatctgtgacaggggaactgtacctcctgccctcgtaagtctgccatgaggttcaaaatttgaatgagaaaatgtagaaggtaaagctttataaccagtatggccctgtacaaatacatgattttactgttgggtcataggcagaattgaaaggagtggaaagggaaagggctagaatgagaagacaaggagagaaggatgagcaggaggtcccttgtctttcagtgtatcatttggcagtgtttgttcatcacctcttgtgagtcaggctcttctgtatatgttctcttcaccattcattcagtcatcgtttatctaacaaatatttacggactgtctgatgttctaggctacccttggtgtggccaatgatattctcacttcacatgagaaaaagagggcgcatgagttgcttgaggtcacaccgatgaggttgaagctggaatctgacaccagagcctgtgtgattgtcctgatgtgtaaggtttgctactgtttaggacacttcttgttccttccgtggattactttcttgttacatgagagactccccaaaagggagtttccctcttactcagcagaatgacatcactaagagatacagaaaggagaaatttaaatactctgtgtgtgtgtgtgtgtgtgtgtgtgtgtgtgtgtgtgtgtgtctgcagacatctattgggtgtgtgtgctgggggaagtaggtaggcaaggagtaaggggccgtagtgaagagtgtgttacaaacttcactttgtagagggtggctccctgggagaatatgttctgtgtctttcacagtggattttgatagggtcatgtcttaaatgcctcttctcgttttcggatggtgatctcatccagtcttatttctttaagtgccgtctctattctgtcagcccacaaatttatatccccagtccagtccagacctttccctggaatgacatactcaaatctagttgcttactcagcacctcaaacttaggcttttcaaacttgaagtatttatttattgatttatttattttttgagacagagtctcactctgtcacccaggctggaatgcaatggcacgatctcggctcactgcaacctccacctcctgattctcctgcctcagcctcccaagtagctgggattacaagcatgcgccatcatgcccaactaatttttgtatttttgtagaggcggggtttcaccgtgttggccaggctggtctcgaactcctgatctcaagtgatccacctgccttggcctcccaaagtggtgggattacaggtgtgagccaccgcgccaggcctcaaacttaagagtttagaattgagctcctgttagttctgccctccatccctgaccccactcttcaccaaaacatgtccctcccactctctttctcatcttaggacataggagtattgttcattcagttgctcaggtcaaagctgtgagattatctatgatgcctctctgtttcttaccccacacccagccagagtgatcttgttaaaatgttgtttctttgcagtggcctctcctctcatggcacatgcctggccccctgttgcctctctgatgtcactggcttccttgcttttcctggaactcgctaaacatgttccagccccatggcctttgcacacgctctctttgcctagctattcatatgactttcatctctctccatcaggtatttatttaagatcaatttcttggtgaagacttctctcctcacccaatctaaaatttcactctccacctcagcacttcctatccccattctctggtttttctcctcagtagttaattgtcatctaaaacctttgtaaatatttacctgtttatcttctttattattagtagctctgtctaaaatataagttccaggatgtcagggattttgtggggttttttttggttggttggttgttttggttttgagacagggtctcactctgttgcccaggctggagcgcagtggtgcgatctcagctcactgcagcctccgcctcctgggtttgagtgattctcccacctcagtctcccaggaagctggaattacaggtgcacgccaccacacccagctaatttttgtattttttggtagagatggggtttcactatgttggccaggccggtcttgaactcttgacctcaagtgatccacccgcctcggcctcccaaagttctgggattactggtgtgagccaccgcgcccggccttgttttgttttaagacagggtctcactgtcgctcaggctggattgcagtggcacaatcacagctcactgcagcctcgacctgctagacttaagcaatccccccacctcagccaccttagtagctgggacttacaggcatgagagataccatgcctgggtaattgttaagtttttgtagaggtgaggtctcactatattacccaggctggtctcaaagtcctgagcttaagtgatcctccttccttggcctcctaaagtgctgggattacaggagtgaactgccgtgcctgaccagtctgttttgtttacgattgtatcctcagcggttagaacaatgcctgccacaatccatctcagtaaatatttgtggagtgagtcataacatgggccacactgtaccgtgccaccagcccaaagatctcttaaagtcacccctgtctcatgtgcttgggagctccagtgacagtttcggggcagtttgcttccagctgtggtccagccaagcggagtgaatgaaagagatgctttttccttttgtgaaaggacgttttgctctggctcacgtgagcagcagtgcattttgagacgagggccttggcttttggaatctaagagcctgttgagcaagcctcgctcagccaccttctttcagctttctcctgaaggcagtttgaggattaagagcctgatgctctggattccacctaattgggttcagatcctggcaaactgtgtaacctgtgccccagtttcctgtgtaatgtggagagacctggaccttttcttacaggtgtttggagggttaaatgtggcaattcggccgggcgcagtggctcatgcctgtaaccccagcactttgggaggtggaggtgggcggatcaccggaggtcaggagttcaagaccagcctggttaacatggtgaaaccccgtttctactaaaaatacaaaaaattagccgagtgtggtggtgcgcgcctgtaatcccagctagtctggagactgaggcaggagaatcgcttgaacccgggaggcagaggttgcagtgagccaagatcacgccattgcactccagcttgggcaacaagagtgaaactctgtctcaaaaaaaaaaaaaaaaaaaaagtggcaatttacccgaaactgtggtgaagcgtctggcgccctgtgggtgctgggcagcagtgggtgctgatggggtgtgaggggatgggatcaagccctttcccactaacttaggaaagaggttggaatgagctggggtcagagggaacatttgcggggacattttgccgggaggctgccttggaggttcagaggctcagatgacccctgtgttcattcagtgttttctcacccacagattgagcacctgctgtgtggccagccctttgcctagtgctgttcaagagtcagaggacataggcaggcaatcccccaccacaacctgccaccccatttcctctcttggggccttgatttctccacatgccaaacagggagaatgattgcaccttccttgtttctttttttttttttttgagacagtctcactttgtcatccaagctttagtgcagtggcatgatctcggctcactgcagcctctgcctctcgggttcaaagattctcctgcttcagcctcccaagtagctgtgattataggcacccaccatcacgccaggctaattttttttgtagttttagtagagatggggtttttttctcacacgttggccaggctggtcttgaacttctgacctcaggtgatctgcccatctcaccctcccaaagtgctgggattacaggtgtgagccaccgcgcccggctgcgccttccctgtttctttgtgagcttggaggtggatcacaagtgtgaaaccctttgccaaccgtgaggcatggtggccttgtgagaggacggaggccggtgtgtggtggcatgctcccgtgctgtgtggcacagacggagctacaggaaggaagttggggcagcttggcactctgagtggaccctgagtttccagcctgctctgtcttgactgggtgggaggagggtgctcaggagggtgtcactgctgccaggttctgctgccaggaccatccaacagttgttccaatcatgggacatcctgtcgtcagcagctggggctcgtgaggcctgatttccacctcgggcagttctgtgtgtgctcctggaatcccccacgtggccaagcctgtgaggtctgcttcctggcctgctgcctgtgggttcctgtcacgcacctctcgggcagctgtccggctcctctgctctcggcttagtcaagaaggaagcagaaggcttggagtctttcctgcttggactaggagtgagctcagcctaagtgccctgactatatataaagctgaactttccagaccgaagcctggggatggatcagtccgatcacttagggccgctcctgaaggagtgcaggtgctagatacaggttctcccggtggaggagcgaaccccttgtgggccgttagctactggtgggatttgagcatggtatttccctatccgttgtggagaggagcatggcagctcagagtgggtgggaacagtgtgtggtccctgttatcaccttcaagggaataaagtgtgtctgggggcttcagaggtgctggccccatgggcttataggtggttcattcattcattctcattcattcattcaccaaacttattaaacacccactgtgagtcaggaacatcatgccaggtgcttagggaaacaaatcaaagcgggttgggtgagcagcccaagccaacagatgcacccccattctcacatggtgtgtgttcctgtgggctgggccctgggtggtgtggggtgctggggagaagaggaaggcacaccaggctgcagggcggaggtgcgggtatgaattttcagaggagatggcacctgagctgtatcttcatggataagaagagatttgttcatttgtcctttgtggagcacacattcaggttaagaaagtggggaggatgggctacgctgatggagcgtatgtgtggtatccccaagtgcactgagacacgagtttgacgtgttctgggaagatcgatggtgcggcgtggctggagtagaggtgagggatgagttggaggggtgagttgggccagctctcatggatgctggagtctgggctttccctgggaggtcatggggcgccactggccagggtcagcagggagacctgcagctggatttgcatcgtacagtgggcatggaggggtgtcaggctgggttgggaaccgtgcaggctggaagggcactctggtgctctgagcattcagagggggcagctgggccttgaaggatgagcaggggctccagcaggaactggagagcgcattccagggaggacgcaagtgcaggcccctttcactacagaaaagcagttttcacacagaccttccaaaggggaggagaggggactgcctgggcctggcagctgcggcaggtagcagcaatcagagggcagggaccgctcctcccgtgcctgagacctgcccagggtccttcagggaattcgtagctgaggaggaaccagatttttgggactgagttctccctcaccacccgctctgagccaccctcttggtcccttgtcctctactgcacttcttccggggcttggctcctcgtcatgagaggagcttccctgggcatggcgaggggcgtgactgacatagcagccctggacaagtggctccaggtgacctgtgttcacgttgatcacagcactaaccacggcccctcctctcagcaccttcccctctcgagccgtccagtcccagtgaaaatgctcaccgttcatgggtgggctgagcaagcccctgatctctgccttcctccgtgttctgatctgcttcatctgctgtgaaggcctctcgccatttcccccgctggcaaactcctgttcttcctggaaagttcagctaaaaagtcatcccctttaggggtccttccctcaggggaccgtgcacttggcgagacagggactggtcttgggtctctctgttgactgttttatgaacccaggtagtcacttccagggaactcatcagagatgctaccattggctccaatctccctctgttcccactcgaggttttttgtttcttcgtttgtttttctttctttctttttttttgagacagagtctcgctctcgcccaggctggagtgcagtgacatgatctcggctcactgcaagctccgcctcccgggttcacgccattctcctgcctcagcctcccgaatagctgggactacaggcacccgccaccacgcccagctaattttttttgtatttttagtagagacggggtttcaccatgttagccaggatggtctcaatctcctgatttcgtgatccgcccgccttaacctcccaaagtgctgggattacaggcgtgagccactgcgcccagcccgtttgtttttgttttttggtggacatcaactttaatttgccctttgttttgttttgtttttgaggcagggtcttgctctgtctcccaggctggagtgcagtagtgcaatcttggctcactgcagtctcgacctcaagaggatcaagcaatcctcttgccttagcctcccgagtagctgggaccacaggcgcacaccaccatgcccagctaattttattttatattttgtagagacagggttttgccatgttccccaggctggtctcaaattcctgggctcaagcaatccgtctgcctcagcctcccaaaatgctggaattacaggcacgagccactgtgcccggccttaatttgccctttgaacatgtacaattcagggcctctctgggcctcagtttcttgatctctgagatgggaagatgggataataatacttgttcctcccgtccttcagctcctccaggggaccctcacaccagcacactctctgtcagtcttccctcaatgaacccagcaggcaagcttggttttgacagaggatgggtgagcagagataaggaaaacggccagaaatatctggcttccctcagcaggggcaccaaaattggtacctggaaattgcctggcttggacaggcagaattgtcactgtcaacccccaccaccaaaggtcttgggtctttgtctttctgcttgtggtgtttgagagagctgcttgacacagccgaggtgcggtctgtgtcaggtgacctgggcatcctgggggtgcagggagaagcccaggtaaggaggaggaggggccggtcatcagtggggaaaagtgattgtctaccccacgggaaggtcaagggtaggacgctgtgagaagccagggggagagatgaagtgaggcatgatgcggggggccctcatccaccatccccctcttgcagctgtgctgggaagagcctaggctccagggtccaaggtggcagggacagaaggaagcacgtgtgagcactttctccctgctggcccgccttcctggttggcaatgccgtgagtgttccaggatgtggccccgtggctgtcatttcctttcttccacctagtgataacaatggccactgtttgtgtgcccacagtcggcctgtgtcccagacaccttccctccattgcgtcatctcgtcctcctgcctaccctgaaggctggatgccagccaagcctgtcgtttctgtggccatgctgtcgtgggtgtgtggggggcatcccctagccccaggctctggtggggggtacacaggctgggccattgacgaaggggtgtgtggaatctttctttgatttcactgcacccctggtgactttctccctcaatctgaggctcatgggtgctggatgctcttgactctctgcccttcctgggcgcacccctccgcgtccctgtgggcccgtcctcggggtagcctctctgcgctcttccaggccaggcctgagtcccacaggtccccatcttcccggctgcagcccccagaggctcagcctatactgctacttcctttgaaaactataatcgctttacatagcatctggaaaatagggaaaaggaaaaaacaaaagcccataaacccagcaccctcatctactcaatggcatgttttctgtcagtctatcttggtttgttttctatcaggctttgttttttctatgcataatatttactcagttaaatttttgttttgacaaactttctgtgagccaagcttgtggacggagatgaaaagacgagcagctgcctttgagaaactcagactctgggccagcccatctgggtgccagctttcactgctccacccactagctgggtgaccctgggcccgtgactttacccctctgttctttggtgttctcatatgtaaaatgaggataataatagtaaccagttcatagagtggttgtcagacagaatgattaatgtacgtaaagctttcaggatggtgccagcaagatgcacaggagtgtttggtaggaggatgacgaagcttaccgtctggcaggaggggcagttgtaacatgctgggctgtgatagtacagatgtgtttaaagtgagggagagcccagagcaaggagagagaacctggcatctggtgatggtgtatcaagaacattttaggccagacacggtgactcacacctgtaatcccagcactttgagaggctgaggcaggcagatcgcttgaacccgggcgttcgagaccagcctgagcaacgtggtaagaccctgtctttataatttttttttttttttttctgagacggagtcttcactctgtcacctaggctggagtgcggtggtgctatcttggctcactgcaacctccacctcccgggctcaagtgattctcctgcctcagtctcccaagtagctgggattataggtgcccaccaccatgcccagctaatttttttatatttttagtagagacggagtttcaccatgttggtcaggctggtctcaaattcctgacctcaagtgatctgccctcctcagcctcccagagtgctgggattacgggcatgagccaccatgcctggcctctataaaaattgtttggaagaaattacctaggcctggtgatacacacctgtagtcctagctactcaggaggctgaggtggaaggaggtagaggctgcagtgagccatgattgagccactgtactccagcctgggcaacagagccagaccctgtttcaaaacaacaacaacaaaaacatttttaaggaggaggctgagaaccacgagaaccaagcttggatttgaagaaggatcagggctttctcagacagaaaaggagaggaagaacattccagatagacatcattgagagatggcactgagccttgtaatgggacactgcgaacttttcttcagttgttatgatctttttttttttttttttgagacggagtttcgctcttgttgcccaggctggagtgcaatggcgccatctcagctcaccgcaacctccgcctcccaggttcaagcgattcttctgcctcagcctcccaagtagctgggattacaggcatgcgccaccatgcctggctaattttttgtatttttagtagagacggggtttctccatgttggtcaggctggtctcaaactcctgacctcaggtgatccgcccgagtcggcctcccaaagtgctgggattacaggcgtgaaccaccgtgccttgttggtataattattagtattgatcttttttccttttcatgtgcctcttagtgggccccttgcttttgtcttccttctgtccccagggttgatcctgtgctcagcacataggccagggaagaatgtggctgtgacccagtgtccactcagatgtcctctctcccccagggcacccatactctgtccttagtgtcttttgtctggtgacatcttggcacagaggcagagggcggcctccgtctgattggcgcctggctttggtgacagtaccttaggaaggcagtgtattttctgggaacctaggaaataacaaggtatctaattccatcatcaacactggggacaatttccatggcagaaactatgactctgaatatgcagcgtaaagttaccacccagacactgctgctcctgagtctcgaatggcatcttctgcaggggctcccccacctgcccctgcagaaggtgcagttcgttcatttccaaggagcttgcttttgtgtgctgtctctcggagctctttgggaaacctgtggtagcaggaaacaaaggatttagaccaatgccgatgatccccttgctccgatagagtgtgacatgatgctggtcaccttttggtatctaggaggggggacattgattttgtttgcggaagtgaaatgatccatgctggcctctttttttttttttttttttgagacagagtcaccctatcgcccaggctggagtgcagtggcgcgatctcagctcactgcaacctctgcctcccgggttcaagtgattctcctgcctcagcttcccgggcagctgggactacaggcgcctgccaccacatctggctaatttttgtatttttagtagaggcagggtttcgccatgttggccaggctggtctcgaatttctgacctcaaatgatccgcccgcctcagcctctcgaagtgctgggattacatgcctgagccactgtgtctggtccatactagcctctttgagtgctgaaaggttatctctgtaacttatttagtgagaaccctccatttgcccagggcattactgcctataatgtatgttcacatgtgctatctcctttggtcaataccacacactacaggtgaggaaactgagtctctgctgggacactgggtcaggaagcaggcagttaaggtcacctgtgcacagtggcagcacagggggacagccttctaggtagccagcctggcctgagggttctgtcacttttacctcccactcagtgttgtttctctttctttcccctccttttaagatccctccaggcccaggatctggggacaacgctggtggggagtgatctgggtgtctgtgcaggaaaccgctgcactgggtgagatgggcatgggagactgtgcctggctgaccagagacctcgttttcttccagacagagggggaagacggtggggcctccccacctgccccgcagaagatgcagttctttggccgcctggtcaataccttcagtggcgtcaccaacttgttctctaacccattccgggtgaaggaggtggctgtggccgactacacctcgagtgaccgagttcgggaggaagggcagctgattctgttccagaacactcccaaccgcacctgggactgcgtcctggtcaaccccaggaactcacagagtggattccggtgggtgatgctcagcgggaacatacttctctcctttcactcccccacgtctcggattggaggtcttattggccgagaagcagtttctttgagtctctgtctgaggggtctggagaggggtgggagagaggggagactgtactcttggaccagagggaagggcttccgagactccacacttctggcccatcagtgtcccagcacgaggctgaggatggaagcctgggttgtttctggcctggaggctcgacctatatggacaaagggaagaaggaaggacagggagactgagagtgtccacatcagataaggcccatggggagaacctttagccctggctctttatttttggttttggtttttgttttttgagacagtcttgctctgttgcccaggctggagtgcagtggcgcaatctcggctcactgcaacctctgcctcccaggttcaagcgattctcctgcctcagcctcctgagtagctgggattacaggcacccaccaccacgcccagctgatttttgtatttttagcagagacggggtttcatcatattggccaggctggtctcaaactcctgacctcaggtgatctgcccaccttggcctcccaaagtgctgggattgcaggcgtgagccactgcacctggcctagccctggctctttaagggcatggccgttctcataggggctgcccagggtttgcttaggaaggctggacagagctgttgcctcttggggcatgctgggactcccctgggcctgaagagaaggctcaaaagccaggacaggcctgagggaaccgggccaacggcagagctggttgggaaaaggggagaagcagccaaggttccaaatgcaggccccagcagtgcttggcagactggcatctagttgggctcagacagatatccctgtttccgctcacctatccatctggctgtcctgtcagccatccattcaacatgcaccaagcacctccagtgtctccagagtcctgggcttcgggccagtcctggctggcctgtgagatgacaaacatgtcctgtgtctttaaggaacgtacagtctggtgggggaggtccggtgcaaacaggcgtcatagcaccccttgaggagtgctgtgacagagggagagcctaggaaacagtgtggatcacaaggaggtgattgagagctactctgcgtctggaagagtgaggaggagcctgtgtggcagaacaaaatggataaggtcgttccagccgtgcagaagtgtggaggtgtgagcctgcaggcaggtggctctggttggatcccaggtgcatgcagggctttggtgagagtgaggctgaaggaagcagctggggactcattctgactaaagaggcatggcaggaggggtctctgaaagtgtcaggctgggggccaggggctgccaccaacagaagagcaaggcaggtatcagggccccatccaatcaggtgagaattcagagcctggctccacaaggaacctgaggcagaggcacccacagcaggtgcttgggctaaatgcagctcagtggccagtgcaggcaccagttttaatacagtggggccattccagattctgagtgcagatggggctgagcagaccgccttccagctggactcgatcaggactgaccctggacggggcaggcttgcacttgtagcttcagagctccactgcaggcacagctgaccagggcagcgggtccactccttggagagctggacagccccacttttgaggtacacggccctggggataccactaatctccacgtaccaataatcaccaagttctgtcagttgtaaaatcccttgacaggattccagatttgtctcagccagcttaagccccagtgtgggcagacctccatcccaggaggatttagtcctttgtcagcagcttcttagctacacgtaagctattctgtggtactttatagtttacaggattttttgttttcttttttttttttttttgagacagagtctcgctctgtcacccaggctggagtacagtgacgcgatctcggcttactgcaagctccgcctcccaggttcacgccattctcctgcctcagcctcccaagtagctgggactacaggcacccgccaccacgcctggctaatattttgtatttttagtagagatggggtttcaccatgttagccaggatggtctcaatctcctgacctcgtgatccgcctgcctcggcctcccaaagtgctgggattacaattttacaggatgtttttaagtatgttgggttagcacattctctgccaatccgtggaggtgggcaaggaaggcagtattccattttatgcatgagaaaatagccttgggatgataagtgattcatcccacttatacacaggaagcagtgaagaaacagaatcagtgtcttctggttcccaattcatttctctgtgctgctgtgttgtttccatgtatgtatgtatgtatttatttttttgagacgttaagtcttgctctgttgcccaggctggagtgcagtggcatgatcttggcttacagcaacctctgcctcctgggttcaagctattcttctgcctcagcctcccgagtagctgagactacaggtgcgtgccaccatacctggctaatttttgtgttttttagtagagacagggtttcactgtgttagccaggatggtcttgaactcctgacctcgtgatctgcctgccttggcctcccaaagtgctgggattacaggcatgagtcaccatgcccggctttgtttgtcttatttctaaattttattgatttatttattttcacagtcatagctctggagtcttttttatcttctcccctctaacctgctcccacccgaacctttccatttcagcagatagcatcattgcaacgggctgtgccagatccagccatcacatccacctttccagccaaagggagggtggaagggcaggatgcagaaggtcaatctccccctcctcagggacatttcatggaagttgcacgcattggccagaacccggtcacatggccacagctaactgcaaaggatgctgggaagtgttgcctgtgttgcagacagccacgtgccagtcgaaaatcagaggttctttctccctccgtcttgctgctggctcgcttctccagaccacagtcattgtgcacgtgtctcctgctgctccggctgtggcctgcactcctctcatcctcttccaagctgctgtcacagcgctgtttccagagggcaaatctgattggtcactcccctgctttactccccaagggcttcctgttttcttttatttttatttttattttcattttttgagatggagtctcgctctgtcgctcaggctggagtgcagtggcacaatgtcagctcactgcaagatctgcctcctgggttcatgccattctcctgcctcagcctcccaagtagctgggactacaggcgcccgccaccacgcccagttaattttttttgtatttttagtagagacggggtttcaccatctactcttagccaggatggtctcgatctcctgaccttgtgatctgcccgcctcagcctcccaaagtgctgggattacaggagtgagccaccgcgcccggccagcttcctgttttcttaacacatcaggtgcttaatgacttaaaagggcccagtgtgatcaagtttctgcctctgtgttctcagctcatgccgccttgtgctcctggcctttgcccaggctcttgctgtggcctggaatactcccctttctttgcctgccttccttcctcttgccctcccctgacctgcaggctggattaggagtttctgctgggcatcccatggcacccgtccctgcactggggatcctgctttcctggtaggccacagaccttgtgaggggagggactgtgtctgttgggttcatgacagtgtgcccagcccccagcaggtgcctggcgtagatcaggtttgtggaacaaatgaatgtgatatattaatttagctttagagtattcattgagggctgctgtgtgccaggccctctgtgccacctgggtggagggtggaggactgttgcattgagggcagttgaaggagtgagctgggaagtgggaggtggaggatggggactgggatgcagggtttgaggttatcaggggtcccagaagcagtaatgccaaggcctaggctgtgacctggagtgagggctgcgatggggtggggtggggtcgaggctgtggaggagggtcatcagggcactgctggagccctggggttctccagggccgggggtggtcattgcagtgttctcccagctcctctcaacaccctgcggtctgtggagagcaggcctggtgcactggacttgcctctggccagggctgagtttctgccttctaaacgatcttcctcctgtgttgccctagaggcctctggactgtcctgagtacttgacgcgtgttagagtgagcatgggctgctagccttccgctccaggtggaggagtttctgttgttcttttgctgctgttgctgcagtgagctgccaggctgagcttctggatggacctgggggatggaattaggagcttctgaattcttgggttgtataacctaaggccggagagtcccacagcactgctgctgggcggagagactggaccctgctgatacagacagcgacagcagcaggagcatctgcagtttcccagcaggtcctgcatgcctgggcttggcactagtctaagtagtaactcatgttatcctcacgacagtcccacgaggtggggtcattactgacctcctattacagatgaggaaacagaggcttgcagaatttgagatcacacagctggtcagcgtagcgattattcagaccctgtcacctggctccagaacccactcgtttacctttcttacatcagggctgctttgtagtgtggcgagctgagtggagctccacccgcctgggctgatcctggcccttcctgcctgacctatggtgcgggggccctggctctccccgtgtgagcccccaggggtcacttgtaatatgcctgtgtacactatgatagcatagatacttctgttcctggtacagattaatcatttacggctggcattgacttgtaacagatgacatttgatgaaatcaaccagcctctcactggtatctcagcagaaacagggctgtacctcccaggcatcctgggaaggatgatagaagtgtgtgatctgtgcttccctaccgggagctgacttttgaggctctctggactgggactttgccataaaactgcttatcagaaacctcagataagtggagtgccctgtgtcctggccacgtactctggggccagctcctccatccattcagtcctcccacatcccatcttcaccaagcagagtggaaagcggcaggtctctgcgagaaaaggaggctctgtacccagccttcagtgagataactttagagtggggccttgtattccctacacaggccttgtccccgacacggcctctttgcccttgcttctccttctgctaagaatgctccttcccaactccttggctggacacacggctcctgctctgtgggcctgtcctgttcccactcagagcctcagcaccccccatgtggccaagacacagcccctcttgccttaggttgccgtgggtctgtttccacatctgtttcccctccagactgcagggctcctgagggacagggcctggggccaagtctcctctgcgttcctgatgcctggtggtgtgccacgctctccgtgggtgcacggtaaatatctgccgagtggctagatgtatccatggttgctgaaggccaagtgtgttgaccagagggcgtgggaaaggctccactggggtggctggggtagagatagaccttaaggggtccagaagactccaccagctggagggaaaggccctacagagacaaggtactaggaaaggcccagaggacagaggaggggccctgtggggagcctgtgggcaggaagggcctgtgctgggctttgaaactggggactcaggtactgctctagcgtgagggtccttggcattttttttggtccaggaccccctgaggtccctggggaatgagaacaggctcacacagccactttcaagaggtttgcaggtcccctgaggcttagccacagacccctcccaccccagcagagacacagcagaggcttctgagtggaggccaggtggcttcagcctggggttctagaagggagggaagagacacacccccgtgtgtcctccagagcctcagccttctccctgaatctcccctttgcctcctcactgtaacccacacctggctctccttgaaggacccgcttgccccgcagcctcctgagagttttctctcccagtccctctcccactgggcctggaggtggggtagggtcctccttgcccccagccttgaatcttctgtcaccctacaataccacttgctgtcaccccggtgataggtatctacgagcctggggtgctcccccacatcctcaaagatgtgagcccctgactcagcgttgcctctggttcctgaccctccacattcacatgaccacgcgctggcctttatcatcgccagtgacagcagctctcccgtaaatacaagtttcaagcaccccactttccagtctctgccttctgtctttccagttcattccctctagtcctccacccacacagtgcttttccccattgacagggaattgctcctggccgcttttcccagccccatcccgttcatgtgccttgctttgtacccagcatggactccatggcctgtcattgtcactccttcacctatacttcctgcctccttgcttctctctctcttcgtcatcctggcatcaccaccccagaactgcttggtttcagttctccaccatggctaggggaacatacctttttgctgactgctctcactttctttttttttttttttcttttttttttttttgacacagagtctcgctctgttgcccaggctggagtgcagtggcacactctcagctcactgcaacctccacctccggggttcaagcagttctctctgcctcagcctcctgagtagctggtattataggcacccgccaccacacccggctaatttttgtattttttttagtacagacagggttttgccatggtggccaggctggtcttgaactcctgacctcaggtgatatgcctgccttggcctcccaaagtgctgggattacaggcatgaaccaccctgcccggccctattgctctcactttgaaatcacgacatgagccacagtgagcctatgatgtggtttgacgtctttctgcatttctctgttcacccctctcccagaaggcatgcctccttccctcccctcagcctgcagccccttcccctccacgcttactctcagctgatagccctgctgctgtctcgctgagaaaatagaaatagccagaggagaattccctctaccccatgcacacacctctgtccccgcctactccacattccctgttgtcagcaccgatgtgtttagctgagggtggtccccccattcaaggccatcatctcctgtcatctacttcttgacaccatttgaacaattatctcccctctttcctacataacactttccccttttctactatatattttttgctatggattgaaagtatccccccgaaatcatatgttgaagccccaatccctcgtgtgatggtattaggaggtagagcactatgggggtgattaggtcatgaggatggagccctcatgaatgggattagtgcccttagacgaagaggcaagaaagagatgatctgtctctgccatgtgagggcacaacgagaagatagccatctgcaaaccaggaagtgaaccctcatcaggaactctatcagccagcaccttgatcatagacttcctagcctctagaactgtgagaaataaaggttgtttaagcctcccagtctgtagttttctgttataatgtcctgacctaagttattttccatcgctatacaatgggttatttttttctttaaaaaaaaattatttcttgactctactttttcctccagagactgcttatattccactgtcttcattcttctcctcctgttttctctctttaaacttttcaaaaatagcaaaatataacacatatagagaaaatgatatacagctcagtgatttatcacaaacacctgtgtaaccaccactcgaatctagagataggacattacagcaccccagaagccctccttttgtcccctcttcccaaagaagggtaaccaataacttgccttttatgataaaggctttttttttttgagatggagtctcactgtgttgcccaggttggagtgcggtggcgcaatctctgcttactgcaagctctgcctcctgggttcacgccattctcctgcctcagcctcctgagtagctgggactacaggtgcccgccaccacgcccggctaattttttgtattttagtagagacgaggtttcaccgtgttagccaggatggtcttgatctcctgacctcgtgatccacctgcctcagcctcccaaagtgctgggattacaggcgtgagccaccgcccccggccaagataaaggcttttctatctggcttctttgttagcattttgttggcgagattgatacgttttgtgtgcagctgtctgtcattttcattgcaatagaattccattgtctactatatcacagttactcattctactactgatgaaaatttgggttatttctagtttttttggtgcatacatgcatacatttctggtagacatacctagaagtgaactggctgcattatgggccataacttgtcttcaacgttagtaaataataccgcccgtctgttttccaagcagcagtaaatggcactttctgttacttcatatcttctgttacttggtactgtcaggttttaaaattttagtcattctgtcgggtgtctagtagtatgttattgtggttttattttgcatttgcctgattgcaaatgaagttgagcactttttgatacagtgattaaccatttggatatcctcttcagtgaagtatcagctcaattctcttgactatttaaaaaataaagttgtttatctttttcttacagagttttaggaggagttttttggtacatgtgcagtccaaatacacaccttttgtcagtgatacgtgttcagctgcacacacggtgttttgcctttttattcttttaatggtatctattgataaacatgagttcttagttttaatgaagtcaaatttgttcatcttctttacggtgtactttttgtgtcttgtttaaggaagtccttctctatcttaaagctttgagaagcattccttctttctcctattttctaaaaattgttgaagatctccttccttccttccttccttccttccttccttcctttcatctatctctctctcacccaggccaaacttcagtggcatgatcatggctcactgcagcctcaacttcccaggctcaagtgatcctcctgcctcagcctcctgagtagccaggactacaggcacgcaccaccatacctggctaattttaaaaattttttgtagagacacggtctcatcaagttacccaggctggtcttgaactcctgggctcaaacaatcctcccacctcagcctcccaaagtgctgggattacaggcatgagtcacatgtctagcctgtattctttctttcttaaatgtttggaagaattcatgggtaaaaccatgtgaccctggagtttatttgtgggaagcttttaaaacatggattcgatttctttaacaaatataggactatgagattttcatctcatgtcggtttgggtatgttgtgttttcaaggaatttttctattttatcgaagttgtcaaatttgtctgcaggtccccttatttcctttttaatgtatggaggatctgaagggatggtactttgtgttgtctctatttcttgtttggttttgctagtgatttgccaatttaaaaaatctttccaaagaaccaacttttggctttgtttattttttgaaaacctgagtagctgggattacaggcgcccaccaccacacccggctaatttttttatttttagtagaggtggggtttcaccatattggccaggctggtctcgaactcctgacctcagatgatccacccgcctcggcctcccaaagtgctgggattacaagtgtgagccagtgtgcctggcaagccgctttttaaatggcaccaatcccattcatgagggcagagccctgatgatcgaattacctcctaatggccccatttcttaatactatcacactgagaattaagttttaacataagaattttaggaagacacaaacattcagaccatggaacatatataaaacagttgtcctaccaactaacagaatacacattcttttcaagaacacctatataaaaattatagacactgacctatgctggccataaagcaaatatgaacaaatttcagatacctgaagagatttagactatgttctccaactacagtgcaattaagctagaaatcaatagcaaaaatgtaactataaatgagcccgtatgtttgaattttaagcaagatatatgtaaattatctatggttcaaaaaagaagtcacagtgaaatttagaaaatatcttgacgtggcgggttgcagtggctcacgcctgtaatcccagcactgtgggaggccaaggcgggtggatcacctgaggtaaggagtttgagaccagcctggccaacatggtgaaaccctgtctctactaaaaatacaaaacattagccaggcgtggtggtgggcacctgtggtcacagctacttgggaggctgaagcgggagaatcacttgaacccgggaggcagaggttgcagtgagccgagattgcaccactgcactccagcctgggcaacatgagtgaaacttcatctcaaaaaaaaaaaaaaaagaaaagaaaaagaaaatatcttgacccaatgatgatgcaaatactacgtatcaaacttgtaggatgaacttccacttctggccatgacagaggagcctgtatcagactagccttcctatttatatatttatttttgagatggggtgtcgctctgttgcccaggctggagtgcggtggtgcaatctcagctcactgcaacctccacctcctgagttcaagtaattctcctgtcccagccttccaagtagctggaattacaggcgcccaccaccacacccagctagttttttatatttttagtagagacggggtttcaccatgttggccaggctggtctcgacacctgacctcaggtgatccacctgcccctgcctcccaaagtgccgggattacaggtgtgagccactgcgcctggccgtgagtgacctttttaatgtgttgttgaatttgatttgctggtattttgttgagaagttttgcatcaatatccatcagggatactggcctgtagttttctttttttatatgtctttgtctggttttggtgtcagggcaatactggcctcatagaatgagtttggaagttttctctcctctgtttttcataatagtttgagtagggttggtattagtttttgtttaaatgtttggtaaaattaagcagtgaagccactgggtcccaggcttttctttgctgggagacttttcattacagctttgatctcattacttgttattggtctatttaggttttggatttcttcacggttccatcttggtaggttgtgtatgcctaggaatttatccatttcttctagggttttcaatttattggcatataattgttcacagtaacctctaataatcctttgagtttctgtgatattggttgtaatatctcttttgtcatttctgatttttttgtttgggttttctctctttttttgttagtctagttaaagatttattgattttgtttatcttttcaaaaaactttattttgttgatcttttgtattgttttgtttcaatttcatttatttctgctatgatctttattatttcttttcttctactaattttgggtttggtttgctcttttctagttctttaagagacatcattagattattttgaagtttttctacttacttgatgtaggtgcttataggtacaactttcctcttagtacttctttccctgtatctcacaggttttgatatgttgtgtttccattatcatttgtttcaggatgtttttaaatttccttcttaatttcttcattgaccattcaagagcatattatttcatttccatgtgttcgtatggtgtgcaaaataccttgtttttgatttgtagttttatttcattgtgatcacagaagatacttgatatgatttcaaatttaaaaagtaatttggctgggagaagtggctcatgcttgtaatcccagcgctttgggaggccgaggcaggcagatcacgaggtcaggagatcgagaccatcctggctaacacagtgaaaccccgtctctactaaaaatacaaaaaattagccaggcatggtggcaggtgcctgtagtcccagctactcaggaggctgaggcaggagaatggtgtgaacccgggaggcagagctggtagtgagccgagatcgcgccgctgcactccagcctgggtgacagagcaagactctgtctcaaaaaaaaaataataacaataataataatttaagacttgttttgtggcctaccatatggtctatccttgagaatgatccatatgctgaggagaagaatgtgtattctgcagccgttggatgaaatgttctgtaaatatctaataggttcatctgatctatactgcagactaaggctggtgtttctttgttgattttctgtctggatgaactgtctaatgctgaaagtggagtattgaagtctccagctattattgtattgaggtctatctctctctttagctctaagaatacttcctttatatatctgggtgttccagtgttgagtgcatatgtatttaaaattgttacattatcttgctgaattgacccttttatataatgaccttctttgtctctttttatagtttttgtcttgaagtctgttttgcctcatagaatagcatagctattcctgctcttatttggtttccatttgcatggaatatctttctccatccctttagtttcagtctatgtgtgtctttacaggtaaagtgtgtttcatgtaggcaacagatcactgggtcttgtttttctatccgttctgccactctgtgtcttttgattggagagtttagtccatttatgttcaatgttattactgacaagtaaggacttactcctgccactttattaattattttcttgttgctttgtgatcttctttctttccttcctgttctccttttagtgaaggtgattttctctggtggtatgttttaatttcttgctttttatttttttgtgtgtatctgctgtatgttttttgatttgaggttaacatgaggcttgcaaataatatcttataacctaatattttaaactgatgacaccttaacactgattgcataaacagacaaacaagcaaagagaaaactaataaaaactctacattttaactttgtccccccactttttaacttattgtactgtttatgtctgaaaagttgtagttattatttttgattggttcctcttttagtctttctactcaagatatgagtggtctacatatgacagtgttataatattctatatgtttctgtgtacttgctattaccattaagttctgtactttcaagtgatttcttattgctcattaatgtccttttctttcagattgaaaaactccctttagcatttagcagtatgtgaactgcatttttcaagtccagaatttctgcttgattcttttttttttttttgagatggagtcttgctctgtcgcccaggctggagtgcagtggcgcgatttccgctcactgcaagctctgcctcccgggttcacaccattcttctgcctcagcctcccgagtagctgggattacaggcgcccgccaccacgcctggctaattttttgtatttttagtagagatgggatttcaccatgttagccaggatagtctcgatctcctgaccttgtgatccgcctgccttggccttccgaagtgctgggattacaggcgtgagccactgtgcccagcctgcttgattcttttaaattatttcaatctctttgctaagtttatctgttaggattctgaattccttctctgtgttagcttgaatttcactgagttccctcaaaacagctattttgaattctctgtctgaaaggtcacatatctctgtctctccagaattggccactggtaccttaattagttcatttggtgaggtcatgttttcctgtatggtcttgatgcttgtgatgttcgtcagtgtctgggcattgaagttaggtatttattgtagtctttgcagtctgggcttgtttgtatctgttcttcttaggaagactttccaggtaataaaagggacttgggtattgtgatctaagtttttggtcactgcagccatatctgcattagggggcaccccaagcctactaatactatggctcttgcagactcgtaaaggtaccacttgggtggtcttggataagatctggaagaattctctggattaccaggcagaggctcttgttctcttcccttactttctcccctaaaagtggagtctctctctctgtgctgggccgcctggagctaggagaggggtgacacaggcacctctgtggccactatcactaggactatgctggctcagacctgaagccagcacagcactgggtctcacccaaggcctacagtctccactgcctggctactgcctacgtttgcttaaggcactagggctctacagtcagcaggtggtgaagccagtgagattatgtccttcccttcaaggcagcaagttccccctacccccatcctgggaaggtccttagatgccatctgggaggcagggcctgcagtcagaaaccttagtaatctccccagtgctctattctattacagcctggctgatacccaagccataaggcaaagtccttcctgctcttccctcccctttccacaagcagagaagtctctctccatggccaccactgccccagccctgtggcagtgctgccaggccactgccaacgttcattcagggcctaagggctcttgaagcaactgaacactgccaggcctgggactctccctttagggtagtgggctcccctctgacccagggcaggtccagaactgccaccccacagccaacacttagaatctgggaccccaagagccctcttggtgctctgccacactgtagctgagctggtacctaggctgatttttgctttttatgaaggtacttttttgtgtgtatagttcaatttggttttcctccagggaggacaattggtggaggtttctatttgggcatcttttttttttttttttgagacggagttttgctctttcacccaggctggagtgcagtggcgcgatctcggctcactgcaacctctgcctcctgggttcaagcgattctccagcctcagcctccccagtagctgggattacaggtgcctgccaccatgcttggctactttttttttcaattaaaaagtaaactttaatgtcgaaaatgcaaacttggggaaggcagaaagatcacacacaaggctgtcgcttcacacttggaaggttgcacggcggccaggagaggcactcctcacttcccagacagggcgggggccgggcagaggcgctcctcacttgccagacggggcggcggccacatgcctggctaatttttgtatttttagtagggacggggattctccgtgttggccaggctggtctcaaactcctgacttcaggtgatccacgcacctcggcctcccaaagtgctgggattacaggcatgagccaccgcgcccagccctatttggccatcttgctttgcctccaccttcatttgataacagaacacccccatgtaaccaccaccacaatcaagatataagacatttctgttattctccaaatttccttcaccctcctttatagtccatggcacccaccccatccctgggcaacacctatgtgcttcctttttttttttccccgcaggaggacgtcttcctatacctatgtgcattccatcactgctgcttttaatcatatagcgtgtagtcttatgagtctgactttttcacttagcataatgcttttgcaatttgtgattgagcgttttcatatgattctgttttttctgtctcttagcttggaagttatacactttttagtagtaactgttgggagatcgttctccaagagtctctctcatatttccatacatcctgctagcagagacattgactacctgtttttgtctgtttagtgttgctataaaggaatacctaagtctgagtattatacatagaaaagaggttttatttgtctcatggctcctcaggccatacaagaaacatggtgccagcatcttaccagtgtcacatggcaagaaaggaagtgaggaagagaaaataagttgttaactggttgttaaaaagtgccaggcacgggccaggcacagtggctcgtgcctgtaatcccagcactttgggtggccaaggcgagtggatcacctgaggtcgggagttttgagaccagcctgaccaacatggagaaaccctgtctctactaaaaaaaatacaaaaaaattagctgggcatggtggtgcatgcctgtaatcctagctactcgggaggctgaggcaggagaatttcttgaatccaggaggtggaggttgcagtgagccaagatcacctgggcgacaagagcgaaactctgtctcaaagaaaaaaaaagtgccaggctctttttaacaaccagttcttacaggaactaatagagtgaaaactcactcacccccaccccacagggagggcattcattcatgagggatccacccctatgacccaaacacctcccattagccccccacctccaacattggaatcaaaatttaacatgaggtttggggggcagaaatccaaattatagcactacctttgttccaggctaccttcaaaggatgtttatacagcaaacagccttggaaaatagagttagggtctccttgtagagcacagggtaagtttgcttacttttcagcataatcaagattgtgtcttcttctggagcaaaactttgacaacaacaagcggggcaaagtctgaaaccttttgcacatcttgacagaaccttagagattacgagatttatctctgccttactcaaggtccattagtatcttccagaacaataagttggtcttagaatcctttagctatgtattcccttccaggcttcgatgctgtgtgctgttgttttatttagtttttattttaaacccaacaagacgctataccatcaatacttatttagatccccccacatatttaacttgccatggtgcttcattctttcatgcctctttaagcatccatctaggatcgtgttcattccacatgaagagaaagcttttggcccagcacgatggctcacacctgtaatcccagcactttgggaagcctaggcgggaggatcgcttgagcccaggatttccagaccagcctgggctacgtggcaaaaccctgtctctactgaaaatacaaaaaattagccaggtgtggtggttcacgtccctgctactcgggaggctgaggtgggaggattacttaaacctgggaggttgaggctgcagtgagcgttgattgcaccactgcactccagcgtgggtgacaggagtgagaccatgtctccaaaaaaaaaaaagaaggaaagaaaaagcttttgtatttcctttcgtgtaggtctgctaatgacaaagtctctgggttttttgtttgactagagaaatgttttaattttaaccttattcttgaaggttttgtttttgttttcattttgttttgtgtgctaagtacagaattctcattggcatttatttatttagagacagagtcttgctctgtggcccaggctagagtacagtggcacgatctccgcctcccaggttcaagcgattctcctccctcaacctcctgagtagctggggctacaggcatgcaccactacacctgactaatttttgtatttttagtagagacggggtttcaccgtgttgcccaggctgatctcaaactcctgagctcaagtgatttgcctgccttggcctcccaaagtgctgggattataggcatgagccgccgtgcctggccagcatttattttcttttcagctctttaaggaagtcattccattatctctgggttccattgttgagaagccagctgtcattctaatggttgccctttgaagataacttttttccctctgctattttaaatatttcctccttgtattttattttcaacaggtgtaatgtggcacatatatcagcaattgttatgttacatacaatacatattgtgcaacatatgtatcattatcagttattgctgtgtaacaaactactccagaacacagtggcttataaaaggaatcatttatttagtccttaaatctgcaatttgagcagagctcagtgggaaagcctcagctttactttatatggcaccatataaggtaactcgcaactggcaagttggtgctggctgttggctggtagttcattcagggctcagggcccaggaccaagagtcgtcaccatggcttgcttcagcctccttgaggcatgatggctgggtcccaagagaagagaaatagaaacttccagtctcttaaggcattggtctggaagctgggacggcatcacttttgccatattctgttggtaacgcagttacatcgccagattaaagggtaaagagatacaaattcccactgctcagtgcaaggaatatcagtgattttagggggccctgttttaaaacccctacaaggtgctaagcgtggatttctggggctttcttgttttttgtttttttctatgtgtttttttttttttttttggtggtggggtcagggagggcttatagggtatgttaaatcagcagaataattttatttatttatttggagatggagtttcactcttttgcctaagctggagtgaagtagcgtgatcagagatggagtttcactcttttgcctaagctggagtgaagtagcgtgatctcggctcactgcaacctccgccccgctggttcaagcaattcccctgccttagcctcccaagtagctgggattataggcacccaccgccacgcccggctaatttttatatttttagtagacatggggtttcgccatggctagtctggaattcctgacctcaggtgatccacccaccttggcctcccaaagtggtgggattacaggtatgagccactgtgcctgacctataatgttttttaaaaatcagttttggaaagtttgcagacattaacttttcaaatgtagcttccatttgattctttttctactctgcctctgatcctccacttatgtatgtatgctagatcttttattagatagtctgtgtctcttatgtactctactatattttgtattcttctgtctctccatgctttattctgtttactctttcctgattatattttttaattttgtaatttccatttgatgcttttttgatcattcaaaactcttcaccaaaattctaaatttccttttttaacctctcgaatgttatcacagttactttaaagtctattttggataacttaaatatttacagtcccctcacagatatgtttcttttgtatattgtttctgttggttttctttcatgtcttatctccacatatgcctggtgagttttgattatgtgttggtcattgtatttgcaagtatgctcgtagaaataatctggaatggccgggcgcagtggctcatgcctgtaatcccagcactttgggaggctgaggcaggtggatcacgagatcaggagatcaagaccatcctggctaacatggtgaaaccccatctctactaaaaatacaaaaaattagctgagcatggtggcacgttcctgtaatccctgctactcgggaggctgaggcaggagaatcacttgaaccaggaggcagaggttgcagtgagccgagatcacgccactgcactccagcctgggtgacagagcgagactccgtctcaaaaaaaaaaaaaaaaaaaaaaaaagaaataatctagagcctagtttgatgtttccttacaaagaatgaatttatttttgcttctcccattgcaactaggataacctcagtctagtttctggaactgaaatcacttgaggctgaactgtggtctctgtgagagcgtgtctgtgtatggctcacccttattcctaggctacgtagttctttaggaccctaacccaaagtaagagatgttcatcagggctctcctcttggcagacgcctgggctccagtccctgtgtcctgagccccatgaggctgttactggtgctgctcgtctgcccatcctctccagtaacagccacctgaacactgcaattcctgggtttccatcattccttccagcctggtgagtcatcagtgtcttttgaggtatccagtgcctgccagcagatgttttttaataatttgtccagcatttctggctgtcctcagtaggtggtctgtttcacattccctagtctgctgttaatggaaagtggaagttctgagagagaatcatcgttcccgtcagcattcaaatgcctgattacactttccccattcgctatcctttcctttatttgctcctcaccacagcaaaactcctcaaaaatatctatctttgcaatcttcagattctcacattgtgtccttaaacccactttaatcaggccttggttccctccattccactaaaagtaatgttgtcaaggtcgtgcatgcctccgtgatgctaattccagtgatgagttttcagttgtcattctctgacatatcggcaacacttgatgtggagtaccctgatgttgagaggctggtgagatgaaggaaaaacccagccaagggcaatgaggaatggcttccttccgcctcctccttccctatctttgttgtggtttttgttgtttctgtaacactgattacgttatagtttatttaatgtacttccttattctatgtttttactttagtcattttgttgatctcctccataataacataggctcgggccaagcacagtggctcacgcctgtaatcccagcactttgggagaccaagatgggtggatcacttgaggtgaggagttcgagaccagcctggccaacatggcgaaaccctgtgcctactaaaaatacaaaaattagctgggcgtggtagcaagcgcctgtaatcccagctactagggaggctgaagcaggagaattgcaggagaatcacttgaacccagggggcagaggttgcagtgagctgagatcgcgccactgcactccagcctgggtaacagagtgagactctgtctcaaaaaaaaaaaaaaaaaaaaggcttcaggagggcagagcattttatgcaattgttcattaattgacccctccatttggcacagatcacatgcccagtagttaactgttaatcaacgcactctctgtggaacaacaggctggtcccgttgagccaacactctctgggcactgccttcactagactctggctggctgctgcgcttgtagaggtatgcaagacaaaaccttttggtatgttaaaagccctggtcagaactttaagtaaccatcactgacatataatggttatggttttgaaagtgcttttatagtggtttttcatctgtcctcacagcacctctgggaggtaggtaggacaggtacagttagtctcatgtttcaaatggggctcagagagggaaaaggatttcccaagatcacacagcaccttagtagcaaaacttggactcaacctcaacacttaaaaatgaacaaagctggccgggcgcagtggctcatgcctgtaatcctagcactttgggaggcccaggcaggcaggtcacctgaggccaggagtttaagatcagcctggccaacatgacaaaactctgtctcttctaaaaatacaaaaaattagccgggcatggtggcgggtgcctgtaatcccagctactcaggaggctgaggcaggagaatcacttgaacctgggagatggaggctgcagtgagccgagatcgtgccattgtactccagcctgggcaacaagaatgaaactccatctcaaaaaaaaaaaaaagaaaagaaaagaaaaagaaaagtttccctttttttaaatatctcattttaatgactgcataatagtttattacatagttataccataatttatataatattttgttgctgtacatttaggttaaacaatacttacttagttcctactatgaagaggggccaagtactcgaggctggagctctcacatgtggcaatgaaattagaaagtggatatggcagggctgtggtaaaataaaatataaaaataataaatgatattaccaaagaaaaggaaagtttttcaaaataaaggaaaatctagacaagcatagtggctcacacctgtaatcccagtacttttggaggctgaggcaggaggaacacttgaggccaggagttcaagaccagcctgggcaacatagcaagaccccctgtcaacaaaaataaaaaaaaattaggccaggcacagtggctcacggtggctagtgcctgaaatcctagcactttgagaggctgaggggggtggattgcctgagctcaggagttcgagaccagcctgggcaacatggccaaaccccatctctactaaaaacacaaaaaattagccaggtgtggcagcacacgcctttaatcccagctactctggagactgaggtaggagaattgcttgaacccgggaggtgaaggtcgcagtgaggtgagattacaacactgcactccagcctgggtgacaaaatgagactctatctcaaaaaaaaaaaaaattagctgggcatggtggtgcatgcctgtaatcccagctactcaggaactaaggtaggaggatcccttcagcccaggaattcgaagatgcagtgagtcatgatcacaccaccgcaccccagcctgggttacagagcaagaccttgtctctaaaaaacaaagaaagtctaacctaaacgccattatgtcatttacatgtgtataggggtgtgtgtgtgtgtgtgtgtgtgtgtgtgtgtgtgtgtgtgtgtgtgtgtttgcttgggaggggagtcgggctggagctggccaggccgcagcctggggaccttctgattccagcagggatgtgggccgagggtcccgccttactcatttcgggtcttgctcctctgtcctggctctacagactcttccagctggagttggaggctgacgccctagtgaatttccatcagtattcttcccagctgctacccttctatgagagctcccctcaggtcctgcacactgaggtcctgcagcacctgaccgacctcatccgtaaccaccccagctggtcagtggcccacctggctgtggagctagggatccgcgagtgcttccatcacagccgtatcatcaggtgagcaagggaacaagaccatttggacaacgtgtgtgtacctgcttgtgtgggcagtgggggccgcaggcctcggttcccctccatagtttgacttaaaaaggagcagggcctggcatggtcgctcactaacgcagtcccagcactttgggaggctgaggagggaggatcacttgagactaggagttcaagaccagcctggcaaaatagcaagaccttgtctctacgaaaaaattaaaaaattagcatgtgtctatactcctagctacttgggatgctgaggcaggaggattgcttgagcccaggagttagagtttacagtgagctatgattgcaccactgcacttcagcctgggtgacagaatgagaccttgtctctaggaaaaaaaaaaaaaaaaaaaaaaaggtgctgcgttgctaccagattaaaatgtaagaaggacaatgtaatgtttccagagtccggagtgctcaccaggtgccaggtctgtgggagctgatttctacccaccatgaaattgaattttcccaacccccacaaggtatcgtcattttattttactttattttattttattttattttattttattttattttattttatgttacgttatgttattttattttgagacggagtcttattctgtcacccaggctggagtgcagtggcgcgatcttggctcactgcaccctctgcctcctgggttcaggtgattctcctgcctcagcctccggaatagctgggattacagtaatgtgccatcatgcccgggtaattttttttttttttttttttttttttgagacggagtctcgctctgtcgcccaggctggagtgcagtggcgcgatctcggctcactgcaagctccgcctcccgggttcacgccattctcctgcctcagcctcccgcgtagctgggactacaggcgcccgccaccacgcccggctaatttttttgtgttttttagtagagacggggtttcaccatgttggccaggttggtctcgaactcctaacctcaggtgatctgccctccttggcctcccaaagtgccgggattacaggcgtgagccaccatgcccggcccaggtatcatcattctagagagagctaacaggacttgtgcaggtcactcagccagagagggtgaaagaggggcttggatccttggtgtctgcccaggctgctcttctggaagctgaaggcctccttttgtgaatccattcagccagcagatggagcagctgttgcccctggtgagggcactgtccccacccttgcacagggcaccagttggccatcttgtgcagaggtagccacacctcctctgagtctctatcctagatagctcagttaagctcccaggcccagaactcaaaacctcactgctggccgggcgtggtggctcacacctgtaatcccagcactttgtgaggccgaggcgggtgtatcacttgaggtcaggagtttgagaccagcctggccaacgtggtgaaaccccgtctctactaaaaatacaaaaaattagcaaggcgtggtggcgcacgcctgtaatcccagctactcgggaggctgaggcaggagaattgcttgaacccagaggcggaggttgcagtgagccgagattgtgtcactgcattacagcctgggcaacaagagtgaaactccacctcaaaaaaacaaaacaaaacaaaaaccctcactgcactttagtttccaggcgtgcttttggacagcactgtctcatctcaccatcactctgtccatttcctggggcaggcacagcagcttgtgtcgataaggatattgacgcccagaaaggttaagtgaattgcctgaggctagtgagatatccgtgttctgtgaccctttcctgtgccaccaccctgcccacttcctgctggtgtggccctggggcccatctcttgtacgagtgagcaaactgaacagaaacctgatacaggtcacatcagatataattacattcaaatcagcccaactagctgagtggcgggaatgctcttgagctcaaataaaccagaaagtccgagtttccgagtgcacttccctgcatgtgcacttaggtccccctgccaccttgtaccacacctgctcacctctgctcaccctggccctctcctgcagctgtgccaattgcgcggagaacgaggagggctgcacacccctgcacctggcctgccgcaagggtgatggggagatcctggtggagctggtgcagtactgccacactcagatggatgtcaccgactacaagggagagaccgtcttccattatgctgtccagggtgacaattctcaggtgctgcaggtgagcagggggaggggcagggtgactggtactgatacctcccggtgtccacggttccctttgggcccctaggctcaggtgtcactctcaggcctctcactgtcccccattggtccttgaggcctgagctccttcatggagggtgcagacccctccctggctcttccctcccagcccttttccaggagccacgtcctcagtctctttgcttgataaacctggggacggcctccaacccagcaaaataaaccccaaaaaaggcccagctccagtcagttagttcagttccacttttcctgagcacaaactgtgagccagatgcctgcctggaggggctcgtgggccagcgggacctgggcttaaccttttgcaagcttgtccaatctgtggccctgcaggctgcatgcagcccaggacggctttgaatgtggcccaacacaaattcacaaactttcttaaaacattatgagatccatgcatggaccttttttttagatcagctgttgttagcgttcatgtattttatgtgtgacccaagacaattcttctgatgtggcccagggaggccaaaatattggacaaccctattttacaggaattcaaaccaagcaaaccaaactgtctccagttcctgtaggcatttgtgccagaggccctcctgttaacgtttttgattacctgggcaaaagatgtgattttttaattgtgggcaagcagatggggtgatactattaaatagctatttcatatattagattgaacagaaaaggcaggatgttggattatgttttattgtctagaattagaaaattcttctaaagatcatgttctctctgccttggcatcagaatgcaactacgttataccagaaaatgtggattcctttttttttttttttttttttttttttgagacagagtttccctatgtctcccaggctagagtgcagtggtgcgatctcggctcactgcaacctccacctcctgggttgaagtgatgctcgtgcctcagcttcctgagtagctgggattacaggcatgtgccaccatgcctgggtagtttccgtatttttagtagggatggggttttgccatgttgcccaggctggtctccaactcctggccttaagtgatccacctgcctcagcctcccaaaatgccgggattacaggtgtgagccactgtgcccggcccagaaaatgtggattcatatcttatgcttcttgctctcagggaagggaattctccacccactgttgaactccactttcaccgagaatcctctgcgcacccagcatggtgccgcgcagaccctgcctccatgcgggggtgtgcacacccgcttctcgatagtcatgcacgactgcagctgtcctttatccggtgctgattggtgcctgaccttgaactgagtgttgtatgtgttccagttaattcttagaatacactcatggggtggaggtcattattcccctttcctctccgaagaaactgaggttcagtgttgttaattaagaagcgtgcccagggagggccacaaagctgagagagtggggcttgaccttacattggcctcgatgccagccctttgctcttcctgctgtgtctctggcctgccttcaggtccagtgggactgctgtgaggtgaccctggtgtcacatgggtacactgtggttgtaatgaacctcatggggacagcactgagccaaaagtgagacagtaaaaccctcctagcactttcttttttttgagacagcatctagctctgtcgcccaggctggagtgcagtggtgtgattgtggctcactgcagcctcaacctcctggactcaggtgatcctcccacctcagcctcctgagcagctgggactacaggctcgtgccaccacatgggctaattttttttttttttgagacggagtcttgctctgtcgcccaggctggagtgcagtggcgcgatcttggctcactgcaagctctgcctcccgggttcatgccatcctcctgcctcagcctccagagtagctgggactacaggcgcccgccaccacacccggctaattttttttgtatttttagtagagacagggtttcaccgtgttcgccaggatggtcttggtctcctgaccttgtgatccgcctgcctcggcctcccaaagtgctgggattacaggcgtgagccaccacacccaggccacgccagctaatttttaaaatttttttggtaaagatggggtctccctatgttgccgaggctggtatcacactcttggtctcaagtgatcctctcacctcccagtgtgttggaattacaagcatgagccactgcgcctggcccctggctctctttttaatactgctgttctttcattgaaaacatagtacctgcatgtagaaaaaaatcagtcaggacagaatgaaaagcaagaatcattcccacctggacccccagtgcccatcctgagatacagctaccttttaagttccttgactcagaaatgtttcatgtgagccacagtcatgccaggtcgaccccttccctcccatccacactggcacttggctttcctggtgcttctctttacgttctttttttttagacagagtttttgctctattgcccaggctagagtgcaatgatgcaatctcagctcactgcaacctctgcctcctgggttcaagcgattctctttcctcaggttcctgagtagctgggattacaggtgcctgccaccatgcccggctaatttttgtatcgttagaagagacgacatttcaccatgttggccaggctggtctcaaactcttgacctcaggtgatccacccaccttggcctcccaaagtgctaggattacaggcatgagccactgcgcccggcctctttacgttcttatcagcatcctatggagtcaaacttcccttcctctttcatcagctccttggaaggaacgcagtggctggcctgaaccaggtgaataaccaagggctgaccccgctgcacctggcctgccagctggggaagcaggagatggtccgcgtgctgctgctgtgcaatgctcggtgcaacatcatgggccccaacggctaccccatccactcggccatgaagttctctcagaaggggtaagacctcctcccctccccatctgctggcctgctgggctccagctctcctgtcacctgtcccgtgcctgaggcaagcagtatccaccatagatcttagcatctccagcctcagagcagaggccccgggttcacaagcctcattaggccccgcctggcccaaagaaggtgctccatcattgtatcatgggtaggaatctcggttcacaagttcagctgtgcaaggaggagactttaaaatttttctggctgggcgcggtgtctcacgcctgtaatcccaacactttgggaggctgaggtgggcagatcacctgaggtcgggagttcgagaccagcctgaccaacatgaagaaaccccatctctactaaaaaatacaaaattagctgggcgtggtgacacatgcctgtaatcccagctacttggaaggctgaggcaggagaatcggttgaacccgggaggcggaggttgcagtgagccgagatcgcaccgttgcactccagcctgggcaataagagcgaaactgtctcaaaaaataaataaataaataaataaataaataaataaaaataaatttatttaatgtaccttaattcctaggagtgaatctccctctataaaactggagacaaccaatcttagccctctttggggtctcctctttccagctcccctccaggtggtgctccagttctggagtctgatgcaaccccaaggcccacctggcccctcctctaacccagcccagcctgatctgaacagccccccgatggcttcagtgctccttggtttcttgtgtgcccagctcaaagcctgggaaatgcttggtaaggtggccgagtgcccgtccacctagatgcctctttcctttctggctggtggcacgttgggaggcaggtacaggctcatgttttgggagcctgggaacccctggtgtcaggaaaattgtcttcaaaggggtaggggatgagataaaaagataaatgaatatctcaaatctcaaaatactatctaggccaggcgcggtggctcacacctgtaatcccagcagtttgggaggccaaggtgggtggatcacctgaagtcaggagttcgagaccagcctgaccaatatggtgaaaccctgtctctactaaaaatacaaaaattagccaggtgtggtggtgtgtgcctgtagtcccagctactcaggaggctgagacaggagaattgtttgaaactgggaggcagaggttgcagtgatttgagattgtgccacagcactccagccagggcgacagaacaagactccatctcaagaaaaaaaatactatctaacaggaacaacatctagaatgaatgaatgagccaatgagtccttcgatcctggcactgtgctaaagcaccagcctcaccgaaatgaataagccactccaggacaggagacaccccagccacccagaatctcatagcgcagtgccagacaagcagtgagaaggcatggacgggcagcactcaggcagggaggctggcacttgtgcctgtcctcaggttgttccttcctctgggagctgcatccaccttgctagccccatggggcattgctagcccttctaagggctggaccaagcctggacaaaccctcctttccttgaatctcccaagcacagccagaatgagctagagctttcagaaatacttgaccaaacagagaagataccaacacccccagccccgcagtcaggttccccatttgcaggttgtgacctgagtggacaccaggtgatgctcttctctacccagagggctggcacatggccccactcttgcttgtctccagccaccctgagctgtactgggcaggagctgtaattgaccagttttctctctcttcaaacaacctcagccctcaccggtccctctgtccccacacaggccatcctgggtgggtccagcgtcccatcacataagaggatctttgcacagaagacaaaggaagaggctcctaccttgagtggagcagggagatcccttatcgacttggcagccagcacagccctactccaagaatcccacggcctcagtgttactgacaagtggttccctcacagctcagactaggagctccctcgctgtttttctttttcttttcttttctttgttttgtttttgagacagagtttcactctgtcacccaggctggagtgcaatggcatgatcttggctcactgcaacctctgcctcccaggttcaactgattctcctgcctcagcctcccaaggagctgggattacaggtgtgcgccactatgcccagctaatttttgtatttttagtagagatggggtttcatcatgttgaccaggctagtcttgaactcctgacctcaggtgatctacttgcctcgccctcccaacatgctgggattacaggcgtgagccaccgcgcctggccacctctgctgtttttcaatgcagctgacctttcccacaaagctcggtttgtgcctgcggttctcagatggttaagcccctgctgaggaagggaaacagataatcccagacagtgagatggaggctgagactgaggatgcctgggggctgcactaggagctcagagacggcatcaggcagctggagttcagggaaggtttgggggcagcagagcccgagccaagccatggacactagccggagctggccactcgggtgaagacttggggggctccagagggcccagggaaagaagctgggcctgactccatgtgcctagtgctgagcaccaagcgctggcataagggctgtagggagctgggcagcataaatcctgggcctgtgctgggcacccctaataatagagaacagcagctgaacactaacgctgtcccagccaccggcttagccttcatgtgggctatttcactatagcccagagagctgatgtattttattccccctctaaagctgagggccaagtgtggtggctcatgcctctaatcccagcactttgggaggctgaggcaggaggatcgcttgagcctaggagtttgaggctacagtgagctatgatcatgccattgccctccagcctgggtgacaaagggaaatcctgtctcaaacaaacaaacaaaaaacagatgaggaaaccagggcttagagagattaagtaatttgctcaaagtcaggcagtcagtaagtgccagacctgggaattaaacccatgtgggctgtcctagtaattgcactaaaaaaaaaaaaaaaaaaaagctttattgagatatagttcctattccatacaatccacctattgaaagtatacaatgattctgatatattatgtttattttttccaactgtgatagattatatataacataaaatttgccattttaaccacttttgttttttgtttttgagacagagtttcgctctcgttgctcaggctggagtgcaatggtgtgatctcggcttaccgttacctccacctcccgggttcaagtgattctcctgcctcagcctcccgagtagtagctgggattacaggcatgcaccaccatgcccagttaattttgtattttttagtagagacagggtttctccatgttggtcaggctggtctcgaactcccgacctcaggtgatccacccaccttggcctcccaaagtgctgggattacaggcgtgagccaccacacccggcccattttaaccacttttaagtgtacaattcggtggttttaatcacatttacaatgttgtccaaccattacccctttctaaaacttttcttatcacctcaaacagaaactgtaaccattaataactcccgattctcccctccccacagcccccgataagtcccatatcctctctgtctctcagaacttgcctgttctagaacctcgtatcagtgaaatcatacagcgtttgtccttttgtgcctggcttatttcacttagcatgatgtcttcaaggctcatccatgttgcagcacgtatcagaatttcctttctttttaaggcagaatactattttgtttatccattcagtccttcactgatagacgcctgggttgtttccaccttttgtctgttgtgaagaatgctgctgtgtacatgggtctgcaaatgtccattcaagtccctgcattccgtcctttgatacttccgacctcaggtgatccgcctgcctcagcctcccaaagtgttgggattacaggcgtgagacaccgcgcccagccagaaaaattttaaagtcttctccttgcacagctgaacttgtgaaccgagattcctacccatgatacaatgatggagcactttctttgggccaggcggggcctaatgaggcttgtgaacccggggcctctgctctgaggctggagatgctaagatctctggtggacactgcttgcctcaggcaccgagtagaaagcaattgtgctctttcccactctgtcatactgcttcctatagcatgcaggtcactgtgtgactcactgacagtgtggtaaggaggtggagggtggctgtgtgccaggcacagaactgggctctgaaatgcctggtcttccttacaccccagccactcctctcagcactctctccatgttgctcagcttctggaggccaccagtgaggaagctggggcttgacttcaagcccatctgactctaaagccagtaccagggagggtgatcattgctggtggcagcatcaggaaggcttcctggaggagggggttagttgtgccttgaggggctcagtacagccttaaccatggtgagtgtgctggttgggtttgctgaactttgtttgcagtgatgctctctgtaagcagtagatgaagctccaagtcctggcttcatcccacgccacgcagaccctagcttctgctcaccaaccggggcccctctctcaccaggtgtgcggagatgatcatcagcatggacagcagccagatccacagcaaagacccccgttacggagccagccccctccactgggccaagaacgcagaggtgagtggatcctgaggtgggtgggtggggcagggggccgggccccgcaggtcctcagggccctcaggaagcaggttcccgagaggaccctgaggctagcacttgggggctgaccttgcagtgggtgtgcaggcagagaagtccatgaagagctgggatcctggcagggctctgctgctctctggctgggcggggggatccgccctgtgcctcagtttcctcatccatgaattctgctttggcgatgtgatgaagtcagcaaggcagtgtgtgacaaaactcggcacaaattgtaaagtgcttcccaaatagaaggtggcgtgatgatgattgtattattagtcaggattctctagagggccagaactaacaggagatatatatatagagagagaggggggtttatttttttattttattttttttgagacggagtctcgctctgtcgcccaggctggagtgcagtggcacaatcttggctcactgcaagctctgcctcccaggttcatgccattctcctgcctcagcctcctgagtagctgggactacaggcgcccgccaccacacccggctaatttttttgtatttttagtagagacgaggtttcaccgtgttagccaggatggtctcgatctcctgacctcgtgatctgcctgccttggcctcccaaagtgctgggattataggcgtgagccaccgtgcctggcctaaagggggatttattaaggagcattaactcacacgatcacaaggtcccacaataggccatcgcaagctgaggagcaaggaagccagtccaagtcccagagctgaaggacttggagtctgatgtttgagggcaggaagcatccagcacgggagaaagatgtaggctgggaggctaagccagtctagccttttcacatttttttctgcctgctttatattctggccgtgctggcagctgattagatggtgcccacccagattaagggtaggtctgccttcccctactgactcaaatgttaatctccgttagcagcaccctctcagacacacccagggtcaatactttacatccttcaatccaatcaagttgacactcattattaaccatcaagatgatgatgatgatgatggatgatgatggtggtggtggtggtgctgggcctagctgcacacacagggagcctggctgggcatctcctctgagttcttcccctaagctaagctctgtcctcctgggaggatggaggcctctggtctcatcaccaggaagcacagcttgacagagaatgggatgccccagagttcatggcctacttctcaatgtgatgggccaggagggagggcactgccagcctcagggtacctctgcattccaggagccggacaccgagtcaggcccttccgtgtaggtttggtcactcattgtcatcacatgctgtgaggtggggacttgcattcccatcttcacagaagccctgaagtgcacatggctacagtgacccatccaagcgcaggcagctgggatgagtgaagctgggctttgggctcaggtctgtgactccaaagccaggctcccctccctgttcccaaggctctgccagggatgtgcattgccaaggcccagtgagaggtgatacctttgcagggttccagggagggatgcagggagcggggtgcttcaggacaggccccagaggagcctttgcaaggagagtgggttctgttggcactaggaaaggaccagaagcctcttaaaacagtcagcacatctttggctttttgtccctagtcttgggatgctgatgggatgggaggcagtctaggcccccctagaactggggcctgcccctggaatcctcttgctagcgctttccaacatcccagtacctgtaggcctctcagagcagaagtggcagtgcccacgtgtcccggggtgcggcagctccccgagtgcctgtgctaactcagcctgaccgtctcccgcagatggcccgcatgctgctgaaacggggctgcaacgtgaacagcaccagctccgcggggaacacggccctgcacgtggcggtgatgcgcaaccgcttcgactgtgccatagtgctgctgacccacggggccaacgcggatgcccgcggagagcacggcaacaccccgctgcacctggccatgtcggtgagcccaggaccgcgtgtcctgccctgtggggccccggtgggaatgcaggagggctgtccggactggagccctcctccccactgtctccctcctatcgtcagctgctccaaatcatcttcccacccaaagctcagttcagaccctgactcctccctcaggaagccttccaagtccccctctcagcccaaaataacaccacctcctgtgtgctgtggtaccttttccacctgtgcccccatttggcacttgcatggcacgagagggaaaaatgacagctctggccatagactggccctgagcaagccatgtcacctgtcagcctcgatttcctcatctggaaaatggtggtgtcaatacttatctggaagagttgtggaaaagttatggtggacacttggtcaccctctacagaatgtctaagtgacacacgcagtacctggcccgagtgagcatcctgcttcccttcactggtccgcgtgttgctctcatcttccctgggaggctgtaagatcctggcaggcaaagcctgagtgtgcagcccagcagcctgtggcaggtgccaggcatattcgttggtttattatagaacacagttcctgccctcaaagcccttactgtctggttacacatctagagtatgaacatattaaacctagcagaggaggacgttactgtgttacagacatatgtgtgtgcatgtattcttttttttcgagatggagtctcgcactgtcgcccaggctggagtgcagtggcgcgatctcggctcaccacaacctccgcctcccaggttcaagcgattctcctgcctcagcctcccaagtagctgggactgcaggcacgtgccaccatgcccagctaatttttgtatttttagtagagacggggtttcaccacgttggccaggctggtctcgaactcctgtgttggccaggctggtctcaaactcctgacctcatgatccacccgccttggcaccccaaagtgctgggattacaggcgtgagccaccgcgccccaccgtgtgcacgttttctatagcaataccgtatgtacagaagtctgtttactgagtctcagtgacagaacatgagagacccccgggactctaaaagctgattcaggacacattcagagacatcctgttttataccaaaggtcaaaacttggaagagatgttgttgcccaaaaggctgaaactataaatagtttcatttttgaaactgtggacatttttagcactgggtgggcccttggaatgatctaactcagcagttctcaagttttttggcctatttgatccctttatactctgaaaaattattgaggatcacaaagattttttaatcatctggattttctttatctatatttaccattttagaaatttaaagtgtgaaaatttcaaaatattaattcatttaaaaataacaataataaatatatatgcctactatgtacccacaaaaattaaaattaaaaattttttaaaaaacttaaaaaataactggccagctgcagtggctcgtgtacaccagcactttgggaggccaagatggtcagatcacctgaggccaggagttcgagaccagcctggccaacatggcgaaagcccatctctactaaaaatgcaaaattagctgggtgtgagacctctgaaagggtatcacgtgttcacaggggtccccaggtcttactttaagaactgctgatagactttggtcatcttcatcccatcttcacagtttttggcatattcatcaaccacctttacaattatgtacttaatcacctcttcaaattggcttacttttatttatttattttgagacagagtttcgcttttgttgcccaggctggagtgcaatggcacgatcttggctcaccgcaacctctgcctcctgggttcaagcgattctcctgcctcagcttcccgagtagctgggattacgttcatgcgccaccacacctggctaattttgtatttttagtagagacggggtttctccatgttggtcaggctggtcttgaactcctgacctcaggtgttccacctgcctcagcctcccaaactgctgggattacaagcgtgagccaccgtgcccggcctggcttacttttaaactgacttaaatttattttgagagaaatgttgcatcactaccataaatggccatccatccatccagtgccaaccataaaaggtaaccaatgcagggcgcggtggctcacgcctgtaatcccagcattttgggaggccgaggtgggcgaatcacgaggtcaggagttcaagaccagcctggccaacatggtgaaaccctgtctctactaaaaatacaaaaaattagctgggcgtagtggtgggcacctgtaataccagctactctggaggctgaggcaggagaattgcttgaactcggtaggtagaggttgcagtgagctgagatcacgccactgcactccagcctgggtgacagagtgagactccgtctcaaaaaaaacaaaacaaaacagtaacaacaacaaaaaatcacagttaatgctgaaaacacacacatatctgtagccatagaagtcctaatagaatgtgaagaactgtttggaaaaccccattctagacccacagcttcattctctaggcagggaaatcgggtcccaagaagaggaaggtgacaaggccagagcccacagttccaggtggccagtgtgtcctctgaaaccatgccatgctctgcgcccctgcccggcctccaggtgtggaaatgtgtgacgttcttcgtggggacactcccccgaaggctgccattaggggcacgtgtgttcggttacccctcagggatgacaccctggactgggtgggcaagatggccttccctgccctcacccaccctctccttgctactcctgaaagccatcagcagctgacctactgtgtccccatggctcctgggtcggggtcacagatgcactgcatctttggaggcggagctggcagagcaggggcgagtcacttctagtttctgcctgggttcttacaccctcccctgtgggtgcttttaagcctgtttgtcaggtccccagccatcaaatggcagactttggactaccagattgacttgggtgggggtgaggagggttccagtgtctccccgtgctgaggagaggcccgctgggtgagttgacaggttggggctggcagccaggggcccctttgttcttcacttccccggcagttgcacgtcttatcctctctccatctccaacagaaagacaacgtggagatgatcaaggccctcatcgtgttcggagcagaagtggacaccccgaatgactttggggagactcctacattcctagcctccaaaatcggcagacgtatgtgctctgcactctggggctggagtggggtgagggttgggtggatacagggaccgaggaggagggaagtcccaggcatcaggtgccagcatcctgtgctgacccgccctgctcagagctgccaggagcacctcgtactcagagagggggcttccttacccaagcacaagggccctgagcagtagatgcaggcccaccacggggcttgctataccagcatcctctcccgtgcagcgccccccacctcagggagctaagattcccagcaggggtggggacaggagagccagcagcagccttctttccccaccgttggggaattcactgatggaaccactggctagaatgaccaagggtgcatgcactacactgcacgagctctgggcatgcctgtgtgggcagagtgcatggccatgtgctgcacgctcgcacagtgagccttagcttcagagctggacagagcagatcctcctcaccagaggcctggagcccgctctggagggtttcagcagctgtgggggtcactgtgggcaggtacctgatggcagcagtgtgtgtgtgccagtgcacacgtgtgtgtctgcatgcaccgcatctatgacctccttttcagcaatcccatccatcaaatggagtaggtgccccctggctggctcattagtccctttggaaccctgaactatcacttagcatttttgagaatcactgaatgtggccatgggattcctgctttcttggctggagtagaaggaaagaaggggttcccacaggcatcgggcagggtgacactgacctcctcctcccatatcctccttccctggccttaggaagctgcttgggatgtaccagcctgggggcagcactccctgtcagggtgggctgaggcctctggagcagcccacgtgcccagggcctgggagctgggacaggggacggagtgtggaaaggaggggcctctcctttgcatgttgacatcatttctgatcctgtgccatctccccttccccaaaccatgacaagttgtcaccaggaaggcgatcttgactctgctgagaaccgtgggggccgaatactgcttcccacccatccacggggtccccgcggagcagggctctgcagcgccacatcatcccttctccctggaaagagctcagcccccaccgatcagcctaaacaacctaggtaggcctcgcctcccgactccctcttctccagctggttcccaggcccctggatcacagcaggccccaccaaagcaacaggatccctaggacggaagtcactaaaggaagccggggaggatggggccggagttgtcagcctctaggcagccagcaacccacagatcccagaggcctagggtgtccctggctgatgtcccatgctccgttgcccctgagaggatgtgtcctgcacacagtctcaggcctgggcatttccagtggcacccatgaggtggctgctgttactgccctcctgtccccagggcgttcagggtgggcagtgaggagtgctgtcgggggactgggggcccgggccctctggcttcacctgtccctctggcttcacctctatcacactgtttgaatctcggttgggcctgagacctgtgtgcccccttcctggccccgtggtgactttcagacgttgaatgtggccaggcagccagcatctgccccggtgcattccttggtgcccagggagacatccccagactagacaggacccttctctggactttctgtgggctggcccactcagggacctccattgtttgggagcggggtcccctgaacagagggcagccaggagccagtccttggtgagccagacttcactgtggaggcggcagcaccttcagccagggtagcccgaccaagcctggaactctggagaggcaccgtgactgtggcttctagtcctggctccacctctctctcccctcccaggaactccccctccacctcccatctttatctctcaattttgcaggcagtcacccaagccaggccggatggtgggcctggggtgcggcgtcagatgggtaacgccctgggcctggagaggccaccgagcctagccatgcggcattagctctagctctcactccctaatccgtccttcttagctgcgcacacaccacacgccccctcccctgcaccctgtccccggcctctctcagccactcttctgcttcccttgttcactgtggagccgtgtgccctggggagggggagacaccgcttcgcagccctcggttctgctttgctgcttctagactctgcacagtggtggggggctgtcagagttggggtcacgcgggctgctgcaccaggcacctggggactgggctgcttgtcaggaggggcagctagtcagttgggtggacgtcaggcaggccttggacacaaaggaagacatggacagagtggatggtgggcctgatcccggaggccactgggatttccagacctgggatcaggacgagggatgtctcctttcatccatggacttaaaccccgaggaacgtcctgactcagccttttgactaaatgaccttgggtgaattatggaccctcttagagcctcacctgtcaatagggaataagaattcttaggccccaggtggttattgcagcatcggctccgatgcaagaagaagcactttgtctgaagaggacacgcaagggtattcatgccttggggtttcaagaggaagagattgaggggaacctgggagctggctgggcagggtggggagcccttcccagagcagtgggcccccctttccactccagcccatttctctcctgtggcctgtggctcagctttctcctgggacagagtccttcctgtggggaagggacagatgacagggggagtggggggatgagggcgtggccgtgggcgaggcacagcccaggtttgatctagggacctctggggtagcagggcttggggacccacctgaccacagcatgccctgctctgtgcctcacagaactacaggatctcatgcacatctcacgggcccggaagccagcgttcatcctgggctccatgagggacgagaagcggacgtaagtggatcgagatcgggggcagagcggggaacgtgtgcgctttcctgcccctcacccaccccctgttgtgggctcagggctttactctctgcaccctcacagccggcgaagtggctctgctcctagtcttatagttctcagcagagacagaacatggagagcctgtgtcgctcgttcattaatgctgggcggtgcaggctctggagaccagcccagggtgccaggcttcttggacttggtggggctggcgcagtgttctggcctccctccctgatctccttatggctagaagagggggagatgcctgggtcccccctggggagatctcagcagctgcttcccactgctcctactggcttccttaaccacctcccactgcagaatagtggcgtgggctgccttccccagcacctgctgtatacctagtcccattgtaagaggcgggcctgggtgacaggatgcaaagagaagacgcccaggccttgcccttcaggcataatcccgggtgcttgaactcagtgccagctggcacggcaaggtaccaggacaaatgcgtttccagccactgtgctgtcgccacctcccttgattgctgcagttgattcatttattctttattagtctctcatgttcctaatagccttcccagggaggaatttgtaaccttgttttacagatgcagaacctgagcccctgagaggtgaagtgacttgctcaaggtcacacggagtgagtgtcagggtggcaactcacagccgggtcttccgaacccacgtcctttgtgctaccgcaggctctctctgggttctctgtggactctatacctagtgccagccctctgcagggaaagctctcttctcagaatcagaggcagctccactcccagggccaggcagtgatcgtgcagctctgtgggtcctctcacttcgcactcacttccatgctaccctgttgtgtgccctggaggttcccctgccccatcagcattccctcccctgtgccccctgcatgctcttgcacgcgggcacacgcacacacacacgcacacatgcacgcacacacacccacatgcacatgcctgcgggttgcccacatgcatgtgttgcccacatgcaaacacatggacacgcacacacatgcacacatgcaaacacacgtgcatgcacacacatacacatgcgcacacatacacatgcatgcatgcacatggacacccacacacatgcacacacatgtacacacatgcatgtacatacacacacctgtgcaggggctgaggtgaggcagctgcacctgaaggggggacccacatttcccaagggaggaaaagcagattccccagattctggagcctcagaaccctgcctggagcggggctgaggcaagagtcaggagacccctcggtagctccccacttgggccttccaagctacagagccctgcgccctctgggttgatctctgtcgccagccccgcatcttcgggagtttgctttggcctccagcaacagtgtagtctctcccctgccacctctaggcttgctgtggggctgggtacctggtccaggaaaagacccctagaggtgggacccgggcctcctccatttatcagccctcttgggcacctcctgcatccccttgacacacagcgctgcccagagcagaggcggcttctgccctggtggagcttccaggtcagcgcaggagagagtaaaagaaagattgcgaatggaatggaagcagcctccaccaggaagcaggtggagcagcaggcgggctgtgagggagggtctcgatggcatcagggcaggcttctctcagcttcatcaagctgagatgggaagatgagaagatcagaggaaggttccagactgaaccaaccacaaaggcattcccccagggcatggccaatgaggacaggcaggatgtggggagacgtgtcagggcgcgctggagagcatgtgactcaggaggcggcagacctgggtccaggtccagtccgcatccatatgacttggttcccgtcacctaacctctgagctacactccctccgtcactcaaaaatatgcacagagagtaggcgcagtggctcctgcctgtagtcccagctactcgggaggatcacttgagctcagaaggttgaggctgccgtgaactgtgattgcaccaccacacaccagcctgggtgacagagtgagaccctgtctctataaataaataaataaataaataaggctgggcacggtggctcgtgcctgtaatcccagcactttgggaggccgagacaggcggatcacatgaggtcgggagttcaagaccagcctggccaacatggagaaaccccgtctctattaaaaatacaaaattagctgggtgtggtggcgggcacctgtgatcccagctactcgggaggttgaggcaggagaatcgtttgaacccgggaggcagaggttgcggtgagccgagatcgcgttattgcactccagcctgggcaacaagagtgaaactccgtctctaaataaataagcacagggatgtcagggagggtctgcctcagaggcgtttgggacaatgacatgagctaatgctggtagcacccctcccatagcccctggcatgaacctctcccttcctccctgccccctcctcccctgcttcttccaccttgtgtggaggccctgatactctgtcactgcccattcctggcctggctgtagggtccccgcccctccttccccagccttatttaattccaacagactttatcaggcacctgctttggatcaggcctgatactgaccaaaatcaggtgtcccaagttggggagactggccgagatcctgctgggatggcgcctggtcagtgatgctatcccccgaccttcctttccctttctctgttgcactctccagcccctgaaatactagacatttgttcctttactgccctcacccccaccctcgctgtcctgcataggacagaagttcctcgggtccgtctgggtctgtctgccaggacacagctgcaggggacaagggctatgagggtggatgtaaagtactgggctgtggcaggaccctcctctctcccactgctgttcccactgcagccacgaccacctgctgtgcctggatggaggaggagtgaaaggcctcatcatcatccagctcctcatcgccatcgagaaggcctcgggtgtggccaccaaggacctgtttgactgggtggcgggcaccagcactggaggcatcctggccctggccattctgcacagtgagggcggcccctggggatggggccaggcggggctgagacctgtgtcctcaaggggccgagtttgtcttcagggctttgcaaaaagagagtggaggagtagaggagggctataagcactttgaggaggcaggggcggggctgcaggtgctgaggtcccaggctggaaggagaagggctgggcccatgggcttgggtttggggatcccccgccctctggccacagagggtagagctggctgtgtgaaattttggcataggaagcgtttcctatcgactgccttaacccctcctcccctcacccctgcaaagcaggcaccaggggccacacagcctgctgcacataaggaatcccattcccagggtgcacgcagcaggcagtctcaggaatgaggagccactgagcctcaggatgccagagccctcgcctgcacacttcattttactgggaaattttactgggaaattaagttcccaggtggggagggatgacgtgaagtcacatagctcatccatggggtcgctgggctggagcacagtcccctagactcccagcctggcacctcctaggccacagggcactgtgtagtctcctttcactgccgctttgcgaaggcgcctggcttgctggacagatagccgggtggtcagtgttgtgacggctcctctgtggagctgtctgagcttctaggtgctgacaggtggggaggggcactgccagatcagggtcctcagctccccccaaccccctggacattgtcctgggactcaacatgtctgactggtgcccctgcccctgtgctggtcagattccattttctccagagcgcccccacatctggatcctggtcatgcaaagtcttggaggtgcccggggaggactccccaccctagggtgggtatcagggcctgtgggccaggcctgtgttggatgctggggatgcagagctgagccaggcataccccagcctcaggagcagggggctcagccagtccaggaggtgctggggacagagtcccatgggcggaggaggagagtcatctgtcaagttgccgggacgttagtgtccacggcggtttattgactggtatttcatttccttttgatgattctcaccatagccctgcggggtgagcagatggggaaactgagaaccagagaggatcagccagtgaattgggcagtcaggactgggtctccagcagtgtgcccagctctctaccccagcctcagggtcccagcatcccctctctggtcttccacagggtccaagggcgggcacgaggtctgagcaggcagactgggcagagtcctagcttcttctccaaaagggccacgtccttcttcagggaccatttcttccccatccggggtcttgagactcccaggggccatggaggggatttgagaggtctcctggctgatcctccggtgtgggcagatggcctcctttcagctaccctctgcttgtacatccctggccctggggaactcactgcctcacgggggaagtggggcagcttctccttcctggaggtgcagccggccccttggccctgtctgttctgaaggctcaaaggacagggctattccttgttttctgtgacaaacaacgtgggtctagcttttataagcttttactcttgaggggctcttctttaaggaaaataatacaaaatcatgaatacaagatgaagtgcagagccgtggggcttcagtggtttttgagtctctccgttgcccaggctggagtgcagtggtgcatcttggctcactgcaacctccgctcccgggttcaagcgattctcctgcctctcagcctcccgagtagctgggactacaggcgcccgccaccacacctggcgaatttttgtatttttaatagacggggtttcaccatgttgggcaggctggtctcaaactcctgacctcaagtgatccacctgcctcagcctcccaaagtgctgggattacaggcgcgagccaccatgtccagccggaaggaggtttctctctgtctgtctgggaggttgcaaaggaagggcccagaatttgggtttgcttaggcctcggtaaacccgcttcctcctgccacctcctgcgttcaggcgctctgcaggctgttctacgggagccctgcgtgtggccgctgcatctccccgcctctgacccctttgttcctaggtaagtccatggcctacatgcgcggcatgtactttcgcatgaaggatgaggtgttccggggctccaggccctacgagtcggggcccctggaggagttcctgaagcgggagtttggggagcacaccaagatgacggacgtcaggaaacccaagtaagccctggcgcactggggccgtggccgcagctgtgcccactgtggctgttccctggggacagagggctccctgtcctgctgagggagggggaagagcgccccacgcttgaggggagcagagggaacccccttcccagggaggcagagggctggggtgtggctctcacttgggcatgcagacacctgctgagcgcaggaggggcgtggcctggtgggcctggctctgccctgcctggctctgccctgcccggctctgccctgccggctctgccctgcctggctctgccctgcccggccaggggtctggggcttgcctggagagagcctgggccacccttctctgagaccacctgggcagaggctgggtttttgctgcccaggcaaaaggaacccactggcctttcaaatgacacggctaaacattttctcacatttcagacagcactcgctcccaggatcggactactaggttataatcagagggcttcagtcttacctttaatttaaggcctacaagacttgaactaatttaagtcagactgaaggagaaagtcacatttccaggaaacatttgtttgggaagcccaaatcctaggactaagcaatgcatcccgttcggggctggatgaatggtgtgttccaagaggagtgttttgagcatttctgagtgattttttcatattttgaaagtgagtgtcccccagtcttaggggcccggcatcccctctgcggtcttccctagggtccaaggccagggaccttcaatcttttttcccactctgtggcttgtctttctgctctgtggtgtttctaggtttttgttttttgttttttgttttggttttggttttggtggcccatgttcttaatgaggtagataatatttataaatatttttcttcttgtagtttgtgattttttcctttctttctttcttttttttgaaacagggtcttgctgtggggcccatgctggagtatattgctgtgaacacggcttactgcagcctcgacctcctgggttcaagcagtcctcccatctcagccgcctgagtgcctgggactactagcatgtgccaacacatgtattttttgtagagatggggtttcaccatgttgtccaggctagtcttgaactcctgagctgaggcgatcctcccgccttggtttcccattacaggcatcagccaccatgcccagcctagtttgtgctttttatttctcgttcataaacccctttgctgcccccaagcagcacacgattctcctgtgtcgagctggaaagctctctagatctgccttttacattgaggtcttttatcaacctggaattgatttttgtatgagggtgaaatccaagatccaatttaatgttttccacgtgattggccaatttttcccagccccatctgtgaagtctgtccttccctccgcttcctcagcagtgggtcaagcatccctctgctcttggatctgctccaggctgtgttttgttccactggttggaaagctgtctctgtgcccggaccacagagcataaaaaactaccgctgtgtggtgagtcctggtgtctgggtggcagatcctccaccttggccttcttcaaaaacatcatggctattcttgggggcagtagagagaagtggatacaagcatagaccctgaagtttctacctcttctcaaaaataggaatatgccaggcatggtggctcaagcctgtaatcccagctctttgggaggctgaggcaggaggatcacttgaggccaggaggtcgagaccagcctgggcaacatagtgagaccctcatctctacaaaaaatttaaaactaacaattagctgggcatggtggcactatggctgtagtcccagctaattgagaggctgaggtgggaggatcacttgagccccggaggctgaggctacagtgggctgtgatcccatcactgcactccagcctgggcaatagagtgagaccctgtcttaagacaaaaaaaaaaaaacaaaaacaaacaaactcacaaactataaaaagaaaaaatatttataaattctactccattaagaacatgggtccatccaaataaataaataaaacaaaaacaccataaagggagtaaaaagacaagccacagagtgggagaaaagatttcgaatccatacatccatcaaaggactcattttcaaaatatgaaaagatcattcagaaatgctcaaaatagtaaccaccattttactttctcttcctatgagtttaactgctccaggtactgttaagtaaaatttttaggggataattgatttggaccaggattctgtaccaggcccaacagaagaaacgaatatggagtcattcatgccaagtgaacctagttagcttaggcgtatacccatgtaacaaatagctgagttctggttagctacaacagctaagctttaatcaatcatagatggccacctgattcaaacaaggcaaaccaattaagctccacacctcactttggttttcagcccatcaacactgcctgaccacgttgcaggccagagttctttgaacctattctggttttgtggcctgcctgactctcagttcatcaataaaagccaattaacatctttaaatttgttgcaattttatctttgaccgtaccttatgtaagtggaatcatacagtatttgtctttttgtgactggcttatttctttctttttttttttttttgagatggagtcttgctctatcacccaggctggagtgcagtggcgcgatctcggctcactgcaatttctgcttcccaggttcaagtgattctcctgcctcagcctccggagtagctgggattataggcgtgcaccaccatgcccggctaattttttgtattttagtagagacagggtttcaccatgttggccaggccagtctcaaactcctaacctcgtgatccacccacctcggcctcccaaagtgctgggattacaggggtgagccaccgtgcccggccatgactggcttatttcacttggcatccatgttgtagcgtgtgtcagaatttccttcctttttaaggctgaaaaactccattgtctgttggatacacgttttgcttctccattcatccattgatggatattttagttgtaaattgactgctgtcaatgtcggatgtgcaaatacctgtttgaggcctactctctcttactggtgccttctctagagagaattctgatgggttcagtttgatcatattttgtttaagatttttggccaggcgcagtggctcacgcttgtaatcccagcactttgggaggccgaggtgggcggatcatgaggtcaggagatcaagaccacagtgaaaccccatctctactaaaaatacaaaaaattagccgggcgtggtggcgggcgcctgtagtcccagctactcagagaggctgaggcaggagaatggcgtgaacccgggaggcagatcttgcagtgagccgagattgcgccactgtactacagcctgggcaacagagtgagactccgtctcaaaaaaaagatttttgtgtccacgctcgtgggcgaacttgacccgttttttcctattttgggttttgaggaaatatttcctctttttatttttcttggaagagttagtataatagtttattttgaatttatggtagaacttgatagtaaattcttctaggcctggagtttgcttggtgggaggatttttgatgatggaattaatttctatagtggttgtgagactgaccactcggggtttctaaatacctttttgagttagttttggttaagtgaggtttttctaggaatgtgtccatttcatctaaatctttaagcttattggcttagagttgttcaaaatattctgtttttttttttttttttttttttttgagacggagtttcactcttatcgcccaggctggagtgcaatgacgtgatctcggctcactgcaacctctgcctcctgggttcaagcaattctcttgcttcagcctcccaagtagctgggattacaggcatgcgcaaccacacctaatttttgtattattagtagagacggggtttccccatgttggccaggctggtctcgaactcctgacctcaggtgatccacctgcctcggcctcccaaagtgctgggattacagacatgagccaccatgcccagccgattctcctttttctaacgtctgcagtgtgtgttggtgcggcccccttttctttcctgattttgataacagataacagccatgttttatcagtcttgcaacaggtttttccattggattagcctttcaaaaaaaccaacttttgctgaattgtgcccccaaggttggaccaatctgacactcctccagcactgccggagagagcctgttttgcggggatggtgcggggagaagcccacctatcccgaacagaggttggagtgggcactctgctacccaaggccctggggtgtgaattgtggggaaagggaaaggtggatgggcgggtggctcagccgtcctcctgcctcatttctctccagggtgatgctgacagggacactgtctgaccggcagccggctgaactccacctcttccggaactacgatgctccagaaactgtccgggagcctcgtttcaaccagaacgttaacctcaggcctccagctcagccctcaggtttaaaccatgtttgatgcatccatgggaagcgactggcccgagaggctgtggggtggtgggtgggagtcgtgcacttgccatcaggcaccctcaccgtgccaccagcccacccgctgcactggtctttattggctgaggacagggattgcgggggagctgtcaggcccctggcaggttagaaaagtccctggaaagtcctcagctgtacctgccttccaccaggacgaactagccagagagtgtggcttcgtgggtcctgcttctgaagagttcccagcctcccctcttcccgcacccccagcccccaacacgcacaccctgagatctggagtgcatgggttttatgccagtcccttgtgccactgggccgccctccttccccgcccctagaccagctggtgtggcgggcggcccgaagcagcggggcagctcctacttacttccgacccaatgggcgcttcctggacggtgggctgctggccaacaaccccacgctggatgccatgaccgagatccatgagtacaatcaggacctgatccgcaaggtgagtgccgtaggccagagggcctggacccactgctccctggagccaatcctgtgtcagcaaaccatgctagggaccgacccccaggacagcaggtggcttttacacacgcactcattcatatgtgcacacagggcaaattgatctcactggaacctgttccatgggtgggatctgcctgaagcactgtgctaagggggatctgaggaccactgtgctctaagtgtgcatgagtggggagggcggcatgcataccatgaacgtgccactcgagccagcctggggacaggacacatgcttgcccttgagctcacctctgtggatagacagtcccacaggaatgcctgtccccacgggttgccggtgctgtggtggaggaccgtgaggcctctgctaaaaggcctgggggctcggaaagggctccatggaacaggggacccatcctgaggcccttggggacagagcagtgcagaatcagtgatctggaggaagagcagcagccctctctctgcagaggtacagcagaggctggcaggacccagcatgctaggggaggccctgtggcgtggcgggcggtgggtgaccggggtgggcgagcgcggtggctgagctcagaccctggagccagggcgcctctgggggtccccgttctgcctgcactcactgcagctacctaatggggccatcatagcgcctgcctggggaggctgcgaggccttggcatgctgttgtctgtgaaatgttcacagcactgccgggagcctgagctgcatccttgctgctgtggtttcccgaagccccagggcgtcctgggcagcgcagcagaggctctgggcagacagagaagcgccctctaggggccagatcgggcagggcgggcttcctgcaggcggcagagaccgtcagactgtcagacactagccagtctaactctcctattgcgtgcggatggggagcctgggacccagagtgggaggcatcacccaagatcatccagcaaatcggcagcagagcttgttcggaagcaaataagagaggcagcggccgggcgcagcggctcacgcctgtaatcccagcactttgggaggccgaggcaagtggatcatgaggtcaggagatcgagaccatcctggctaacacggtgaaaccctgtctctactaaaaatacaaaaaaattagccaggcgggcatagtggcaggagcctgtagtcccagctactcgggatgctgaggcaggagaatggtgtgaacccaggaggcggagcttgcagtgagccgagatcgcgccactgcactccagactgggagacagagcgagactccgtctcaaaaaaaaaaaaaaaaaggcagcacccagggctcaggttcaagccttagcccctacttccctaccacgtggcccctgcagctgcttcccggcctgagcttcgctgagagccctcatttgcaaactgggtgatcagtgccctctccacagactggctggagattaaatgaagtaatgatgcaaatacctggcaaatcaccaacaccaaggaacaccgtctgcctttcctcccctggccacgacttgacttgggccagcatcagatggggtgggcgggatccttcttgcagctggtgtatgtgtggtcctgttggtacacagatgctgtcctgagcagatggcatgtgatgcccgcaccagccgttctggggtcacgtgcaagaggctggctggaaatcatgccaggcatgctcttgccaccagagacctcttgccctgttctcatgtgccccagagcccagtcttgggcctccccttgacgctccccttcgtgccccctacctgtggaaggtctcttctgactgcccctgtcctgttcccaacagggtcaggccaacaaggtgaagaaactctccatcgttgtctccctggggacagggaggtccccacaagtgcctgtgacctgtgtggatgtcttccgtcccagcaacccctgggagctggccaagactgtttttggggccaaggaactgggcaagatggtggtggactgtgtgagtgtgggcccctcccccaggccacttccctcagggtctgtagcccaggtcgatggcttcccctcatcctgtggggcctttggtgttggaggagacagcagggctctgtccatcgcctttagccagctggagggagagagagtccacagttcagagtctcagtgcggggcagggaccctcagtgaccaccagcaggggggttttcaaacgctttttagctgcggatccctttctgcaaacatagcgcagtgtagaagcccagaatggacaaaggctccagagcgggctgggcgctcaccctgtaatcccagcactttgggaggccaaggcaggcggaccacttgagcacagcagtttgagaccagcctgagcaatataatgagactttgtctctaccaaaaaattaaaaactagctggacatggtggtgtgtgcctgtggtcccagctactcaggaggctgaggtgggaggattgcttaagcccaagaggcagaggctgcagtgagctgtgatcatgccactgcactccagcctgagcaacagaaggagaccttgtctcaaaaagaaagaaagaaagagagagagagagagagaggagggagggagggaaacttcagggagaggggacatggaggcctgtcgactcagccgctaccctttcccccactcatcatccctgaaagggcactgctgagacctctgcccctctgattgcacagctgggacagtccctgcagtcccaggaaggggttttgcccgagccgctctgctgctgtgtggctcagcctgactcgaaagagcctggggctccccaggctggggctccgagagtgcagggcagggccgggcggggtgcgggccgggcggggtgtgggcccggcactcaccaaggctgcttctcaccagtgcacggatccagacgggcgggctgtggaccgggcacgggcctggtgcgagatggtcggcatccagtacttcaggtgagggctcagccgccccagcccttggccccgtgccctggcgtggtcggactcaccgaccttcccctcccagccctagtgtggactttcccttccccaagggtctgctctgttccccaagcccaccctggtcctagctggcgtcccctgcccagcctgagcatcctagggtgaccccctcctccctggcccgaacagattgaacccccagctggggacggacatcatgctggatgaggtcagtgacacagtgctggtcaacgccctctgggagaccgaggtctacatctatgagcaccgcgaggagttccagaagctcatccagctgctgctctcaccctgagggtccccagcctctcaccggccccagctgacctcgtccattcagcccctgccaggccaagcccagccactgccctcccgggcagatctgggcccaggcacctctgagtccatagaccaggcctgggagaatgccaagctgcctgcccgaggctggtcctgaaggcctgtctcccactaaccccgccttccagcactttctgtcattccaggctgggaaagtctagagccccctttggcccctttccctgactgtcaaggacaactgactcccccatcagctcaaacattaagggtacccgggcacaaccgtacccctgcccccagccccagcc

SEQ ID NO: 15727 - DNA, 69970 bp, Homo sapiens
gtgctgagtaagccgaggtgagtgacctcgcgggtgggcggggcctgggggtccgttccccaacttcctcggcgctccggactcccaagtctccgccggaccctcctttggatattcctcgtgtctccgattctgaggcatgtcctccattaacccttatgtgactccctgagtgcccccaccttccatcttttcatccccctgcgtccccaattcccatcccgagaccgcccgtgtctcatctcgaacttgtggaccccagggaccccagcttcgaccctgagtttctcccctgaaccccagtctcctccgtgtgtctccctcagtatccctaacttcccgagtcaatccatctcttctctttccccgaccctcagtgcctctttaggccccattggccgtcctaattttccttcctgtgctcctctaagtgctcacttgattccccacttcacgtccgtctccacctttcgtggtgcctctactcatttctcactccctgcttctcctgcctttcctccctgctttttttccttgcctttcctctctcgcgtgcctccagacctgcccccgacatgctccctccttcccctcagcctggccaccccagagtctcccacccctaatcctgtgtccacctcctgctcccacagatgacttggaagctggtgacagggagcatgtgaccagggtgatcatgggactgggtcggggcaagcctgtgggtgtgggacagggagggcacagggcaaggggacctgtggccgtatttttaatgggctacccacatgaccccaacgaatacctccccctagcttctgggtctttccctcacctgcctcttacccgcccaacaggatgtcaggcaggttcggtttggcaacgttgaggctgcacccttgggctgaatgcattgtttttgaatgcattgtttttgttagagtttctgcctggagtttggaacctgttttctgtccaagtctcagtttcctcatctgtgacaggggaactgtacctcctgccctcgtaagtctgccatgaggttcaaaatttgaatgagaaaatgtagaaggtaaagctttataaccagtatggccctgtacaaatacatgattttactgttgggtcataggcagaattgaaaggagtggaaagggaaagggctagaatgagaagacaaggagagaaggatgagcaggaggtcccttgtctttcagtgtatcatttggcagtgtttgttcatcacctcttgtgagtcaggctcttctgtatatgttctcttcaccattcattcagtcatcgtttatctaacaaatatttacggactgtctgatgttctaggctacccttggtgtggccaatgatattctcacttcacatgagaaaaagagggcgcatgagttgcttgaggtcacaccgatgaggttgaagctggaatctgacaccagagcctgtgtgattgtcctgatgtgtaaggtttgctactgtttaggacacttcttgttccttccgtggattactttcttgttacatgagagactccccaaaagggagtttccctcttactcagcagaatgacatcactaagagatacagaaaggagaaatttaaatactctgtgtgtgtgtgtgtgtgtgtgtgtgtgtgtgtgtgtgtgtgtctgcagacatctattgggtgtgtgtgctgggggaagtaggtaggcaaggagtaaggggccgtagtgaagagtgtgttacaaacttcactttgtagagggtggctccctgggagaatatgttctgtgtctttcacagtggattttgatagggtcatgtcttaaatgcctcttctcgttttcggatggtgatctcatccagtcttatttctttaagtgccgtctctattctgtcagcccacaaatttatatccccagtccagtccagacctttccctggaatgacatactcaaatctagttgcttactcagcacctcaaacttaggcttttcaaacttgaagtatttatttattgatttatttattttttgagacagagtctcactctgtcacccaggctggaatgcaatggcacgatctcggctcactgcaacctccacctcctgattctcctgcctcagcctcccaagtagctgggattacaagcatgcgccatcatgcccaactaatttttgtatttttgtagaggcggggtttcaccgtgttggccaggctggtctcgaactcctgatctcaagtgatccacctgccttggcctcccaaagtggtgggattacaggtgtgagccaccgcgccaggcctcaaacttaagagtttagaattgagctcctgttagttctgccctccatccctgaccccactcttcaccaaaacatgtccctcccactctctttctcatcttaggacataggagtattgttcattcagttgctcaggtcaaagctgtgagattatctatgatgcctctctgtttcttaccccacacccagccagagtgatcttgttaaaatgttgtttctttgcagtggcctctcctctcatggcacatgcctggccccctgttgcctctctgatgtcactggcttccttgcttttcctggaactcgctaaacatgttccagccccatggcctttgcacacgctctctttgcctagctattcatatgactttcatctctctccatcaggtatttatttaagatcaatttcttggtgaagacttctctcctcacccaatctaaaatttcactctccacctcagcacttcctatccccattctctggtttttctcctcagtagttaattgtcatctaaaacctttgtaaatatttacctgtttatcttctttattattagtagctctgtctaaaatataagttccaggatgtcagggattttgtggggttttttttggttggttggttgttttggttttgagacagggtctcactctgttgcccaggctggagcgcagtggtgcgatctcagctcactgcagcctccgcctcctgggtttgagtgattctcccacctcagtctcccaggaagctggaattacaggtgcacgccaccacacccagctaatttttgtattttttggtagagatggggtttcactatgttggccaggccggtcttgaactcttgacctcaagtgatccacccgcctcggcctcccaaagttctgggattactggtgtgagccaccgcgcccggccttgttttgttttaagacagggtctcactgtcgctcaggctggattgcagtggcacaatcacagctcactgcagcctcgacctgctagacttaagcaatccccccacctcagccaccttagtagctgggacttacaggcatgagagataccatgcctgggtaattgttaagtttttgtagaggtgaggtctcactatattacccaggctggtctcaaagtcctgagcttaagtgatcctccttccttggcctcctaaagtgctgggattacaggagtgaactgccgtgcctgaccagtctgttttgtttacgattgtatcctcagcggttagaacaatgcctgccacaatccatctcagtaaatatttgtggagtgagtcataacatgggccacactgtaccgtgccaccagcccaaagatctcttaaagtcacccctgtctcatgtgcttgggagctccagtgacagtttcggggcagtttgcttccagctgtggtccagccaagcggagtgaatgaaagagatgctttttccttttgtgaaaggacgttttgctctggctcacgtgagcagcagtgcattttgagacgagggccttggcttttggaatctaagagcctgttgagcaagcctcgctcagccaccttctttcagctttctcctgaaggcagtttgaggattaagagcctgatgctctggattccacctaattgggttcagatcctggcaaactgtgtaacctgtgccccagtttcctgtgtaatgtggagagacctggaccttttcttacaggtgtttggagggttaaatgtggcaattcggccgggcgcagtggctcatgcctgtaaccccagcactttgggaggtggaggtgggcggatcaccggaggtcaggagttcaagaccagcctggttaacatggtgaaaccccgtttctactaaaaatacaaaaaattagccgagtgtggtggtgcgcgcctgtaatcccagctagtctggagactgaggcaggagaatcgcttgaacccgggaggcagaggttgcagtgagccaagatcacgccattgcactccagcttgggcaacaagagtgaaactctgtctcaaaaaaaaaaaaaaaaaaaaagtggcaatttacccgaaactgtggtgaagcgtctggcgccctgtgggtgctgggcagcagtgggtgctgatggggtgtgaggggatgggatcaagccctttcccactaacttaggaaagaggttggaatgagctggggtcagagggaacatttgcggggacattttgccgggaggctgccttggaggttcagaggctcagatgacccctgtgttcattcagtgttttctcacccacagattgagcacctgctgtgtggccagccctttgcctagtgctgttcaagagtcagaggacataggcaggcaatcccccaccacaacctgccaccccatttcctctcttggggccttgatttctccacatgccaaacagggagaatgattgcaccttccttgtttctttttttttttttttgagacagtctcactttgtcatccaagctttagtgcagtggcatgatctcggctcactgcagcctctgcctctcgggttcaaagattctcctgcttcagcctcccaagtagctgtgattataggcacccaccatcacgccaggctaattttttttgtagttttagtagagatggggtttttttctcacacgttggccaggctggtcttgaacttctgacctcaggtgatctgcccatctcaccctcccaaagtgctgggattacaggtgtgagccaccgcgcccggctgcgccttccctgtttctttgtgagcttggaggtggatcacaagtgtgaaaccctttgccaaccgtgaggcatggtggccttgtgagaggacggaggccggtgtgtggtggcatgctcccgtgctgtgtggcacagacggagctacaggaaggaagttggggcagcttggcactctgagtggaccctgagtttccagcctgctctgtcttgactgggtgggaggagggtgctcaggagggtgtcactgctgccaggttctgctgccaggaccatccaacagttgttccaatcatgggacatcctgtcgtcagcagctggggctcgtgaggcctgatttccacctcgggcagttctgtgtgtgctcctggaatcccccacgtggccaagcctgtgaggtctgcttcctggcctgctgcctgtgggttcctgtcacgcacctctcgggcagctgtccggctcctctgctctcggcttagtcaagaaggaagcagaaggcttggagtctttcctgcttggactaggagtgagctcagcctaagtgccctgactatatataaagctgaactttccagaccgaagcctggggatggatcagtccgatcacttagggccgctcctgaaggagtgcaggtgctagatacaggttctcccggtggaggagcgaaccccttgtgggccgttagctactggtgggatttgagcatggtatttccctatccgttgtggagaggagcatggcagctcagagtgggtgggaacagtgtgtggtccctgttatcaccttcaagggaataaagtgtgtctgggggcttcagaggtgctggccccatgggcttataggtggttcattcattcattctcattcattcattcaccaaacttattaaacacccactgtgagtcaggaacatcatgccaggtgcttagggaaacaaatcaaagcgggttgggtgagcagcccaagccaacagatgcacccccattctcacatggtgtgtgttcctgtgggctgggccctgggtggtgtggggtgctggggagaagaggaaggcacaccaggctgcagggcggaggtgcgggtatgaattttcagaggagatggcacctgagctgtatcttcatggataagaagagatttgttcatttgtcctttgtggagcacacattcaggttaagaaagtggggaggatgggctacgctgatggagcgtatgtgtggtatccccaagtgcactgagacacgagtttgacgtgttctgggaagatcgatggtgcggcgtggctggagtagaggtgagggatgagttggaggggtgagttgggccagctctcatggatgctggagtctgggctttccctgggaggtcatggggcgccactggccagggtcagcagggagacctgcagctggatttgcatcgtacagtgggcatggaggggtgtcaggctgggttgggaaccgtgcaggctggaagggcactctggtgctctgagcattcagagggggcagctgggccttgaaggatgagcaggggctccagcaggaactggagagcgcattccagggaggacgcaagtgcaggcccctttcactacagaaaagcagttttcacacagaccttccaaaggggaggagaggggactgcctgggcctggcagctgcggcaggtagcagcaatcagagggcagggaccgctcctcccgtgcctgagacctgcccagggtccttcagggaattcgtagctgaggaggaaccagatttttgggactgagttctccctcaccacccgctctgagccaccctcttggtcccttgtcctctactgcacttcttccggggcttggctcctcgtcatgagaggagcttccctgggcatggcgaggggcgtgactgacatagcagccctggacaagtggctccaggtgacctgtgttcacgttgatcacagcactaaccacggcccctcctctcagcaccttcccctctcgagccgtccagtcccagtgaaaatgctcaccgttcatgggtgggctgagcaagcccctgatctctgccttcctccgtgttctgatctgcttcatctgctgtgaaggcctctcgccatttcccccgctggcaaactcctgttcttcctggaaagttcagctaaaaagtcatcccctttaggggtccttccctcaggggaccgtgcacttggcgagacagggactggtcttgggtctctctgttgactgttttatgaacccaggtagtcacttccagggaactcatcagagatgctaccattggctccaatctccctctgttcccactcgaggttttttgtttcttcgtttgtttttctttctttctttttttttgagacagagtctcgctctcgcccaggctggagtgcagtgacatgatctcggctcactgcaagctccgcctcccgggttcacgccattctcctgcctcagcctcccgaatagctgggactacaggcacccgccaccacgcccagctaattttttttgtatttttagtagagacggggtttcaccatgttagccaggatggtctcaatctcctgatttcgtgatccgcccgccttaacctcccaaagtgctgggattacaggcgtgagccactgcgcccagcccgtttgtttttgttttttggtggacatcaactttaatttgccctttgttttgttttgtttttgaggcagggtcttgctctgtctcccaggctggagtgcagtagtgcaatcttggctcactgcagtctcgacctcaagaggatcaagcaatcctcttgccttagcctcccgagtagctgggaccacaggcgcacaccaccatgcccagctaattttattttatattttgtagagacagggttttgccatgttccccaggctggtctcaaattcctgggctcaagcaatccgtctgcctcagcctcccaaaatgctggaattacaggcacgagccactgtgcccggccttaatttgccctttgaacatgtacaattcagggcctctctgggcctcagtttcttgatctctgagatgggaagatgggataataatacttgttcctcccgtccttcagctcctccaggggaccctcacaccagcacactctctgtcagtcttccctcaatgaacccagcaggcaagcttggttttgacagaggatgggtgagcagagataaggaaaacggccagaaatatctggcttccctcagcaggggcaccaaaattggtacctggaaattgcctggcttggacaggcagaattgtcactgtcaacccccaccaccaaaggtcttgggtctttgtctttctgcttgtggtgtttgagagagctgcttgacacagccgaggtgcggtctgtgtcaggtgacctgggcatcctgggggtgcagggagaagcccaggtaaggaggaggaggggccggtcatcagtggggaaaagtgattgtctaccccacgggaaggtcaagggtaggacgctgtgagaagccagggggagagatgaagtgaggcatgatgcggggggccctcatccaccatccccctcttgcagctgtgctgggaagagcctaggctccagggtccaaggtggcagggacagaaggaagcacgtgtgagcactttctccctgctggcccgccttcctggttggcaatgccgtgagtgttccaggatgtggccccgtggctgtcatttcctttcttccacctagtgataacaatggccactgtttgtgtgcccacagtcggcctgtgtcccagacaccttccctccattgcgtcatctcgtcctcctgcctaccctgaaggctggatgccagccaagcctgtcgtttctgtggccatgctgtcgtgggtgtgtggggggcatcccctagccccaggctctggtggggggtacacaggctgggccattgacgaaggggtgtgtggaatctttctttgatttcactgcacccctggtgactttctccctcaatctgaggctcatgggtgctggatgctcttgactctctgcccttcctgggcgcacccctccgcgtccctgtgggcccgtcctcggggtagcctctctgcgctcttccaggccaggcctgagtcccacaggtccccatcttcccggctgcagcccccagaggctcagcctatactgctacttcctttgaaaactataatcgctttacatagcatctggaaaatagggaaaaggaaaaaacaaaagcccataaacccagcaccctcatctactcaatggcatgttttctgtcagtctatcttggtttgttttctatcaggctttgttttttctatgcataatatttactcagttaaatttttgttttgacaaactttctgtgagccaagcttgtggacggagatgaaaagacgagcagctgcctttgagaaactcagactctgggccagcccatctgggtgccagctttcactgctccacccactagctgggtgaccctgggcccgtgactttacccctctgttctttggtgttctcatatgtaaaatgaggataataatagtaaccagttcatagagtggttgtcagacagaatgattaatgtacgtaaagctttcaggatggtgccagcaagatgcacaggagtgtttggtaggaggatgacgaagcttaccgtctggcaggaggggcagttgtaacatgctgggctgtgatagtacagatgtgtttaaagtgagggagagcccagagcaaggagagagaacctggcatctggtgatggtgtatcaagaacattttaggccagacacggtgactcacacctgtaatcccagcactttgagaggctgaggcaggcagatcgcttgaacccgggcgttcgagaccagcctgagcaacgtggtaagaccctgtctttataatttttttttttttttttctgagacggagtcttcactctgtcacctaggctggagtgcggtggtgctatcttggctcactgcaacctccacctcccgggctcaagtgattctcctgcctcagtctcccaagtagctgggattataggtgcccaccaccatgcccagctaatttttttatatttttagtagagacggagtttcaccatgttggtcaggctggtctcaaattcctgacctcaagtgatctgccctcctcagcctcccagagtgctgggattacgggcatgagccaccatgcctggcctctataaaaattgtttggaagaaattacctaggcctggtgatacacacctgtagtcctagctactcaggaggctgaggtggaaggaggtagaggctgcagtgagccatgattgagccactgtactccagcctgggcaacagagccagaccctgtttcaaaacaacaacaacaaaaacatttttaaggaggaggctgagaaccacgagaaccaagcttggatttgaagaaggatcagggctttctcagacagaaaaggagaggaagaacattccagatagacatcattgagagatggcactgagccttgtaatgggacactgcgaacttttcttcagttgttatgatctttttttttttttttttgagacggagtttcgctcttgttgcccaggctggagtgcaatggcgccatctcagctcaccgcaacctccgcctcccaggttcaagcgattcttctgcctcagcctcccaagtagctgggattacaggcatgcgccaccatgcctggctaattttttgtatttttagtagagacggggtttctccatgttggtcaggctggtctcaaactcctgacctcaggtgatccgcccgagtcggcctcccaaagtgctgggattacaggcgtgaaccaccgtgccttgttggtataattattagtattgatcttttttccttttcatgtgcctcttagtgggccccttgcttttgtcttccttctgtccccagggttgatcctgtgctcagcacataggccagggaagaatgtggctgtgacccagtgtccactcagatgtcctctctcccccagggcacccatactctgtccttagtgtcttttgtctggtgacatcttggcacagaggcagagggcggcctccgtctgattggcgcctggctttggtgacagtaccttaggaaggcagtgtattttctgggaacctaggaaataacaaggtatctaattccatcatcaacactggggacaatttccatggcagaaactatgactctgaatatgcagcgtaaagttaccacccagacactgctgctcctgagtctcgaatggcatcttctgcaggggctcccccacctgcccctgcagaaggtgcagttcgttcatttccaaggagcttgcttttgtgtgctgtctctcggagctctttgggaaacctgtggtagcaggaaacaaaggatttagaccaatgccgatgatccccttgctccgatagagtgtgacatgatgctggtcaccttttggtatctaggaggggggacattgattttgtttgcggaagtgaaatgatccatgctggcctctttttttttttttttttttgagacagagtcaccctatcgcccaggctggagtgcagtggcgcgatctcagctcactgcaacctctgcctcccgggttcaagtgattctcctgcctcagcttcccgggcagctgggactacaggcgcctgccaccacatctggctaatttttgtatttttagtagaggcagggtttcgccatgttggccaggctggtctcgaatttctgacctcaaatgatccgcccgcctcagcctctcgaagtgctgggattacatgcctgagccactgtgtctggtccatactagcctctttgagtgctgaaaggttatctctgtaacttatttagtgagaaccctccatttgcccagggcattactgcctataatgtatgttcacatgtgctatctcctttggtcaataccacacactacaggtgaggaaactgagtctctgctgggacactgggtcaggaagcaggcagttaaggtcacctgtgcacagtggcagcacagggggacagccttctaggtagccagcctggcctgagggttctgtcacttttacctcccactcagtgttgtttctctttctttcccctccttttaagatccctccaggcccaggatctggggacaacgctggtggggagtgatctgggtgtctgtgcaggaaaccgctgcactgggtgagatgggcatgggagactgtgcctggctgaccagagacctcgttttcttccagacagagggggaagacggtggggcctccccacctgccccgcagaagatgcagttctttggccgcctggtcaataccttcagtggcgtcaccaacttgttctctaacccattccgggtgaaggaggtggctgtggccgactacacctcgagtgaccgagttcgggaggaagggcagctgattctgttccagaacactcccaaccgcacctgggactgcgtcctggtcaaccccaggaactcacagagtggattccggtgggtgatgctcagcgggaacatacttctctcctttcactcccccacgtctcggattggaggtcttattggccgagaagcagtttctttgagtctctgtctgaggggtctggagaggggtgggagagaggggagactgtactcttggaccagagggaagggcttccgagactccacacttctggcccatcagtgtcccagcacgaggctgaggatggaagcctgggttgtttctggcctggaggctcgacctatatggacaaagggaagaaggaaggacagggagactgagagtgtccacatcagataaggcccatggggagaacctttagccctggctctttatttttggttttggtttttgttttttgagacagtcttgctctgttgcccaggctggagtgcagtggcgcaatctcggctcactgcaacctctgcctcccaggttcaagcgattctcctgcctcagcctcctgagtagctgggattacaggcacccaccaccacgcccagctgatttttgtatttttagcagagacggggtttcatcatattggccaggctggtctcaaactcctgacctcaggtgatctgcccaccttggcctcccaaagtgctgggattgcaggcgtgagccactgcacctggcctagccctggctctttaagggcatggccgttctcataggggctgcccagggtttgcttaggaaggctggacagagctgttgcctcttggggcatgctgggactcccctgggcctgaagagaaggctcaaaagccaggacaggcctgagggaaccgggccaacggcagagctggttgggaaaaggggagaagcagccaaggttccaaatgcaggccccagcagtgcttggcagactggcatctagttgggctcagacagatatccctgtttccgctcacctatccatctggctgtcctgtcagccatccattcaacatgcaccaagcacctccagtgtctccagagtcctgggcttcgggccagtcctggctggcctgtgagatgacaaacatgtcctgtgtctttaaggaacgtacagtctggtgggggaggtccggtgcaaacaggcgtcatagcaccccttgaggagtgctgtgacagagggagagcctaggaaacagtgtggatcacaaggaggtgattgagagctactctgcgtctggaagagtgaggaggagcctgtgtggcagaacaaaatggataaggtcgttccagccgtgcagaagtgtggaggtgtgagcctgcaggcaggtggctctggttggatcccaggtgcatgcagggctttggtgagagtgaggctgaaggaagcagctggggactcattctgactaaagaggcatggcaggaggggtctctgaaagtgtcaggctgggggccaggggctgccaccaacagaagagcaaggcaggtatcagggccccatccaatcaggtgagaattcagagcctggctccacaaggaacctgaggcagaggcacccacagcaggtgcttgggctaaatgcagctcagtggccagtgcaggcaccagttttaatacagtggggccattccagattctgagtgcagatggggctgagcagaccgccttccagctggactcgatcaggactgaccctggacggggcaggcttgcacttgtagcttcagagctccactgcaggcacagctgaccagggcagcgggtccactccttggagagctggacagccccacttttgaggtacacggccctggggataccactaatctccacgtaccaataatcaccaagttctgtcagttgtaaaatcccttgacaggattccagatttgtctcagccagcttaagccccagtgtgggcagacctccatcccaggaggatttagtcctttgtcagcagcttcttagctacacgtaagctattctgtggtactttatagtttacaggattttttgttttcttttttttttttttttgagacagagtctcgctctgtcacccaggctggagtacagtgacgcgatctcggcttactgcaagctccgcctcccaggttcacgccattctcctgcctcagcctcccaagtagctgggactacaggcacccgccaccacgcctggctaatattttgtatttttagtagagatggggtttcaccatgttagccaggatggtctcaatctcctgacctcgtgatccgcctgcctcggcctcccaaagtgctgggattacaattttacaggatgtttttaagtatgttgggttagcacattctctgccaatccgtggaggtgggcaaggaaggcagtattccattttatgcatgagaaaatagccttgggatgataagtgattcatcccacttatacacaggaagcagtgaagaaacagaatcagtgtcttctggttcccaattcatttctctgtgctgctgtgttgtttccatgtatgtatgtatgtatttatttttttgagacgttaagtcttgctctgttgcccaggctggagtgcagtggcatgatcttggcttacagcaacctctgcctcctgggttcaagctattcttctgcctcagcctcccgagtagctgagactacaggtgcgtgccaccatacctggctaatttttgtgttttttagtagagacagggtttcactgtgttagccaggatggtcttgaactcctgacctcgtgatctgcctgccttggcctcccaaagtgctgggattacaggcatgagtcaccatgcccggctttgtttgtcttatttctaaattttattgatttatttattttcacagtcatagctctggagtcttttttatcttctcccctctaacctgctcccacccgaacctttccatttcagcagatagcatcattgcaacgggctgtgccagatccagccatcacatccacctttccagccaaagggagggtggaagggcaggatgcagaaggtcaatctccccctcctcagggacatttcatggaagttgcacgcattggccagaacccggtcacatggccacagctaactgcaaaggatgctgggaagtgttgcctgtgttgcagacagccacgtgccagtcgaaaatcagaggttctttctccctccgtcttgctgctggctcgcttctccagaccacagtcattgtgcacgtgtctcctgctgctccggctgtggcctgcactcctctcatcctcttccaagctgctgtcacagcgctgtttccagagggcaaatctgattggtcactcccctgctttactccccaagggcttcctgttttcttttatttttatttttattttcattttttgagatggagtctcgctctgtcgctcaggctggagtgcagtggcacaatgtcagctcactgcaagatctgcctcctgggttcatgccattctcctgcctcagcctcccaagtagctgggactacaggcgcccgccaccacgcccagttaattttttttgtatttttagtagagacggggtttcaccatctactcttagccaggatggtctcgatctcctgaccttgtgatctgcccgcctcagcctcccaaagtgctgggattacaggagtgagccaccgcgcccggccagcttcctgttttcttaacacatcaggtgcttaatgacttaaaagggcccagtgtgatcaagtttctgcctctgtgttctcagctcatgccgccttgtgctcctggcctttgcccaggctcttgctgtggcctggaatactcccctttctttgcctgccttccttcctcttgccctcccctgacctgcaggctggattaggagtttctgctgggcatcccatggcacccgtccctgcactggggatcctgctttcctggtaggccacagaccttgtgaggggagggactgtgtctgttgggttcatgacagtgtgcccagcccccagcaggtgcctggcgtagatcaggtttgtggaacaaatgaatgtgatatattaatttagctttagagtattcattgagggctgctgtgtgccaggccctctgtgccacctgggtggagggtggaggactgttgcattgagggcagttgaaggagtgagctgggaagtgggaggtggaggatggggactgggatgcagggtttgaggttatcaggggtcccagaagcagtaatgccaaggcctaggctgtgacctggagtgagggctgcgatggggtggggtggggtcgaggctgtggaggagggtcatcagggcactgctggagccctggggttctccagggccgggggtggtcattgcagtgttctcccagctcctctcaacaccctgcggtctgtggagagcaggcctggtgcactggacttgcctctggccagggctgagtttctgccttctaaacgatcttcctcctgtgttgccctagaggcctctggactgtcctgagtacttgacgcgtgttagagtgagcatgggctgctagccttccgctccaggtggaggagtttctgttgttcttttgctgctgttgctgcagtgagctgccaggctgagcttctggatggacctgggggatggaattaggagcttctgaattcttgggttgtataacctaaggccggagagtcccacagcactgctgctgggcggagagactggaccctgctgatacagacagcgacagcagcaggagcatctgcagtttcccagcaggtcctgcatgcctgggcttggcactagtctaagtagtaactcatgttatcctcacgacagtcccacgaggtggggtcattactgacctcctattacagatgaggaaacagaggcttgcagaatttgagatcacacagctggtcagcgtagcgattattcagaccctgtcacctggctccagaacccactcgtttacctttcttacatcagggctgctttgtagtgtggcgagctgagtggagctccacccgcctgggctgatcctggcccttcctgcctgacctatggtgcgggggccctggctctccccgtgtgagcccccaggggtcacttgtaatatgcctgtgtacactatgatagcatagatacttctgttcctggtacagattaatcatttacggctggcattgacttgtaacagatgacatttgatgaaatcaaccagcctctcactggtatctcagcagaaacagggctgtacctcccaggcatcctgggaaggatgatagaagtgtgtgatctgtgcttccctaccgggagctgacttttgaggctctctggactgggactttgccataaaactgcttatcagaaacctcagataagtggagtgccctgtgtcctggccacgtactctggggccagctcctccatccattcagtcctcccacatcccatcttcaccaagcagagtggaaagcggcaggtctctgcgagaaaaggaggctctgtacccagccttcagtgagataactttagagtggggccttgtattccctacacaggccttgtccccgacacggcctctttgcccttgcttctccttctgctaagaatgctccttcccaactccttggctggacacacggctcctgctctgtgggcctgtcctgttcccactcagagcctcagcaccccccatgtggccaagacacagcccctcttgccttaggttgccgtgggtctgtttccacatctgtttcccctccagactgcagggctcctgagggacagggcctggggccaagtctcctctgcgttcctgatgcctggtggtgtgccacgctctccgtgggtgcacggtaaatatctgccgagtggctagatgtatccatggttgctgaaggccaagtgtgttgaccagagggcgtgggaaaggctccactggggtggctggggtagagatagaccttaaggggtccagaagactccaccagctggagggaaaggccctacagagacaaggtactaggaaaggcccagaggacagaggaggggccctgtggggagcctgtgggcaggaagggcctgtgctgggctttgaaactggggactcaggtactgctctagcgtgagggtccttggcattttttttggtccaggaccccctgaggtccctggggaatgagaacaggctcacacagccactttcaagaggtttgcaggtcccctgaggcttagccacagacccctcccaccccagcagagacacagcagaggcttctgagtggaggccaggtggcttcagcctggggttctagaagggagggaagagacacacccccgtgtgtcctccagagcctcagccttctccctgaatctcccctttgcctcctcactgtaacccacacctggctctccttgaaggacccgcttgccccgcagcctcctgagagttttctctcccagtccctctcccactgggcctggaggtggggtagggtcctccttgcccccagccttgaatcttctgtcaccctacaataccacttgctgtcaccccggtgataggtatctacgagcctggggtgctcccccacatcctcaaagatgtgagcccctgactcagcgttgcctctggttcctgaccctccacattcacatgaccacgcgctggcctttatcatcgccagtgacagcagctctcccgtaaatacaagtttcaagcaccccactttccagtctctgccttctgtctttccagttcattccctctagtcctccacccacacagtgcttttccccattgacagggaattgctcctggccgcttttcccagccccatcccgttcatgtgccttgctttgtacccagcatggactccatggcctgtcattgtcactccttcacctatacttcctgcctccttgcttctctctctcttcgtcatcctggcatcaccaccccagaactgcttggtttcagttctccaccatggctaggggaacatacctttttgctgactgctctcactttctttttttttttttttcttttttttttttttgacacagagtctcgctctgttgcccaggctggagtgcagtggcacactctcagctcactgcaacctccacctccggggttcaagcagttctctctgcctcagcctcctgagtagctggtattataggcacccgccaccacacccggctaatttttgtattttttttagtacagacagggttttgccatggtggccaggctggtcttgaactcctgacctcaggtgatatgcctgccttggcctcccaaagtgctgggattacaggcatgaaccaccctgcccggccctattgctctcactttgaaatcacgacatgagccacagtgagcctatgatgtggtttgacgtctttctgcatttctctgttcacccctctcccagaaggcatgcctccttccctcccctcagcctgcagccccttcccctccacgcttactctcagctgatagccctgctgctgtctcgctgagaaaatagaaatagccagaggagaattccctctaccccatgcacacacctctgtccccgcctactccacattccctgttgtcagcaccgatgtgtttagctgagggtggtccccccattcaaggccatcatctcctgtcatctacttcttgacaccatttgaacaattatctcccctctttcctacataacactttccccttttctactatatattttttgctatggattgaaagtatccccccgaaatcatatgttgaagccccaatccctcgtgtgatggtattaggaggtagagcactatgggggtgattaggtcatgaggatggagccctcatgaatgggattagtgcccttagacgaagaggcaagaaagagatgatctgtctctgccatgtgagggcacaacgagaagatagccatctgcaaaccaggaagtgaaccctcatcaggaactctatcagccagcaccttgatcatagacttcctagcctctagaactgtgagaaataaaggttgtttaagcctcccagtctgtagttttctgttataatgtcctgacctaagttattttccatcgctatacaatgggttatttttttctttaaaaaaaaattatttcttgactctactttttcctccagagactgcttatattccactgtcttcattcttctcctcctgttttctctctttaaacttttcaaaaatagcaaaatataacacatatagagaaaatgatatacagctcagtgatttatcacaaacacctgtgtaaccaccactcgaatctagagataggacattacagcaccccagaagccctccttttgtcccctcttcccaaagaagggtaaccaataacttgccttttatgataaaggctttttttttttgagatggagtctcactgtgttgcccaggttggagtgcggtggcgcaatctctgcttactgcaagctctgcctcctgggttcacgccattctcctgcctcagcctcctgagtagctgggactacaggtgcccgccaccacgcccggctaattttttgtattttagtagagacgaggtttcaccgtgttagccaggatggtcttgatctcctgacctcgtgatccacctgcctcagcctcccaaagtgctgggattacaggcgtgagccaccgcccccggccaagataaaggcttttctatctggcttctttgttagcattttgttggcgagattgatacgttttgtgtgcagctgtctgtcattttcattgcaatagaattccattgtctactatatcacagttactcattctactactgatgaaaatttgggttatttctagtttttttggtgcatacatgcatacatttctggtagacatacctagaagtgaactggctgcattatgggccataacttgtcttcaacgttagtaaataataccgcccgtctgttttccaagcagcagtaaatggcactttctgttacttcatatcttctgttacttggtactgtcaggttttaaaattttagtcattctgtcgggtgtctagtagtatgttattgtggttttattttgcatttgcctgattgcaaatgaagttgagcactttttgatacagtgattaaccatttggatatcctcttcagtgaagtatcagctcaattctcttgactatttaaaaaataaagttgtttatctttttcttacagagttttaggaggagttttttggtacatgtgcagtccaaatacacaccttttgtcagtgatacgtgttcagctgcacacacggtgttttgcctttttattcttttaatggtatctattgataaacatgagttcttagttttaatgaagtcaaatttgttcatcttctttacggtgtactttttgtgtcttgtttaaggaagtccttctctatcttaaagctttgagaagcattccttctttctcctattttctaaaaattgttgaagatctccttccttccttccttccttccttccttccttcctttcatctatctctctctcacccaggccaaacttcagtggcatgatcatggctcactgcagcctcaacttcccaggctcaagtgatcctcctgcctcagcctcctgagtagccaggactacaggcacgcaccaccatacctggctaattttaaaaattttttgtagagacacggtctcatcaagttacccaggctggtcttgaactcctgggctcaaacaatcctcccacctcagcctcccaaagtgctgggattacaggcatgagtcacatgtctagcctgtattctttctttcttaaatgtttggaagaattcatgggtaaaaccatgtgaccctggagtttatttgtgggaagcttttaaaacatggattcgatttctttaacaaatataggactatgagattttcatctcatgtcggtttgggtatgttgtgttttcaaggaatttttctattttatcgaagttgtcaaatttgtctgcaggtccccttatttcctttttaatgtatggaggatctgaagggatggtactttgtgttgtctctatttcttgtttggttttgctagtgatttgccaatttaaaaaatctttccaaagaaccaacttttggctttgtttattttttgaaaacctgagtagctgggattacaggcgcccaccaccacacccggctaatttttttatttttagtagaggtggggtttcaccatattggccaggctggtctcgaactcctgacctcagatgatccacccgcctcggcctcccaaagtgctgggattacaagtgtgagccagtgtgcctggcaagccgctttttaaatggcaccaatcccattcatgagggcagagccctgatgatcgaattacctcctaatggccccatttcttaatactatcacactgagaattaagttttaacataagaattttaggaagacacaaacattcagaccatggaacatatataaaacagttgtcctaccaactaacagaatacacattcttttcaagaacacctatataaaaattatagacactgacctatgctggccataaagcaaatatgaacaaatttcagatacctgaagagatttagactatgttctccaactacagtgcaattaagctagaaatcaatagcaaaaatgtaactataaatgagcccgtatgtttgaattttaagcaagatatatgtaaattatctatggttcaaaaaagaagtcacagtgaaatttagaaaatatcttgacgtggcgggttgcagtggctcacgcctgtaatcccagcactgtgggaggccaaggcgggtggatcacctgaggtaaggagtttgagaccagcctggccaacatggtgaaaccctgtctctactaaaaatacaaaacattagccaggcgtggtggtgggcacctgtggtcacagctacttgggaggctgaagcgggagaatcacttgaacccgggaggcagaggttgcagtgagccgagattgcaccactgcactccagcctgggcaacatgagtgaaacttcatctcaaaaaaaaaaaaaaaagaaaagaaaaagaaaatatcttgacccaatgatgatgcaaatactacgtatcaaacttgtaggatgaacttccacttctggccatgacagaggagcctgtatcagactagccttcctatttatatatttatttttgagatggggtgtcgctctgttgcccaggctggagtgcggtggtgcaatctcagctcactgcaacctccacctcctgagttcaagtaattctcctgtcccagccttccaagtagctggaattacaggcgcccaccaccacacccagctagttttttatatttttagtagagacggggtttcaccatgttggccaggctggtctcgacacctgacctcaggtgatccacctgcccctgcctcccaaagtgccgggattacaggtgtgagccactgcgcctggccgtgagtgacctttttaatgtgttgttgaatttgatttgctggtattttgttgagaagttttgcatcaatatccatcagggatactggcctgtagttttctttttttatatgtctttgtctggttttggtgtcagggcaatactggcctcatagaatgagtttggaagttttctctcctctgtttttcataatagtttgagtagggttggtattagtttttgtttaaatgtttggtaaaattaagcagtgaagccactgggtcccaggcttttctttgctgggagacttttcattacagctttgatctcattacttgttattggtctatttaggttttggatttcttcacggttccatcttggtaggttgtgtatgcctaggaatttatccatttcttctagggttttcaatttattggcatataattgttcacagtaacctctaataatcctttgagtttctgtgatattggttgtaatatctcttttgtcatttctgatttttttgtttgggttttctctctttttttgttagtctagttaaagatttattgattttgtttatcttttcaaaaaactttattttgttgatcttttgtattgttttgtttcaatttcatttatttctgctatgatctttattatttcttttcttctactaattttgggtttggtttgctcttttctagttctttaagagacatcattagattattttgaagtttttctacttacttgatgtaggtgcttataggtacaactttcctcttagtacttctttccctgtatctcacaggttttgatatgttgtgtttccattatcatttgtttcaggatgtttttaaatttccttcttaatttcttcattgaccattcaagagcatattatttcatttccatgtgttcgtatggtgtgcaaaataccttgtttttgatttgtagttttatttcattgtgatcacagaagatacttgatatgatttcaaatttaaaaagtaatttggctgggagaagtggctcatgcttgtaatcccagcgctttgggaggccgaggcaggcagatcacgaggtcaggagatcgagaccatcctggctaacacagtgaaaccccgtctctactaaaaatacaaaaaattagccaggcatggtggcaggtgcctgtagtcccagctactcaggaggctgaggcaggagaatggtgtgaacccgggaggcagagctggtagtgagccgagatcgcgccgctgcactccagcctgggtgacagagcaagactctgtctcaaaaaaaaaataataacaataataataatttaagacttgttttgtggcctaccatatggtctatccttgagaatgatccatatgctgaggagaagaatgtgtattctgcagccgttggatgaaatgttctgtaaatatctaataggttcatctgatctatactgcagactaaggctggtgtttctttgttgattttctgtctggatgaactgtctaatgctgaaagtggagtattgaagtctccagctattattgtattgaggtctatctctctctttagctctaagaatacttcctttatatatctgggtgttccagtgttgagtgcatatgtatttaaaattgttacattatcttgctgaattgacccttttatataatgaccttctttgtctctttttatagtttttgtcttgaagtctgttttgcctcatagaatagcatagctattcctgctcttatttggtttccatttgcatggaatatctttctccatccctttagtttcagtctatgtgtgtctttacaggtaaagtgtgtttcatgtaggcaacagatcactgggtcttgtttttctatccgttctgccactctgtgtcttttgattggagagtttagtccatttatgttcaatgttattactgacaagtaaggacttactcctgccactttattaattattttcttgttgctttgtgatcttctttctttccttcctgttctccttttagtgaaggtgattttctctggtggtatgttttaatttcttgctttttatttttttgtgtgtatctgctgtatgttttttgatttgaggttaacatgaggcttgcaaataatatcttataacctaatattttaaactgatgacaccttaacactgattgcataaacagacaaacaagcaaagagaaaactaataaaaactctacattttaactttgtccccccactttttaacttattgtactgtttatgtctgaaaagttgtagttattatttttgattggttcctcttttagtctttctactcaagatatgagtggtctacatatgacagtgttataatattctatatgtttctgtgtacttgctattaccattaagttctgtactttcaagtgatttcttattgctcattaatgtccttttctttcagattgaaaaactccctttagcatttagcagtatgtgaactgcatttttcaagtccagaatttctgcttgattcttttttttttttttgagatggagtcttgctctgtcgcccaggctggagtgcagtggcgcgatttccgctcactgcaagctctgcctcccgggttcacaccattcttctgcctcagcctcccgagtagctgggattacaggcgcccgccaccacgcctggctaattttttgtatttttagtagagatgggatttcaccatgttagccaggatagtctcgatctcctgaccttgtgatccgcctgccttggccttccgaagtgctgggattacaggcgtgagccactgtgcccagcctgcttgattcttttaaattatttcaatctctttgctaagtttatctgttaggattctgaattccttctctgtgttagcttgaatttcactgagttccctcaaaacagctattttgaattctctgtctgaaaggtcacatatctctgtctctccagaattggccactggtaccttaattagttcatttggtgaggtcatgttttcctgtatggtcttgatgcttgtgatgttcgtcagtgtctgggcattgaagttaggtatttattgtagtctttgcagtctgggcttgtttgtatctgttcttcttaggaagactttccaggtaataaaagggacttgggtattgtgatctaagtttttggtcactgcagccatatctgcattagggggcaccccaagcctactaatactatggctcttgcagactcgtaaaggtaccacttgggtggtcttggataagatctggaagaattctctggattaccaggcagaggctcttgttctcttcccttactttctcccctaaaagtggagtctctctctctgtgctgggccgcctggagctaggagaggggtgacacaggcacctctgtggccactatcactaggactatgctggctcagacctgaagccagcacagcactgggtctcacccaaggcctacagtctccactgcctggctactgcctacgtttgcttaaggcactagggctctacagtcagcaggtggtgaagccagtgagattatgtccttcccttcaaggcagcaagttccccctacccccatcctgggaaggtccttagatgccatctgggaggcagggcctgcagtcagaaaccttagtaatctccccagtgctctattctattacagcctggctgatacccaagccataaggcaaagtccttcctgctcttccctcccctttccacaagcagagaagtctctctccatggccaccactgccccagccctgtggcagtgctgccaggccactgccaacgttcattcagggcctaagggctcttgaagcaactgaacactgccaggcctgggactctccctttagggtagtgggctcccctctgacccagggcaggtccagaactgccaccccacagccaacacttagaatctgggaccccaagagccctcttggtgctctgccacactgtagctgagctggtacctaggctgatttttgctttttatgaaggtacttttttgtgtgtatagttcaatttggttttcctccagggaggacaattggtggaggtttctatttgggcatcttttttttttttttttgagacggagttttgctctttcacccaggctggagtgcagtggcgcgatctcggctcactgcaacctctgcctcctgggttcaagcgattctccagcctcagcctccccagtagctgggattacaggtgcctgccaccatgcttggctactttttttttcaattaaaaagtaaactttaatgtcgaaaatgcaaacttggggaaggcagaaagatcacacacaaggctgtcgcttcacacttggaaggttgcacggcggccaggagaggcactcctcacttcccagacagggcgggggccgggcagaggcgctcctcacttgccagacggggcggcggccacatgcctggctaatttttgtatttttagtagggacggggattctccgtgttggccaggctggtctcaaactcctgacttcaggtgatccacgcacctcggcctcccaaagtgctgggattacaggcatgagccaccgcgcccagccctatttggccatcttgctttgcctccaccttcatttgataacagaacacccccatgtaaccaccaccacaatcaagatataagacatttctgttattctccaaatttccttcaccctcctttatagtccatggcacccaccccatccctgggcaacacctatgtgcttcctttttttttttccccgcaggaggacgtcttcctatacctatgtgcattccatcactgctgcttttaatcatatagcgtgtagtcttatgagtctgactttttcacttagcataatgcttttgcaatttgtgattgagcgttttcatatgattctgttttttctgtctcttagcttggaagttatacactttttagtagtaactgttgggagatcgttctccaagagtctctctcatatttccatacatcctgctagcagagacattgactacctgtttttgtctgtttagtgttgctataaaggaatacctaagtctgagtattatacatagaaaagaggttttatttgtctcatggctcctcaggccatacaagaaacatggtgccagcatcttaccagtgtcacatggcaagaaaggaagtgaggaagagaaaataagttgttaactggttgttaaaaagtgccaggcacgggccaggcacagtggctcgtgcctgtaatcccagcactttgggtggccaaggcgagtggatcacctgaggtcgggagttttgagaccagcctgaccaacatggagaaaccctgtctctactaaaaaaaatacaaaaaaattagctgggcatggtggtgcatgcctgtaatcctagctactcgggaggctgaggcaggagaatttcttgaatccaggaggtggaggttgcagtgagccaagatcacctgggcgacaagagcgaaactctgtctcaaagaaaaaaaaagtgccaggctctttttaacaaccagttcttacaggaactaatagagtgaaaactcactcacccccaccccacagggagggcattcattcatgagggatccacccctatgacccaaacacctcccattagccccccacctccaacattggaatcaaaatttaacatgaggtttggggggcagaaatccaaattatagcactacctttgttccaggctaccttcaaaggatgtttatacagcaaacagccttggaaaatagagttagggtctccttgtagagcacagggtaagtttgcttacttttcagcataatcaagattgtgtcttcttctggagcaaaactttgacaacaacaagcggggcaaagtctgaaaccttttgcacatcttgacagaaccttagagattacgagatttatctctgccttactcaaggtccattagtatcttccagaacaataagttggtcttagaatcctttagctatgtattcccttccaggcttcgatgctgtgtgctgttgttttatttagtttttattttaaacccaacaagacgctataccatcaatacttatttagatccccccacatatttaacttgccatggtgcttcattctttcatgcctctttaagcatccatctaggatcgtgttcattccacatgaagagaaagcttttggcccagcacgatggctcacacctgtaatcccagcactttgggaagcctaggcgggaggatcgcttgagcccaggatttccagaccagcctgggctacgtggcaaaaccctgtctctactgaaaatacaaaaaattagccaggtgtggtggttcacgtccctgctactcgggaggctgaggtgggaggattacttaaacctgggaggttgaggctgcagtgagcgttgattgcaccactgcactccagcgtgggtgacaggagtgagaccatgtctccaaaaaaaaaaaagaaggaaagaaaaagcttttgtatttcctttcgtgtaggtctgctaatgacaaagtctctgggttttttgtttgactagagaaatgttttaattttaaccttattcttgaaggttttgtttttgttttcattttgttttgtgtgctaagtacagaattctcattggcatttatttatttagagacagagtcttgctctgtggcccaggctagagtacagtggcacgatctccgcctcccaggttcaagcgattctcctccctcaacctcctgagtagctggggctacaggcatgcaccactacacctgactaatttttgtatttttagtagagacggggtttcaccgtgttgcccaggctgatctcaaactcctgagctcaagtgatttgcctgccttggcctcccaaagtgctgggattataggcatgagccgccgtgcctggccagcatttattttcttttcagctctttaaggaagtcattccattatctctgggttccattgttgagaagccagctgtcattctaatggttgccctttgaagataacttttttccctctgctattttaaatatttcctccttgtattttattttcaacaggtgtaatgtggcacatatatcagcaattgttatgttacatacaatacatattgtgcaacatatgtatcattatcagttattgctgtgtaacaaactactccagaacacagtggcttataaaaggaatcatttatttagtccttaaatctgcaatttgagcagagctcagtgggaaagcctcagctttactttatatggcaccatataaggtaactcgcaactggcaagttggtgctggctgttggctggtagttcattcagggctcagggcccaggaccaagagtcgtcaccatggcttgcttcagcctccttgaggcatgatggctgggtcccaagagaagagaaatagaaacttccagtctcttaaggcattggtctggaagctgggacggcatcacttttgccatattctgttggtaacgcagttacatcgccagattaaagggtaaagagatacaaattcccactgctcagtgcaaggaatatcagtgattttagggggccctgttttaaaacccctacaaggtgctaagcgtggatttctggggctttcttgttttttgtttttttctatgtgtttttttttttttttttggtggtggggtcagggagggcttatagggtatgttaaatcagcagaataattttatttatttatttggagatggagtttcactcttttgcctaagctggagtgaagtagcgtgatcagagatggagtttcactcttttgcctaagctggagtgaagtagcgtgatctcggctcactgcaacctccgccccgctggttcaagcaattcccctgccttagcctcccaagtagctgggattataggcacccaccgccacgcccggctaatttttatatttttagtagacatggggtttcgccatggctagtctggaattcctgacctcaggtgatccacccaccttggcctcccaaagtggtgggattacaggtatgagccactgtgcctgacctataatgttttttaaaaatcagttttggaaagtttgcagacattaacttttcaaatgtagcttccatttgattctttttctactctgcctctgatcctccacttatgtatgtatgctagatcttttattagatagtctgtgtctcttatgtactctactatattttgtattcttctgtctctccatgctttattctgtttactctttcctgattatattttttaattttgtaatttccatttgatgcttttttgatcattcaaaactcttcaccaaaattctaaatttccttttttaacctctcgaatgttatcacagttactttaaagtctattttggataacttaaatatttacagtcccctcacagatatgtttcttttgtatattgtttctgttggttttctttcatgtcttatctccacatatgcctggtgagttttgattatgtgttggtcattgtatttgcaagtatgctcgtagaaataatctggaatggccgggcgcagtggctcatgcctgtaatcccagcactttgggaggctgaggcaggtggatcacgagatcaggagatcaagaccatcctggctaacatggtgaaaccccatctctactaaaaatacaaaaaattagctgagcatggtggcacgttcctgtaatccctgctactcgggaggctgaggcaggagaatcacttgaaccaggaggcagaggttgcagtgagccgagatcacgccactgcactccagcctgggtgacagagcgagactccgtctcaaaaaaaaaaaaaaaaaaaaaaaaagaaataatctagagcctagtttgatgtttccttacaaagaatgaatttatttttgcttctcccattgcaactaggataacctcagtctagtttctggaactgaaatcacttgaggctgaactgtggtctctgtgagagcgtgtctgtgtatggctcacccttattcctaggctacgtagttctttaggaccctaacccaaagtaagagatgttcatcagggctctcctcttggcagacgcctgggctccagtccctgtgtcctgagccccatgaggctgttactggtgctgctcgtctgcccatcctctccagtaacagccacctgaacactgcaattcctgggtttccatcattccttccagcctggtgagtcatcagtgtcttttgaggtatccagtgcctgccagcagatgttttttaataatttgtccagcatttctggctgtcctcagtaggtggtctgtttcacattccctagtctgctgttaatggaaagtggaagttctgagagagaatcatcgttcccgtcagcattcaaatgcctgattacactttccccattcgctatcctttcctttatttgctcctcaccacagcaaaactcctcaaaaatatctatctttgcaatcttcagattctcacattgtgtccttaaacccactttaatcaggccttggttccctccattccactaaaagtaatgttgtcaaggtcgtgcatgcctccgtgatgctaattccagtgatgagttttcagttgtcattctctgacatatcggcaacacttgatgtggagtaccctgatgttgagaggctggtgagatgaaggaaaaacccagccaagggcaatgaggaatggcttccttccgcctcctccttccctatctttgttgtggtttttgttgtttctgtaacactgattacgttatagtttatttaatgtacttccttattctatgtttttactttagtcattttgttgatctcctccataataacataggctcgggccaagcacagtggctcacgcctgtaatcccagcactttgggagaccaagatgggtggatcacttgaggtgaggagttcgagaccagcctggccaacatggcgaaaccctgtgcctactaaaaatacaaaaattagctgggcgtggtagcaagcgcctgtaatcccagctactagggaggctgaagcaggagaattgcaggagaatcacttgaacccagggggcagaggttgcagtgagctgagatcgcgccactgcactccagcctgggtaacagagtgagactctgtctcaaaaaaaaaaaaaaaaaaaaggcttcaggagggcagagcattttatgcaattgttcattaattgacccctccatttggcacagatcacatgcccagtagttaactgttaatcaacgcactctctgtggaacaacaggctggtcccgttgagccaacactctctgggcactgccttcactagactctggctggctgctgcgcttgtagaggtatgcaagacaaaaccttttggtatgttaaaagccctggtcagaactttaagtaaccatcactgacatataatggttatggttttgaaagtgcttttatagtggtttttcatctgtcctcacagcacctctgggaggtaggtaggacaggtacagttagtctcatgtttcaaatggggctcagagagggaaaaggatttcccaagatcacacagcaccttagtagcaaaacttggactcaacctcaacacttaaaaatgaacaaagctggccgggcgcagtggctcatgcctgtaatcctagcactttgggaggcccaggcaggcaggtcacctgaggccaggagtttaagatcagcctggccaacatgacaaaactctgtctcttctaaaaatacaaaaaattagccgggcatggtggcgggtgcctgtaatcccagctactcaggaggctgaggcaggagaatcacttgaacctgggagatggaggctgcagtgagccgagatcgtgccattgtactccagcctgggcaacaagaatgaaactccatctcaaaaaaaaaaaaaagaaaagaaaagaaaaagaaaagtttccctttttttaaatatctcattttaatgactgcataatagtttattacatagttataccataatttatataatattttgttgctgtacatttaggttaaacaatacttacttagttcctactatgaagaggggccaagtactcgaggctggagctctcacatgtggcaatgaaattagaaagtggatatggcagggctgtggtaaaataaaatataaaaataataaatgatattaccaaagaaaaggaaagtttttcaaaataaaggaaaatctagacaagcatagtggctcacacctgtaatcccagtacttttggaggctgaggcaggaggaacacttgaggccaggagttcaagaccagcctgggcaacatagcaagaccccctgtcaacaaaaataaaaaaaaattaggccaggcacagtggctcacggtggctagtgcctgaaatcctagcactttgagaggctgaggggggtggattgcctgagctcaggagttcgagaccagcctgggcaacatggccaaaccccatctctactaaaaacacaaaaaattagccaggtgtggcagcacacgcctttaatcccagctactctggagactgaggtaggagaattgcttgaacccgggaggtgaaggtcgcagtgaggtgagattacaacactgcactccagcctgggtgacaaaatgagactctatctcaaaaaaaaaaaaaattagctgggcatggtggtgcatgcctgtaatcccagctactcaggaactaaggtaggaggatcccttcagcccaggaattcgaagatgcagtgagtcatgatcacaccaccgcaccccagcctgggttacagagcaagaccttgtctctaaaaaacaaagaaagtctaacctaaacgccattatgtcatttacatgtgtataggggtgtgtgtgtgtgtgtgtgtgtgtgtgtgtgtgtgtgtgtgtgtgtgtgtttgcttgggaggggagtcgggctggagctggccaggccgcagcctggggaccttctgattccagcagggatgtgggccgagggtcccgccttactcatttcgggtcttgctcctctgtcctggctctacagactcttccagctggagttggaggctgacgccctagtgaatttccatcagtattcttcccagctgctacccttctatgagagctcccctcaggtcctgcacactgaggtcctgcagcacctgaccgacctcatccgtaaccaccccagctggtcagtggcccacctggctgtggagctagggatccgcgagtgcttccatcacagccgtatcatcaggtgagcaagggaacaagaccatttggacaacgtgtgtgtacctgcttgtgtgggcagtgggggccgcaggcctcggttcccctccatagtttgacttaaaaaggagcagggcctggcatggtcgctcactaacgcagtcccagcactttgggaggctgaggagggaggatcacttgagactaggagttcaagaccagcctggcaaaatagcaagaccttgtctctacgaaaaaattaaaaaattagcatgtgtctatactcctagctacttgggatgctgaggcaggaggattgcttgagcccaggagttagagtttacagtgagctatgattgcaccactgcacttcagcctgggtgacagaatgagaccttgtctctaggaaaaaaaaaaaaaaaaaaaaaaaggtgctgcgttgctaccagattaaaatgtaagaaggacaatgtaatgtttccagagtccggagtgctcaccaggtgccaggtctgtgggagctgatttctacccaccatgaaattgaattttcccaacccccacaaggtatcgtcattttattttactttattttattttattttattttattttattttattttattttatgttacgttatgttattttattttgagacggagtcttattctgtcacccaggctggagtgcagtggcgcgatcttggctcactgcaccctctgcctcctgggttcaggtgattctcctgcctcagcctccggaatagctgggattacagtaatgtgccatcatgcccgggtaattttttttttttttttttttttttttgagacggagtctcgctctgtcgcccaggctggagtgcagtggcgcgatctcggctcactgcaagctccgcctcccgggttcacgccattctcctgcctcagcctcccgcgtagctgggactacaggcgcccgccaccacgcccggctaatttttttgtgttttttagtagagacggggtttcaccatgttggccaggttggtctcgaactcctaacctcaggtgatctgccctccttggcctcccaaagtgccgggattacaggcgtgagccaccatgcccggcccaggtatcatcattctagagagagctaacaggacttgtgcaggtcactcagccagagagggtgaaagaggggcttggatccttggtgtctgcccaggctgctcttctggaagctgaaggcctccttttgtgaatccattcagccagcagatggagcagctgttgcccctggtgagggcactgtccccacccttgcacagggcaccagttggccatcttgtgcagaggtagccacacctcctctgagtctctatcctagatagctcagttaagctcccaggcccagaactcaaaacctcactgctggccgggcgtggtggctcacacctgtaatcccagcactttgtgaggccgaggcgggtgtatcacttgaggtcaggagtttgagaccagcctggccaacgtggtgaaaccccgtctctactaaaaatacaaaaaattagcaaggcgtggtggcgcacgcctgtaatcccagctactcgggaggctgaggcaggagaattgcttgaacccagaggcggaggttgcagtgagccgagattgtgtcactgcattacagcctgggcaacaagagtgaaactccacctcaaaaaaacaaaacaaaacaaaaaccctcactgcactttagtttccaggcgtgcttttggacagcactgtctcatctcaccatcactctgtccatttcctggggcaggcacagcagcttgtgtcgataaggatattgacgcccagaaaggttaagtgaattgcctgaggctagtgagatatccgtgttctgtgaccctttcctgtgccaccaccctgcccacttcctgctggtgtggccctggggcccatctcttgtacgagtgagcaaactgaacagaaacctgatacaggtcacatcagatataattacattcaaatcagcccaactagctgagtggcgggaatgctcttgagctcaaataaaccagaaagtccgagtttccgagtgcacttccctgcatgtgcacttaggtccccctgccaccttgtaccacacctgctcacctctgctcaccctggccctctcctgcagctgtgccaattgcgcggagaacgaggagggctgcacacccctgcacctggcctgccgcaagggtgatggggagatcctggtggagctggtgcagtactgccacactcagatggatgtcaccgactacaagggagagaccgtcttccattatgctgtccagggtgacaattctcaggtgctgcaggtgagcagggggaggggcagggtgactggtactgatacctcccggtgtccacggttccctttgggcccctaggctcaggtgtcactctcaggcctctcactgtcccccattggtccttgaggcctgagctccttcatggagggtgcagacccctccctggctcttccctcccagcccttttccaggagccacgtcctcagtctctttgcttgataaacctggggacggcctccaacccagcaaaataaaccccaaaaaaggcccagctccagtcagttagttcagttccacttttcctgagcacaaactgtgagccagatgcctgcctggaggggctcgtgggccagcgggacctgggcttaaccttttgcaagcttgtccaatctgtggccctgcaggctgcatgcagcccaggacggctttgaatgtggcccaacacaaattcacaaactttcttaaaacattatgagatccatgcatggaccttttttttagatcagctgttgttagcgttcatgtattttatgtgtgacccaagacaattcttctgatgtggcccagggaggccaaaatattggacaaccctattttacaggaattcaaaccaagcaaaccaaactgtctccagttcctgtaggcatttgtgccagaggccctcctgttaacgtttttgattacctgggcaaaagatgtgattttttaattgtgggcaagcagatggggtgatactattaaatagctatttcatatattagattgaacagaaaaggcaggatgttggattatgttttattgtctagaattagaaaattcttctaaagatcatgttctctctgccttggcatcagaatgcaactacgttataccagaaaatgtggattcctttttttttttttttttttttttttttgagacagagtttccctatgtctcccaggctagagtgcagtggtgcgatctcggctcactgcaacctccacctcctgggttgaagtgatgctcgtgcctcagcttcctgagtagctgggattacaggcatgtgccaccatgcctgggtagtttccgtatttttagtagggatggggttttgccatgttgcccaggctggtctccaactcctggccttaagtgatccacctgcctcagcctcccaaaatgccgggattacaggtgtgagccactgtgcccggcccagaaaatgtggattcatatcttatgcttcttgctctcagggaagggaattctccacccactgttgaactccactttcaccgagaatcctctgcgcacccagcatggtgccgcgcagaccctgcctccatgcgggggtgtgcacacccgcttctcgatagtcatgcacgactgcagctgtcctttatccggtgctgattggtgcctgaccttgaactgagtgttgtatgtgttccagttaattcttagaatacactcatggggtggaggtcattattcccctttcctctccgaagaaactgaggttcagtgttgttaattaagaagcgtgcccagggagggccacaaagctgagagagtggggcttgaccttacattggcctcgatgccagccctttgctcttcctgctgtgtctctggcctgccttcaggtccagtgggactgctgtgaggtgaccctggtgtcacatgggtacactgtggttgtaatgaacctcatggggacagcactgagccaaaagtgagacagtaaaaccctcctagcactttcttttttttgagacagcatctagctctgtcgcccaggctggagtgcagtggtgtgattgtggctcactgcagcctcaacctcctggactcaggtgatcctcccacctcagcctcctgagcagctgggactacaggctcgtgccaccacatgggctaattttttttttttttgagacggagtcttgctctgtcgcccaggctggagtgcagtggcgcgatcttggctcactgcaagctctgcctcccgggttcatgccatcctcctgcctcagcctccagagtagctgggactacaggcgcccgccaccacacccggctaattttttttgtatttttagtagagacagggtttcaccgtgttcgccaggatggtcttggtctcctgaccttgtgatccgcctgcctcggcctcccaaagtgctgggattacaggcgtgagccaccacacccaggccacgccagctaatttttaaaatttttttggtaaagatggggtctccctatgttgccgaggctggtatcacactcttggtctcaagtgatcctctcacctcccagtgtgttggaattacaagcatgagccactgcgcctggcccctggctctctttttaatactgctgttctttcattgaaaacatagtacctgcatgtagaaaaaaatcagtcaggacagaatgaaaagcaagaatcattcccacctggacccccagtgcccatcctgagatacagctaccttttaagttccttgactcagaaatgtttcatgtgagccacagtcatgccaggtcgaccccttccctcccatccacactggcacttggctttcctggtgcttctctttacgttctttttttttagacagagtttttgctctattgcccaggctagagtgcaatgatgcaatctcagctcactgcaacctctgcctcctgggttcaagcgattctctttcctcaggttcctgagtagctgggattacaggtgcctgccaccatgcccggctaatttttgtatcgttagaagagacgacatttcaccatgttggccaggctggtctcaaactcttgacctcaggtgatccacccaccttggcctcccaaagtgctaggattacaggcatgagccactgcgcccggcctctttacgttcttatcagcatcctatggagtcaaacttcccttcctctttcatcagctccttggaaggaacgcagtggctggcctgaaccaggtgaataaccaagggctgaccccgctgcacctggcctgccagctggggaagcaggagatggtccgcgtgctgctgctgtgcaatgctcggtgcaacatcatgggccccaacggctaccccatccactcggccatgaagttctctcagaaggggtaagacctcctcccctccccatctgctggcctgctgggctccagctctcctgtcacctgtcccgtgcctgaggcaagcagtatccaccatagatcttagcatctccagcctcagagcagaggccccgggttcacaagcctcattaggccccgcctggcccaaagaaggtgctccatcattgtatcatgggtaggaatctcggttcacaagttcagctgtgcaaggaggagactttaaaatttttctggctgggcgcggtgtctcacgcctgtaatcccaacactttgggaggctgaggtgggcagatcacctgaggtcgggagttcgagaccagcctgaccaacatgaagaaaccccatctctactaaaaaatacaaaattagctgggcgtggtgacacatgcctgtaatcccagctacttggaaggctgaggcaggagaatcggttgaacccgggaggcggaggttgcagtgagccgagatcgcaccgttgcactccagcctgggcaataagagcgaaactgtctcaaaaaataaataaataaataaataaataaataaataaaaataaatttatttaatgtaccttaattcctaggagtgaatctccctctataaaactggagacaaccaatcttagccctctttggggtctcctctttccagctcccctccaggtggtgctccagttctggagtctgatgcaaccccaaggcccacctggcccctcctctaacccagcccagcctgatctgaacagccccccgatggcttcagtgctccttggtttcttgtgtgcccagctcaaagcctgggaaatgcttggtaaggtggccgagtgcccgtccacctagatgcctctttcctttctggctggtggcacgttgggaggcaggtacaggctcatgttttgggagcctgggaacccctggtgtcaggaaaattgtcttcaaaggggtaggggatgagataaaaagataaatgaatatctcaaatctcaaaatactatctaggccaggcgcggtggctcacacctgtaatcccagcagtttgggaggccaaggtgggtggatcacctgaagtcaggagttcgagaccagcctgaccaatatggtgaaaccctgtctctactaaaaatacaaaaattagccaggtgtggtggtgtgtgcctgtagtcccagctactcaggaggctgagacaggagaattgtttgaaactgggaggcagaggttgcagtgatttgagattgtgccacagcactccagccagggcgacagaacaagactccatctcaagaaaaaaaatactatctaacaggaacaacatctagaatgaatgaatgagccaatgagtccttcgatcctggcactgtgctaaagcaccagcctcaccgaaatgaataagccactccaggacaggagacaccccagccacccagaatctcatagcgcagtgccagacaagcagtgagaaggcatggacgggcagcactcaggcagggaggctggcacttgtgcctgtcctcaggttgttccttcctctgggagctgcatccaccttgctagccccatggggcattgctagcccttctaagggctggaccaagcctggacaaaccctcctttccttgaatctcccaagcacagccagaatgagctagagctttcagaaatacttgaccaaacagagaagataccaacacccccagccccgcagtcaggttccccatttgcaggttgtgacctgagtggacaccaggtgatgctcttctctacccagagggctggcacatggccccactcttgcttgtctccagccaccctgagctgtactgggcaggagctgtaattgaccagttttctctctcttcaaacaacctcagccctcaccggtccctctgtccccacacaggccatcctgggtgggtccagcgtcccatcacataagaggatctttgcacagaagacaaaggaagaggctcctaccttgagtggagcagggagatcccttatcgacttggcagccagcacagccctactccaagaatcccacggcctcagtgttactgacaagtggttccctcacagctcagactaggagctccctcgctgtttttctttttcttttcttttctttgttttgtttttgagacagagtttcactctgtcacccaggctggagtgcaatggcatgatcttggctcactgcaacctctgcctcccaggttcaactgattctcctgcctcagcctcccaaggagctgggattacaggtgtgcgccactatgcccagctaatttttgtatttttagtagagatggggtttcatcatgttgaccaggctagtcttgaactcctgacctcaggtgatctacttgcctcgccctcccaacatgctgggattacaggcgtgagccaccgcgcctggccacctctgctgtttttcaatgcagctgacctttcccacaaagctcggtttgtgcctgcggttctcagatggttaagcccctgctgaggaagggaaacagataatcccagacagtgagatggaggctgagactgaggatgcctgggggctgcactaggagctcagagacggcatcaggcagctggagttcagggaaggtttgggggcagcagagcccgagccaagccatggacactagccggagctggccactcgggtgaagacttggggggctccagagggcccagggaaagaagctgggcctgactccatgtgcctagtgctgagcaccaagcgctggcataagggctgtagggagctgggcagcataaatcctgggcctgtgctgggcacccctaataatagagaacagcagctgaacactaacgctgtcccagccaccggcttagccttcatgtgggctatttcactatagcccagagagctgatgtattttattccccctctaaagctgagggccaagtgtggtggctcatgcctctaatcccagcactttgggaggctgaggcaggaggatcgcttgagcctaggagtttgaggctacagtgagctatgatcatgccattgccctccagcctgggtgacaaagggaaatcctgtctcaaacaaacaaacaaaaaacagatgaggaaaccagggcttagagagattaagtaatttgctcaaagtcaggcagtcagtaagtgccagacctgggaattaaacccatgtgggctgtcctagtaattgcactaaaaaaaaaaaaaaaaaaaagctttattgagatatagttcctattccatacaatccacctattgaaagtatacaatgattctgatatattatgtttattttttccaactgtgatagattatatataacataaaatttgccattttaaccacttttgttttttgtttttgagacagagtttcgctctcgttgctcaggctggagtgcaatggtgtgatctcggcttaccgttacctccacctcccgggttcaagtgattctcctgcctcagcctcccgagtagtagctgggattacaggcatgcaccaccatgcccagttaattttgtattttttagtagagacagggtttctccatgttggtcaggctggtctcgaactcccgacctcaggtgatccacccaccttggcctcccaaagtgctgggattacaggcgtgagccaccacacccggcccattttaaccacttttaagtgtacaattcggtggttttaatcacatttacaatgttgtccaaccattacccctttctaaaacttttcttatcacctcaaacagaaactgtaaccattaataactcccgattctcccctccccacagcccccgataagtcccatatcctctctgtctctcagaacttgcctgttctagaacctcgtatcagtgaaatcatacagcgtttgtccttttgtgcctggcttatttcacttagcatgatgtcttcaaggctcatccatgttgcagcacgtatcagaatttcctttctttttaaggcagaatactattttgtttatccattcagtccttcactgatagacgcctgggttgtttccaccttttgtctgttgtgaagaatgctgctgtgtacatgggtctgcaaatgtccattcaagtccctgcattccgtcctttgatacttccgacctcaggtgatccgcctgcctcagcctcccaaagtgttgggattacaggcgtgagacaccgcgcccagccagaaaaattttaaagtcttctccttgcacagctgaacttgtgaaccgagattcctacccatgatacaatgatggagcactttctttgggccaggcggggcctaatgaggcttgtgaacccggggcctctgctctgaggctggagatgctaagatctctggtggacactgcttgcctcaggcaccgagtagaaagcaattgtgctctttcccactctgtcatactgcttcctatagcatgcaggtcactgtgtgactcactgacagtgtggtaaggaggtggagggtggctgtgtgccaggcacagaactgggctctgaaatgcctggtcttccttacaccccagccactcctctcagcactctctccatgttgctcagcttctggaggccaccagtgaggaagctggggcttgacttcaagcccatctgactctaaagccagtaccagggagggtgatcattgctggtggcagcatcaggaaggcttcctggaggagggggttagttgtgccttgaggggctcagtacagccttaaccatggtgagtgtgctggttgggtttgctgaactttgtttgcagtgatgctctctgtaagcagtagatgaagctccaagtcctggcttcatcccacgccacgcagaccctagcttctgctcaccaaccggggcccctctctcaccaggtgtgcggagatgatcatcagcatggacagcagccagatccacagcaaagacccccgttacggagccagccccctccactgggccaagaacgcagaggtgagtggatcctgaggtgggtgggtggggcagggggccgggccccgcaggtcctcagggccctcaggaagcaggttcccgagaggaccctgaggctagcacttgggggctgaccttgcagtgggtgtgcaggcagagaagtccatgaagagctgggatcctggcagggctctgctgctctctggctgggcggggggatccgccctgtgcctcagtttcctcatccatgaattctgctttggcgatgtgatgaagtcagcaaggcagtgtgtgacaaaactcggcacaaattgtaaagtgcttcccaaatagaaggtggcgtgatgatgattgtattattagtcaggattctctagagggccagaactaacaggagatatatatatagagagagaggggggtttatttttttattttattttttttgagacggagtctcgctctgtcgcccaggctggagtgcagtggcacaatcttggctcactgcaagctctgcctcccaggttcatgccattctcctgcctcagcctcctgagtagctgggactacaggcgcccgccaccacacccggctaatttttttgtatttttagtagagacgaggtttcaccgtgttagccaggatggtctcgatctcctgacctcgtgatctgcctgccttggcctcccaaagtgctgggattataggcgtgagccaccgtgcctggcctaaagggggatttattaaggagcattaactcacacgatcacaaggtcccacaataggccatcgcaagctgaggagcaaggaagccagtccaagtcccagagctgaaggacttggagtctgatgtttgagggcaggaagcatccagcacgggagaaagatgtaggctgggaggctaagccagtctagccttttcacatttttttctgcctgctttatattctggccgtgctggcagctgattagatggtgcccacccagattaagggtaggtctgccttcccctactgactcaaatgttaatctccgttagcagcaccctctcagacacacccagggtcaatactttacatccttcaatccaatcaagttgacactcattattaaccatcaagatgatgatgatgatgatggatgatgatggtggtggtggtggtgctgggcctagctgcacacacagggagcctggctgggcatctcctctgagttcttcccctaagctaagctctgtcctcctgggaggatggaggcctctggtctcatcaccaggaagcacagcttgacagagaatgggatgccccagagttcatggcctacttctcaatgtgatgggccaggagggagggcactgccagcctcagggtacctctgcattccaggagccggacaccgagtcaggcccttccgtgtaggtttggtcactcattgtcatcacatgctgtgaggtggggacttgcattcccatcttcacagaagccctgaagtgcacatggctacagtgacccatccaagcgcaggcagctgggatgagtgaagctgggctttgggctcaggtctgtgactccaaagccaggctcccctccctgttcccaaggctctgccagggatgtgcattgccaaggcccagtgagaggtgatacctttgcagggttccagggagggatgcagggagcggggtgcttcaggacaggccccagaggagcctttgcaaggagagtgggttctgttggcactaggaaaggaccagaagcctcttaaaacagtcagcacatctttggctttttgtccctagtcttgggatgctgatgggatgggaggcagtctaggcccccctagaactggggcctgcccctggaatcctcttgctagcgctttccaacatcccagtacctgtaggcctctcagagcagaagtggcagtgcccacgtgtcccggggtgcggcagctccccgagtgcctgtgctaactcagcctgaccgtctcccgcagatggcccgcatgctgctgaaacggggctgcaacgtgaacagcaccagctccgcggggaacacggccctgcacgtggcggtgatgcgcaaccgcttcgactgtgccatagtgctgctgacccacggggccaacgcggatgcccgcggagagcacggcaacaccccgctgcacctggccatgtcggtgagcccaggaccgcgtgtcctgccctgtggggccccggtgggaatgcaggagggctgtccggactggagccctcctccccactgtctccctcctatcgtcagctgctccaaatcatcttcccacccaaagctcagttcagaccctgactcctccctcaggaagccttccaagtccccctctcagcccaaaataacaccacctcctgtgtgctgtggtaccttttccacctgtgcccccatttggcacttgcatggcacgagagggaaaaatgacagctctggccatagactggccctgagcaagccatgtcacctgtcagcctcgatttcctcatctggaaaatggtggtgtcaatacttatctggaagagttgtggaaaagttatggtggacacttggtcaccctctacagaatgtctaagtgacacacgcagtacctggcccgagtgagcatcctgcttcccttcactggtccgcgtgttgctctcatcttccctgggaggctgtaagatcctggcaggcaaagcctgagtgtgcagcccagcagcctgtggcaggtgccaggcatattcgttggtttattatagaacacagttcctgccctcaaagcccttactgtctggttacacatctagagtatgaacatattaaacctagcagaggaggacgttactgtgttacagacatatgtgtgtgcatgtattcttttttttcgagatggagtctcgcactgtcgcccaggctggagtgcagtggcgcgatctcggctcaccacaacctccgcctcccaggttcaagcgattctcctgcctcagcctcccaagtagctgggactgcaggcacgtgccaccatgcccagctaatttttgtatttttagtagagacggggtttcaccacgttggccaggctggtctcgaactcctgtgttggccaggctggtctcaaactcctgacctcatgatccacccgccttggcaccccaaagtgctgggattacaggcgtgagccaccgcgccccaccgtgtgcacgttttctatagcaataccgtatgtacagaagtctgtttactgagtctcagtgacagaacatgagagacccccgggactctaaaagctgattcaggacacattcagagacatcctgttttataccaaaggtcaaaacttggaagagatgttgttgcccaaaaggctgaaactataaatagtttcatttttgaaactgtggacatttttagcactgggtgggcccttggaatgatctaactcagcagttctcaagttttttggcctatttgatccctttatactctgaaaaattattgaggatcacaaagattttttaatcatctggattttctttatctatatttaccattttagaaatttaaagtgtgaaaatttcaaaatattaattcatttaaaaataacaataataaatatatatgcctactatgtacccacaaaaattaaaattaaaaattttttaaaaaacttaaaaaataactggccagctgcagtggctcgtgtacaccagcactttgggaggccaagatggtcagatcacctgaggccaggagttcgagaccagcctggccaacatggcgaaagcccatctctactaaaaatgcaaaattagctgggtgtgagacctctgaaagggtatcacgtgttcacaggggtccccaggtcttactttaagaactgctgatagactttggtcatcttcatcccatcttcacagtttttggcatattcatcaaccacctttacaattatgtacttaatcacctcttcaaattggcttacttttatttatttattttgagacagagtttcgcttttgttgcccaggctggagtgcaatggcacgatcttggctcaccgcaacctctgcctcctgggttcaagcgattctcctgcctcagcttcccgagtagctgggattacgttcatgcgccaccacacctggctaattttgtatttttagtagagacggggtttctccatgttggtcaggctggtcttgaactcctgacctcaggtgttccacctgcctcagcctcccaaactgctgggattacaagcgtgagccaccgtgcccggcctggcttacttttaaactgacttaaatttattttgagagaaatgttgcatcactaccataaatggccatccatccatccagtgccaaccataaaaggtaaccaatgcagggcgcggtggctcacgcctgtaatcccagcattttgggaggccgaggtgggcgaatcacgaggtcaggagttcaagaccagcctggccaacatggtgaaaccctgtctctactaaaaatacaaaaaattagctgggcgtagtggtgggcacctgtaataccagctactctggaggctgaggcaggagaattgcttgaactcggtaggtagaggttgcagtgagctgagatcacgccactgcactccagcctgggtgacagagtgagactccgtctcaaaaaaaacaaaacaaaacagtaacaacaacaaaaaatcacagttaatgctgaaaacacacacatatctgtagccatagaagtcctaatagaatgtgaagaactgtttggaaaaccccattctagacccacagcttcattctctaggcagggaaatcgggtcccaagaagaggaaggtgacaaggccagagcccacagttccaggtggccagtgtgtcctctgaaaccatgccatgctctgcgcccctgcccggcctccaggtgtggaaatgtgtgacgttcttcgtggggacactcccccgaaggctgccattaggggcacgtgtgttcggttacccctcagggatgacaccctggactgggtgggcaagatggccttccctgccctcacccaccctctccttgctactcctgaaagccatcagcagctgacctactgtgtccccatggctcctgggtcggggtcacagatgcactgcatctttggaggcggagctggcagagcaggggcgagtcacttctagtttctgcctgggttcttacaccctcccctgtgggtgcttttaagcctgtttgtcaggtccccagccatcaaatggcagactttggactaccagattgacttgggtgggggtgaggagggttccagtgtctccccgtgctgaggagaggcccgctgggtgagttgacaggttggggctggcagccaggggcccctttgttcttcacttccccggcagttgcacgtcttatcctctctccatctccaacagaaagacaacgtggagatgatcaaggccctcatcgtgttcggagcagaagtggacaccccgaatgactttggggagactcctacattcctagcctccaaaatcggcagacgtatgtgctctgcactctggggctggagtggggtgagggttgggtggatacagggaccgaggaggagggaagtcccaggcatcaggtgccagcatcctgtgctgacccgccctgctcagagctgccaggagcacctcgtactcagagagggggcttccttacccaagcacaagggccctgagcagtagatgcaggcccaccacggggcttgctataccagcatcctctcccgtgcagcgccccccacctcagggagctaagattcccagcaggggtggggacaggagagccagcagcagccttctttccccaccgttggggaattcactgatggaaccactggctagaatgaccaagggtgcatgcactacactgcacgagctctgggcatgcctgtgtgggcagagtgcatggccatgtgctgcacgctcgcacagtgagccttagcttcagagctggacagagcagatcctcctcaccagaggcctggagcccgctctggagggtttcagcagctgtgggggtcactgtgggcaggtacctgatggcagcagtgtgtgtgtgccagtgcacacgtgtgtgtctgcatgcaccgcatctatgacctccttttcagcaatcccatccatcaaatggagtaggtgccccctggctggctcattagtccctttggaaccctgaactatcacttagcatttttgagaatcactgaatgtggccatgggattcctgctttcttggctggagtagaaggaaagaaggggttcccacaggcatcgggcagggtgacactgacctcctcctcccatatcctccttccctggccttaggaagctgcttgggatgtaccagcctgggggcagcactccctgtcagggtgggctgaggcctctggagcagcccacgtgcccagggcctgggagctgggacaggggacggagtgtggaaaggaggggcctctcctttgcatgttgacatcatttctgatcctgtgccatctccccttccccaaaccatgacaagttgtcaccaggaaggcgatcttgactctgctgagaaccgtgggggccgaatactgcttcccacccatccacggggtccccgcggagcagggctctgcagcgccacatcatcccttctccctggaaagagctcagcccccaccgatcagcctaaacaacctaggtaggcctcgcctcccgactccctcttctccagctggttcccaggcccctggatcacagcaggccccaccaaagcaacaggatccctaggacggaagtcactaaaggaagccggggaggatggggccggagttgtcagcctctaggcagccagcaacccacagatcccagaggcctagggtgtccctggctgatgtcccatgctccgttgcccctgagaggatgtgtcctgcacacagtctcaggcctgggcatttccagtggcacccatgaggtggctgctgttactgccctcctgtccccagggcgttcagggtgggcagtgaggagtgctgtcgggggactgggggcccgggccctctggcttcacctgtccctctggcttcacctctatcacactgtttgaatctcggttgggcctgagacctgtgtgcccccttcctggccccgtggtgactttcagacgttgaatgtggccaggcagccagcatctgccccggtgcattccttggtgcccagggagacatccccagactagacaggacccttctctggactttctgtgggctggcccactcagggacctccattgtttgggagcggggtcccctgaacagagggcagccaggagccagtccttggtgagccagacttcactgtggaggcggcagcaccttcagccagggtagcccgaccaagcctggaactctggagaggcaccgtgactgtggcttctagtcctggctccacctctctctcccctcccaggaactccccctccacctcccatctttatctctcaattttgcaggcagtcacccaagccaggccggatggtgggcctggggtgcggcgtcagatgggtaacgccctgggcctggagaggccaccgagcctagccatgcggcattagctctagctctcactccctaatccgtccttcttagctgcgcacacaccacacgccccctcccctgcaccctgtccccggcctctctcagccactcttctgcttcccttgttcactgtggagccgtgtgccctggggagggggagacaccgcttcgcagccctcggttctgctttgctgcttctagactctgcacagtggtggggggctgtcagagttggggtcacgcgggctgctgcaccaggcacctggggactgggctgcttgtcaggaggggcagctagtcagttgggtggacgtcaggcaggccttggacacaaaggaagacatggacagagtggatggtgggcctgatcccggaggccactgggatttccagacctgggatcaggacgagggatgtctcctttcatccatggacttaaaccccgaggaacgtcctgactcagccttttgactaaatgaccttgggtgaattatggaccctcttagagcctcacctgtcaatagggaataagaattcttaggccccaggtggttattgcagcatcggctccgatgcaagaagaagcactttgtctgaagaggacacgcaagggtattcatgccttggggtttcaagaggaagagattgaggggaacctgggagctggctgggcagggtggggagcccttcccagagcagtgggcccccctttccactccagcccatttctctcctgtggcctgtggctcagctttctcctgggacagagtccttcctgtggggaagggacagatgacagggggagtggggggatgagggcgtggccgtgggcgaggcacagcccaggtttgatctagggacctctggggtagcagggcttggggacccacctgaccacagcatgccctgctctgtgcctcacagaactacaggatctcatgcacatctcacgggcccggaagccagcgttcatcctgggctccatgagggacgagaagcggacgtaagtggatcgagatcgggggcagagcggggaacgtgtgcgctttcctgcccctcacccaccccctgttgtgggctcagggctttactctctgcaccctcacagccggcgaagtggctctgctcctagtcttatagttctcagcagagacagaacatggagagcctgtgtcgctcgttcattaatgctgggcggtgcaggctctggagaccagcccagggtgccaggcttcttggacttggtggggctggcgcagtgttctggcctccctccctgatctccttatggctagaagagggggagatgcctgggtcccccctggggagatctcagcagctgcttcccactgctcctactggcttccttaaccacctcccactgcagaatagtggcgtgggctgccttccccagcacctgctgtatacctagtcccattgtaagaggcgggcctgggtgacaggatgcaaagagaagacgcccaggccttgcccttcaggcataatcccgggtgcttgaactcagtgccagctggcacggcaaggtaccaggacaaatgcgtttccagccactgtgctgtcgccacctcccttgattgctgcagttgattcatttattctttattagtctctcatgttcctaatagccttcccagggaggaatttgtaaccttgttttacagatgcagaacctgagcccctgagaggtgaagtgacttgctcaaggtcacacggagtgagtgtcagggtggcaactcacagccgggtcttccgaacccacgtcctttgtgctaccgcaggctctctctgggttctctgtggactctatacctagtgccagccctctgcagggaaagctctcttctcagaatcagaggcagctccactcccagggccaggcagtgatcgtgcagctctgtgggtcctctcacttcgcactcacttccatgctaccctgttgtgtgccctggaggttcccctgccccatcagcattccctcccctgtgccccctgcatgctcttgcacgcgggcacacgcacacacacacgcacacatgcacgcacacacacccacatgcacatgcctgcgggttgcccacatgcatgtgttgcccacatgcaaacacatggacacgcacacacatgcacacatgcaaacacacgtgcatgcacacacatacacatgcgcacacatacacatgcatgcatgcacatggacacccacacacatgcacacacatgtacacacatgcatgtacatacacacacctgtgcaggggctgaggtgaggcagctgcacctgaaggggggacccacatttcccaagggaggaaaagcagattccccagattctggagcctcagaaccctgcctggagcggggctgaggcaagagtcaggagacccctcggtagctccccacttgggccttccaagctacagagccctgcgccctctgggttgatctctgtcgccagccccgcatcttcgggagtttgctttggcctccagcaacagtgtagtctctcccctgccacctctaggcttgctgtggggctgggtacctggtccaggaaaagacccctagaggtgggacccgggcctcctccatttatcagccctcttgggcacctcctgcatccccttgacacacagcgctgcccagagcagaggcggcttctgccctggtggagcttccaggtcagcgcaggagagagtaaaagaaagattgcgaatggaatggaagcagcctccaccaggaagcaggtggagcagcaggcgggctgtgagggagggtctcgatggcatcagggcaggcttctctcagcttcatcaagctgagatgggaagatgagaagatcagaggaaggttccagactgaaccaaccacaaaggcattcccccagggcatggccaatgaggacaggcaggatgtggggagacgtgtcagggcgcgctggagagcatgtgactcaggaggcggcagacctgggtccaggtccagtccgcatccatatgacttggttcccgtcacctaacctctgagctacactccctccgtcactcaaaaatatgcacagagagtaggcgcagtggctcctgcctgtagtcccagctactcgggaggatcacttgagctcagaaggttgaggctgccgtgaactgtgattgcaccaccacacaccagcctgggtgacagagtgagaccctgtctctataaataaataaataaataaataaggctgggcacggtggctcgtgcctgtaatcccagcactttgggaggccgagacaggcggatcacatgaggtcgggagttcaagaccagcctggccaacatggagaaaccccgtctctattaaaaatacaaaattagctgggtgtggtggcgggcacctgtgatcccagctactcgggaggttgaggcaggagaatcgtttgaacccgggaggcagaggttgcggtgagccgagatcgcgttattgcactccagcctgggcaacaagagtgaaactccgtctctaaataaataagcacagggatgtcagggagggtctgcctcagaggcgtttgggacaatgacatgagctaatgctggtagcacccctcccatagcccctggcatgaacctctcccttcctccctgccccctcctcccctgcttcttccaccttgtgtggaggccctgatactctgtcactgcccattcctggcctggctgtagggtccccgcccctccttccccagccttatttaattccaacagactttatcaggcacctgctttggatcaggcctgatactgaccaaaatcaggtgtcccaagttggggagactggccgagatcctgctgggatggcgcctggtcagtgatgctatcccccgaccttcctttccctttctctgttgcactctccagcccctgaaatactagacatttgttcctttactgccctcacccccaccctcgctgtcctgcataggacagaagttcctcgggtccgtctgggtctgtctgccaggacacagctgcaggggacaagggctatgagggtggatgtaaagtactgggctgtggcaggaccctcctctctcccactgctgttcccactgcagccacgaccacctgctgtgcctggatggaggaggagtgaaaggcctcatcatcatccagctcctcatcgccatcgagaaggcctcgggtgtggccaccaaggacctgtttgactgggtggcgggcaccagcactggaggcatcctggccctggccattctgcacagtgagggcggcccctggggatggggccaggcggggctgagacctgtgtcctcaaggggccgagtttgtcttcagggctttgcaaaaagagagtggaggagtagaggagggctataagcactttgaggaggcaggggcggggctgcaggtgctgaggtcccaggctggaaggagaagggctgggcccatgggcttgggtttggggatcccccgccctctggccacagagggtagagctggctgtgtgaaattttggcataggaagcgtttcctatcgactgccttaacccctcctcccctcacccctgcaaagcaggcaccaggggccacacagcctgctgcacataaggaatcccattcccagggtgcacgcagcaggcagtctcaggaatgaggagccactgagcctcaggatgccagagccctcgcctgcacacttcattttactgggaaattttactgggaaattaagttcccaggtggggagggatgacgtgaagtcacatagctcatccatggggtcgctgggctggagcacagtcccctagactcccagcctggcacctcctaggccacagggcactgtgtagtctcctttcactgccgctttgcgaaggcgcctggcttgctggacagatagccgggtggtcagtgttgtgacggctcctctgtggagctgtctgagcttctaggtgctgacaggtggggaggggcactgccagatcagggtcctcagctccccccaaccccctggacattgtcctgggactcaacatgtctgactggtgcccctgcccctgtgctggtcagattccattttctccagagcgcccccacatctggatcctggtcatgcaaagtcttggaggtgcccggggaggactccccaccctagggtgggtatcagggcctgtgggccaggcctgtgttggatgctggggatgcagagctgagccaggcataccccagcctcaggagcagggggctcagccagtccaggaggtgctggggacagagtcccatgggcggaggaggagagtcatctgtcaagttgccgggacgttagtgtccacggcggtttattgactggtatttcatttccttttgatgattctcaccatagccctgcggggtgagcagatggggaaactgagaaccagagaggatcagccagtgaattgggcagtcaggactgggtctccagcagtgtgcccagctctctaccccagcctcagggtcccagcatcccctctctggtcttccacagggtccaagggcgggcacgaggtctgagcaggcagactgggcagagtcctagcttcttctccaaaagggccacgtccttcttcagggaccatttcttccccatccggggtcttgagactcccaggggccatggaggggatttgagaggtctcctggctgatcctccggtgtgggcagatggcctcctttcagctaccctctgcttgtacatccctggccctggggaactcactgcctcacgggggaagtggggcagcttctccttcctggaggtgcagccggccccttggccctgtctgttctgaaggctcaaaggacagggctattccttgttttctgtgacaaacaacgtgggtctagcttttataagcttttactcttgaggggctcttctttaaggaaaataatacaaaatcatgaatacaagatgaagtgcagagccgtggggcttcagtggtttttgagtctctccgttgcccaggctggagtgcagtggtgcatcttggctcactgcaacctccgctcccgggttcaagcgattctcctgcctctcagcctcccgagtagctgggactacaggcgcccgccaccacacctggcgaatttttgtatttttaatagacggggtttcaccatgttgggcaggctggtctcaaactcctgacctcaagtgatccacctgcctcagcctcccaaagtgctgggattacaggcgcgagccaccatgtccagccggaaggaggtttctctctgtctgtctgggaggttgcaaaggaagggcccagaatttgggtttgcttaggcctcggtaaacccgcttcctcctgccacctcctgcgttcaggcgctctgcaggctgttctacgggagccctgcgtgtggccgctgcatctccccgcctctgacccctttgttcctaggtaagtccatggcctacatgcgcggcatgtactttcgcatgaaggatgaggtgttccggggctccaggccctacgagtcggggcccctggaggagttcctgaagcgggagtttggggagcacaccaagatgacggacgtcaggaaacccaagtaagccctggcgcactggggccgtggccgcagctgtgcccactgtggctgttccctggggacagagggctccctgtcctgctgagggagggggaagagcgccccacgcttgaggggagcagagggaacccccttcccagggaggcagagggctggggtgtggctctcacttgggcatgcagacacctgctgagcgcaggaggggcgtggcctggtgggcctggctctgccctgcctggctctgccctgcccggctctgccctgccggctctgccctgcctggctctgccctgcccggccaggggtctggggcttgcctggagagagcctgggccacccttctctgagaccacctgggcagaggctgggtttttgctgcccaggcaaaaggaacccactggcctttcaaatgacacggctaaacattttctcacatttcagacagcactcgctcccaggatcggactactaggttataatcagagggcttcagtcttacctttaatttaaggcctacaagacttgaactaatttaagtcagactgaaggagaaagtcacatttccaggaaacatttgtttgggaagcccaaatcctaggactaagcaatgcatcccgttcggggctggatgaatggtgtgttccaagaggagtgttttgagcatttctgagtgattttttcatattttgaaagtgagtgtcccccagtcttaggggcccggcatcccctctgcggtcttccctagggtccaaggccagggaccttcaatcttttttcccactctgtggcttgtctttctgctctgtggtgtttctaggtttttgttttttgttttttgttttggttttggttttggtggcccatgttcttaatgaggtagataatatttataaatatttttcttcttgtagtttgtgattttttcctttctttctttcttttttttgaaacagggtcttgctgtggggcccatgctggagtatattgctgtgaacacggcttactgcagcctcgacctcctgggttcaagcagtcctcccatctcagccgcctgagtgcctgggactactagcatgtgccaacacatgtattttttgtagagatggggtttcaccatgttgtccaggctagtcttgaactcctgagctgaggcgatcctcccgccttggtttcccattacaggcatcagccaccatgcccagcctagtttgtgctttttatttctcgttcataaacccctttgctgcccccaagcagcacacgattctcctgtgtcgagctggaaagctctctagatctgccttttacattgaggtcttttatcaacctggaattgatttttgtatgagggtgaaatccaagatccaatttaatgttttccacgtgattggccaatttttcccagccccatctgtgaagtctgtccttccctccgcttcctcagcagtgggtcaagcatccctctgctcttggatctgctccaggctgtgttttgttccactggttggaaagctgtctctgtgcccggaccacagagcataaaaaactaccgctgtgtggtgagtcctggtgtctgggtggcagatcctccaccttggccttcttcaaaaacatcatggctattcttgggggcagtagagagaagtggatacaagcatagaccctgaagtttctacctcttctcaaaaataggaatatgccaggcatggtggctcaagcctgtaatcccagctctttgggaggctgaggcaggaggatcacttgaggccaggaggtcgagaccagcctgggcaacatagtgagaccctcatctctacaaaaaatttaaaactaacaattagctgggcatggtggcactatggctgtagtcccagctaattgagaggctgaggtgggaggatcacttgagccccggaggctgaggctacagtgggctgtgatcccatcactgcactccagcctgggcaatagagtgagaccctgtcttaagacaaaaaaaaaaaaacaaaaacaaacaaactcacaaactataaaaagaaaaaatatttataaattctactccattaagaacatgggtccatccaaataaataaataaaacaaaaacaccataaagggagtaaaaagacaagccacagagtgggagaaaagatttcgaatccatacatccatcaaaggactcattttcaaaatatgaaaagatcattcagaaatgctcaaaatagtaaccaccattttactttctcttcctatgagtttaactgctccaggtactgttaagtaaaatttttaggggataattgatttggaccaggattctgtaccaggcccaacagaagaaacgaatatggagtcattcatgccaagtgaacctagttagcttaggcgtatacccatgtaacaaatagctgagttctggttagctacaacagctaagctttaatcaatcatagatggccacctgattcaaacaaggcaaaccaattaagctccacacctcactttggttttcagcccatcaacactgcctgaccacgttgcaggccagagttctttgaacctattctggttttgtggcctgcctgactctcagttcatcaataaaagccaattaacatctttaaatttgttgcaattttatctttgaccgtaccttatgtaagtggaatcatacagtatttgtctttttgtgactggcttatttctttctttttttttttttttgagatggagtcttgctctatcacccaggctggagtgcagtggcgcgatctcggctcactgcaatttctgcttcccaggttcaagtgattctcctgcctcagcctccggagtagctgggattataggcgtgcaccaccatgcccggctaattttttgtattttagtagagacagggtttcaccatgttggccaggccagtctcaaactcctaacctcgtgatccacccacctcggcctcccaaagtgctgggattacaggggtgagccaccgtgcccggccatgactggcttatttcacttggcatccatgttgtagcgtgtgtcagaatttccttcctttttaaggctgaaaaactccattgtctgttggatacacgttttgcttctccattcatccattgatggatattttagttgtaaattgactgctgtcaatgtcggatgtgcaaatacctgtttgaggcctactctctcttactggtgccttctctagagagaattctgatgggttcagtttgatcatattttgtttaagatttttggccaggcgcagtggctcacgcttgtaatcccagcactttgggaggccgaggtgggcggatcatgaggtcaggagatcaagaccacagtgaaaccccatctctactaaaaatacaaaaaattagccgggcgtggtggcgggcgcctgtagtcccagctactcagagaggctgaggcaggagaatggcgtgaacccgggaggcagatcttgcagtgagccgagattgcgccactgtactacagcctgggcaacagagtgagactccgtctcaaaaaaaagatttttgtgtccacgctcgtgggcgaacttgacccgttttttcctattttgggttttgaggaaatatttcctctttttatttttcttggaagagttagtataatagtttattttgaatttatggtagaacttgatagtaaattcttctaggcctggagtttgcttggtgggaggatttttgatgatggaattaatttctatagtggttgtgagactgaccactcggggtttctaaatacctttttgagttagttttggttaagtgaggtttttctaggaatgtgtccatttcatctaaatctttaagcttattggcttagagttgttcaaaatattctgtttttttttttttttttttttttttgagacggagtttcactcttatcgcccaggctggagtgcaatgacgtgatctcggctcactgcaacctctgcctcctgggttcaagcaattctcttgcttcagcctcccaagtagctgggattacaggcatgcgcaaccacacctaatttttgtattattagtagagacggggtttccccatgttggccaggctggtctcgaactcctgacctcaggtgatccacctgcctcggcctcccaaagtgctgggattacagacatgagccaccatgcccagccgattctcctttttctaacgtctgcagtgtgtgttggtgcggcccccttttctttcctgattttgataacagataacagccatgttttatcagtcttgcaacaggtttttccattggattagcctttcaaaaaaaccaacttttgctgaattgtgcccccaaggttggaccaatctgacactcctccagcactgccggagagagcctgttttgcggggatggtgcggggagaagcccacctatcccgaacagaggttggagtgggcactctgctacccaaggccctggggtgtgaattgtggggaaagggaaaggtggatgggcgggtggctcagccgtcctcctgcctcatttctctccagggtgatgctgacagggacactgtctgaccggcagccggctgaactccacctcttccggaactacgatgctccagaaactgtccgggagcctcgtttcaaccagaacgttaacctcaggcctccagctcagccctcaggtttaaaccatgtttgatgcatccatgggaagcgactggcccgagaggctgtggggtggtgggtgggagtcgtgcacttgccatcaggcaccctcaccgtgccaccagcccacccgctgcactggtctttattggctgaggacagggattgcgggggagctgtcaggcccctggcaggttagaaaagtccctggaaagtcctcagctgtacctgccttccaccaggacgaactagccagagagtgtggcttcgtgggtcctgcttctgaagagttcccagcctcccctcttcccgcacccccagcccccaacacgcacaccctgagatctggagtgcatgggttttatgccagtcccttgtgccactgggccgccctccttccccgcccctagaccagctggtgtggcgggcggcccgaagcagcggggcagctcctacttacttccgacccaatgggcgcttcctggacggtgggctgctggccaacaaccccacgctggatgccatgaccgagatccatgagtacaatcaggacctgatccgcaaggtgagtgccgtaggccagagggcctggacccactgctccctggagccaatcctgtgtcagcaaaccatgctagggaccgacccccaggacagcaggtggcttttacacacgcactcattcatatgtgcacacagggcaaattgatctcactggaacctgttccatgggtgggatctgcctgaagcactgtgctaagggggatctgaggaccactgtgctctaagtgtgcatgagtggggagggcggcatgcataccatgaacgtgccactcgagccagcctggggacaggacacatgcttgcccttgagctcacctctgtggatagacagtcccacaggaatgcctgtccccacgggttgccggtgctgtggtggaggaccgtgaggcctctgctaaaaggcctgggggctcggaaagggctccatggaacaggggacccatcctgaggcccttggggacagagcagtgcagaatcagtgatctggaggaagagcagcagccctctctctgcagaggtacagcagaggctggcaggacccagcatgctaggggaggccctgtggcgtggcgggcggtgggtgaccggggtgggcgagcgcggtggctgagctcagaccctggagccagggcgcctctgggggtccccgttctgcctgcactcactgcagctacctaatggggccatcatagcgcctgcctggggaggctgcgaggccttggcatgctgttgtctgtgaaatgttcacagcactgccgggagcctgagctgcatccttgctgctgtggtttcccgaagccccagggcgtcctgggcagcgcagcagaggctctgggcagacagagaagcgccctctaggggccagatcgggcagggcgggcttcctgcaggcggcagagaccgtcagactgtcagacactagccagtctaactctcctattgcgtgcggatggggagcctgggacccagagtgggaggcatcacccaagatcatccagcaaatcggcagcagagcttgttcggaagcaaataagagaggcagcggccgggcgcagcggctcacgcctgtaatcccagcactttgggaggccgaggcaagtggatcatgaggtcaggagatcgagaccatcctggctaacacggtgaaaccctgtctctactaaaaatacaaaaaaattagccaggcgggcatagtggcaggagcctgtagtcccagctactcgggatgctgaggcaggagaatggtgtgaacccaggaggcggagcttgcagtgagccgagatcgcgccactgcactccagactgggagacagagcgagactccgtctcaaaaaaaaaaaaaaaaaggcagcacccagggctcaggttcaagccttagcccctacttccctaccacgtggcccctgcagctgcttcccggcctgagcttcgctgagagccctcatttgcaaactgggtgatcagtgccctctccacagactggctggagattaaatgaagtaatgatgcaaatacctggcaaatcaccaacaccaaggaacaccgtctgcctttcctcccctggccacgacttgacttgggccagcatcagatggggtgggcgggatccttcttgcagctggtgtatgtgtggtcctgttggtacacagatgctgtcctgagcagatggcatgtgatgcccgcaccagccgttctggggtcacgtgcaagaggctggctggaaatcatgccaggcatgctcttgccaccagagacctcttgccctgttctcatgtgccccagagcccagtcttgggcctccccttgacgctccccttcgtgccccctacctgtggaaggtctcttctgactgcccctgtcctgttcccaacagggtcaggccaacaaggtgaagaaactctccatcgttgtctccctggggacagggaggtccccacaagtgcctgtgacctgtgtggatgtcttccgtcccagcaacccctgggagctggccaagactgtttttggggccaaggaactgggcaagatggtggtggactgtgtgagtgtgggcccctcccccaggccacttccctcagggtctgtagcccaggtcgatggcttcccctcatcctgtggggcctttggtgttggaggagacagcagggctctgtccatcgcctttagccagctggagggagagagagtccacagttcagagtctcagtgcggggcagggaccctcagtgaccaccagcaggggggttttcaaacgctttttagctgcggatccctttctgcaaacatagcgcagtgtagaagcccagaatggacaaaggctccagagcgggctgggcgctcaccctgtaatcccagcactttgggaggccaaggcaggcggaccacttgagcacagcagtttgagaccagcctgagcaatataatgagactttgtctctaccaaaaaattaaaaactagctggacatggtggtgtgtgcctgtggtcccagctactcaggaggctgaggtgggaggattgcttaagcccaagaggcagaggctgcagtgagctgtgatcatgccactgcactccagcctgagcaacagaaggagaccttgtctcaaaaagaaagaaagaaagagagagagagagagagaggagggagggagggaaacttcagggagaggggacatggaggcctgtcgactcagccgctaccctttcccccactcatcatccctgaaagggcactgctgagacctctgcccctctgattgcacagctgggacagtccctgcagtcccaggaaggggttttgcccgagccgctctgctgctgtgtggctcagcctgactcgaaagagcctggggctccccaggctggggctccgagagtgcagggcagggccgggcggggtgcgggccgggcggggtgtgggcccggcactcaccaaggctgcttctcaccagtgcacggatccagacgggcgggctgtggaccgggcacgggcctggtgcgagatggtcggcatccagtacttcaggtgagggctcagccgccccagcccttggccccgtgccctggcgtggtcggactcaccgaccttcccctcccagccctagtgtggactttcccttccccaagggtctgctctgttccccaagcccaccctggtcctagctggcgtcccctgcccagcctgagcatcctagggtgaccccctcctccctggcccgaacagattgaacccccagctggggacggacatcatgctggatgaggtcagtgacacagtgctggtcaacgccctctgggagaccgaggtctacatctatgagcaccgcgaggagttccagaagctcatccagctgctgctctcaccctgagggtccccagcctctcaccggccccagctgacctcgtccattcagcccctgccaggccaagcccagccactgccctcccgggcagatctgggcccaggcacctctgagtccatagaccaggcctgggagaatgccaagctgcctgcccgaggctggtcctgaaggcctgtctcccactaaccccgccttccagcactttctgtcattccaggctgggaaagtctagagccccctttggcccctttccctgactgtcaaggacaactgactcccccatcagctcaaacattaagggtacccgggcacaaccgtacccctgcccccagcccc

SEQ ID NO: 15728 - DNA, 62852 bp, Homo sapiens
ggagagcggtggtcaggccatcacgtggcccgaggcccgtttgtttgcggaagtaggaggaagtagaagtgctgagtaagccgaggtgagtgacctcgcgggtgggcggggcctgggggtccgttccccaacttcctcggcgctccggactcccaagtctccgccggaccctcctttggatattcctcgtgtctccgattctgaggcatgtcctccattaacccttatgtgactccctgagtgcccccaccttccatcttttcatccccctgcgtccccaattcccatcccgagaccgcccgtgtctcatctcgaacttgtggaccccagggaccccagcttcgaccctgagtttctcccctgaaccccagtctcctccgtgtgtctccctcagtatccctaacttcccgagtcaatccatctcttctctttccccgaccctcagtgcctctttaggccccattggccgtcctaattttccttcctgtgctcctctaagtgctcacttgattccccacttcacgtccgtctccacctttcgtggtgcctctactcatttctcactccctgcttctcctgcctttcctccctgctttttttccttgcctttcctctctcgcgtgcctccagacctgcccccgacatgctccctccttcccctcagcctggccaccccagagtctcccacccctaatcctgtgtccacctcctgctcccacagatgacttggaagctggtgacagggagcatgtgaccagggtgatcatgggactgggtcggggcaagcctgtgggtgtgggacagggagggcacagggcaaggggacctgtggccgtatttttaatgggctacccacatgaccccaacgaatacctccccctagcttctgggtctttccctcacctgcctcttacccgcccaacaggatgtcaggcaggttcggtttggcaacgttgaggctgcacccttgggctgaatgcattgtttttgaatgcattgtttttgttagagtttctgcctggagtttggaacctgttttctgtccaagtctcagtttcctcatctgtgacaggggaactgtacctcctgccctcgtaagtctgccatgaggttcaaaatttgaatgagaaaatgtagaaggtaaagctttataaccagtatggccctgtacaaatacatgattttactgttgggtcataggcagaattgaaaggagtggaaagggaaagggctagaatgagaagacaaggagagaaggatgagcaggaggtcccttgtctttcagtgtatcatttggcagtgtttgttcatcacctcttgtgagtcaggctcttctgtatatgttctcttcaccattcattcagtcatcgtttatctaacaaatatttacggactgtctgatgttctaggctacccttggtgtggccaatgatattctcacttcacatgagaaaaagagggcgcatgagttgcttgaggtcacaccgatgaggttgaagctggaatctgacaccagagcctgtgtgattgtcctgatgtgtaaggtttgctactgtttaggacacttcttgttccttccgtggattactttcttgttacatgagagactccccaaaagggagtttccctcttactcagcagaatgacatcactaagagatacagaaaggagaaatttaaatactctgtgtgtgtgtgtgtgtgtgtgtgtgtgtgtgtgtgtgtgtgtctgcagacatctattgggtgtgtgtgctgggggaagtaggtaggcaaggagtaaggggccgtagtgaagagtgtgttacaaacttcactttgtagagggtggctccctgggagaatatgttctgtgtctttcacagtggattttgatagggtcatgtcttaaatgcctcttctcgttttcggatggtgatctcatccagtcttatttctttaagtgccgtctctattctgtcagcccacaaatttatatccccagtccagtccagacctttccctggaatgacatactcaaatctagttgcttactcagcacctcaaacttaggcttttcaaacttgaagtatttatttattgatttatttattttttgagacagagtctcactctgtcacccaggctggaatgcaatggcacgatctcggctcactgcaacctccacctcctgattctcctgcctcagcctcccaagtagctgggattacaagcatgcgccatcatgcccaactaatttttgtatttttgtagaggcggggtttcaccgtgttggccaggctggtctcgaactcctgatctcaagtgatccacctgccttggcctcccaaagtggtgggattacaggtgtgagccaccgcgccaggcctcaaacttaagagtttagaattgagctcctgttagttctgccctccatccctgaccccactcttcaccaaaacatgtccctcccactctctttctcatcttaggacataggagtattgttcattcagttgctcaggtcaaagctgtgagattatctatgatgcctctctgtttcttaccccacacccagccagagtgatcttgttaaaatgttgtttctttgcagtggcctctcctctcatggcacatgcctggccccctgttgcctctctgatgtcactggcttccttgcttttcctggaactcgctaaacatgttccagccccatggcctttgcacacgctctctttgcctagctattcatatgactttcatctctctccatcaggtatttatttaagatcaatttcttggtgaagacttctctcctcacccaatctaaaatttcactctccacctcagcacttcctatccccattctctggtttttctcctcagtagttaattgtcatctaaaacctttgtaaatatttacctgtttatcttctttattattagtagctctgtctaaaatataagttccaggatgtcagggattttgtggggttttttttggttggttggttgttttggttttgagacagggtctcactctgttgcccaggctggagcgcagtggtgcgatctcagctcactgcagcctccgcctcctgggtttgagtgattctcccacctcagtctcccaggaagctggaattacaggtgcacgccaccacacccagctaatttttgtattttttggtagagatggggtttcactatgttggccaggccggtcttgaactcttgacctcaagtgatccacccgcctcggcctcccaaagttctgggattactggtgtgagccaccgcgcccggccttgttttgttttaagacagggtctcactgtcgctcaggctggattgcagtggcacaatcacagctcactgcagcctcgacctgctagacttaagcaatccccccacctcagccaccttagtagctgggacttacaggcatgagagataccatgcctgggtaattgttaagtttttgtagaggtgaggtctcactatattacccaggctggtctcaaagtcctgagcttaagtgatcctccttccttggcctcctaaagtgctgggattacaggagtgaactgccgtgcctgaccagtctgttttgtttacgattgtatcctcagcggttagaacaatgcctgccacaatccatctcagtaaatatttgtggagtgagtcataacatgggccacactgtaccgtgccaccagcccaaagatctcttaaagtcacccctgtctcatgtgcttgggagctccagtgacagtttcggggcagtttgcttccagctgtggtccagccaagcggagtgaatgaaagagatgctttttccttttgtgaaaggacgttttgctctggctcacgtgagcagcagtgcattttgagacgagggccttggcttttggaatctaagagcctgttgagcaagcctcgctcagccaccttctttcagctttctcctgaaggcagtttgaggattaagagcctgatgctctggattccacctaattgggttcagatcctggcaaactgtgtaacctgtgccccagtttcctgtgtaatgtggagagacctggaccttttcttacaggtgtttggagggttaaatgtggcaattcggccgggcgcagtggctcatgcctgtaaccccagcactttgggaggtggaggtgggcggatcaccggaggtcaggagttcaagaccagcctggttaacatggtgaaaccccgtttctactaaaaatacaaaaaattagccgagtgtggtggtgcgcgcctgtaatcccagctagtctggagactgaggcaggagaatcgcttgaacccgggaggcagaggttgcagtgagccaagatcacgccattgcactccagcttgggcaacaagagtgaaactctgtctcaaaaaaaaaaaaaaaaaaaaagtggcaatttacccgaaactgtggtgaagcgtctggcgccctgtgggtgctgggcagcagtgggtgctgatggggtgtgaggggatgggatcaagccctttcccactaacttaggaaagaggttggaatgagctggggtcagagggaacatttgcggggacattttgccgggaggctgccttggaggttcagaggctcagatgacccctgtgttcattcagtgttttctcacccacagattgagcacctgctgtgtggccagccctttgcctagtgctgttcaagagtcagaggacataggcaggcaatcccccaccacaacctgccaccccatttcctctcttggggccttgatttctccacatgccaaacagggagaatgattgcaccttccttgtttctttttttttttttttgagacagtctcactttgtcatccaagctttagtgcagtggcatgatctcggctcactgcagcctctgcctctcgggttcaaagattctcctgcttcagcctcccaagtagctgtgattataggcacccaccatcacgccaggctaattttttttgtagttttagtagagatggggtttttttctcacacgttggccaggctggtcttgaacttctgacctcaggtgatctgcccatctcaccctcccaaagtgctgggattacaggtgtgagccaccgcgcccggctgcgccttccctgtttctttgtgagcttggaggtggatcacaagtgtgaaaccctttgccaaccgtgaggcatggtggccttgtgagaggacggaggccggtgtgtggtggcatgctcccgtgctgtgtggcacagacggagctacaggaaggaagttggggcagcttggcactctgagtggaccctgagtttccagcctgctctgtcttgactgggtgggaggagggtgctcaggagggtgtcactgctgccaggttctgctgccaggaccatccaacagttgttccaatcatgggacatcctgtcgtcagcagctggggctcgtgaggcctgatttccacctcgggcagttctgtgtgtgctcctggaatcccccacgtggccaagcctgtgaggtctgcttcctggcctgctgcctgtgggttcctgtcacgcacctctcgggcagctgtccggctcctctgctctcggcttagtcaagaaggaagcagaaggcttggagtctttcctgcttggactaggagtgagctcagcctaagtgccctgactatatataaagctgaactttccagaccgaagcctggggatggatcagtccgatcacttagggccgctcctgaaggagtgcaggtgctagatacaggttctcccggtggaggagcgaaccccttgtgggccgttagctactggtgggatttgagcatggtatttccctatccgttgtggagaggagcatggcagctcagagtgggtgggaacagtgtgtggtccctgttatcaccttcaagggaataaagtgtgtctgggggcttcagaggtgctggccccatgggcttataggtggttcattcattcattctcattcattcattcaccaaacttattaaacacccactgtgagtcaggaacatcatgccaggtgcttagggaaacaaatcaaagcgggttgggtgagcagcccaagccaacagatgcacccccattctcacatggtgtgtgttcctgtgggctgggccctgggtggtgtggggtgctggggagaagaggaaggcacaccaggctgcagggcggaggtgcgggtatgaattttcagaggagatggcacctgagctgtatcttcatggataagaagagatttgttcatttgtcctttgtggagcacacattcaggttaagaaagtggggaggatgggctacgctgatggagcgtatgtgtggtatccccaagtgcactgagacacgagtttgacgtgttctgggaagatcgatggtgcggcgtggctggagtagaggtgagggatgagttggaggggtgagttgggccagctctcatggatgctggagtctgggctttccctgggaggtcatggggcgccactggccagggtcagcagggagacctgcagctggatttgcatcgtacagtgggcatggaggggtgtcaggctgggttgggaaccgtgcaggctggaagggcactctggtgctctgagcattcagagggggcagctgggccttgaaggatgagcaggggctccagcaggaactggagagcgcattccagggaggacgcaagtgcaggcccctttcactacagaaaagcagttttcacacagaccttccaaaggggaggagaggggactgcctgggcctggcagctgcggcaggtagcagcaatcagagggcagggaccgctcctcccgtgcctgagacctgcccagggtccttcagggaattcgtagctgaggaggaaccagatttttgggactgagttctccctcaccacccgctctgagccaccctcttggtcccttgtcctctactgcacttcttccggggcttggctcctcgtcatgagaggagcttccctgggcatggcgaggggcgtgactgacatagcagccctggacaagtggctccaggtgacctgtgttcacgttgatcacagcactaaccacggcccctcctctcagcaccttcccctctcgagccgtccagtcccagtgaaaatgctcaccgttcatgggtgggctgagcaagcccctgatctctgccttcctccgtgttctgatctgcttcatctgctgtgaaggcctctcgccatttcccccgctggcaaactcctgttcttcctggaaagttcagctaaaaagtcatcccctttaggggtccttccctcaggggaccgtgcacttggcgagacagggactggtcttgggtctctctgttgactgttttatgaacccaggtagtcacttccagggaactcatcagagatgctaccattggctccaatctccctctgttcccactcgaggttttttgtttcttcgtttgtttttctttctttctttttttttgagacagagtctcgctctcgcccaggctggagtgcagtgacatgatctcggctcactgcaagctccgcctcccgggttcacgccattctcctgcctcagcctcccgaatagctgggactacaggcacccgccaccacgcccagctaattttttttgtatttttagtagagacggggtttcaccatgttagccaggatggtctcaatctcctgatttcgtgatccgcccgccttaacctcccaaagtgctgggattacaggcgtgagccactgcgcccagcccgtttgtttttgttttttggtggacatcaactttaatttgccctttgttttgttttgtttttgaggcagggtcttgctctgtctcccaggctggagtgcagtagtgcaatcttggctcactgcagtctcgacctcaagaggatcaagcaatcctcttgccttagcctcccgagtagctgggaccacaggcgcacaccaccatgcccagctaattttattttatattttgtagagacagggttttgccatgttccccaggctggtctcaaattcctgggctcaagcaatccgtctgcctcagcctcccaaaatgctggaattacaggcacgagccactgtgcccggccttaatttgccctttgaacatgtacaattcagggcctctctgggcctcagtttcttgatctctgagatgggaagatgggataataatacttgttcctcccgtccttcagctcctccaggggaccctcacaccagcacactctctgtcagtcttccctcaatgaacccagcaggcaagcttggttttgacagaggatgggtgagcagagataaggaaaacggccagaaatatctggcttccctcagcaggggcaccaaaattggtacctggaaattgcctggcttggacaggcagaattgtcactgtcaacccccaccaccaaaggtcttgggtctttgtctttctgcttgtggtgtttgagagagctgcttgacacagccgaggtgcggtctgtgtcaggtgacctgggcatcctgggggtgcagggagaagcccaggtaaggaggaggaggggccggtcatcagtggggaaaagtgattgtctaccccacgggaaggtcaagggtaggacgctgtgagaagccagggggagagatgaagtgaggcatgatgcggggggccctcatccaccatccccctcttgcagctgtgctgggaagagcctaggctccagggtccaaggtggcagggacagaaggaagcacgtgtgagcactttctccctgctggcccgccttcctggttggcaatgccgtgagtgttccaggatgtggccccgtggctgtcatttcctttcttccacctagtgataacaatggccactgtttgtgtgcccacagtcggcctgtgtcccagacaccttccctccattgcgtcatctcgtcctcctgcctaccctgaaggctggatgccagccaagcctgtcgtttctgtggccatgctgtcgtgggtgtgtggggggcatcccctagccccaggctctggtggggggtacacaggctgggccattgacgaaggggtgtgtggaatctttctttgatttcactgcacccctggtgactttctccctcaatctgaggctcatgggtgctggatgctcttgactctctgcccttcctgggcgcacccctccgcgtccctgtgggcccgtcctcggggtagcctctctgcgctcttccaggccaggcctgagtcccacaggtccccatcttcccggctgcagcccccagaggctcagcctatactgctacttcctttgaaaactataatcgctttacatagcatctggaaaatagggaaaaggaaaaaacaaaagcccataaacccagcaccctcatctactcaatggcatgttttctgtcagtctatcttggtttgttttctatcaggctttgttttttctatgcataatatttactcagttaaatttttgttttgacaaactttctgtgagccaagcttgtggacggagatgaaaagacgagcagctgcctttgagaaactcagactctgggccagcccatctgggtgccagctttcactgctccacccactagctgggtgaccctgggcccgtgactttacccctctgttctttggtgttctcatatgtaaaatgaggataataatagtaaccagttcatagagtggttgtcagacagaatgattaatgtacgtaaagctttcaggatggtgccagcaagatgcacaggagtgtttggtaggaggatgacgaagcttaccgtctggcaggaggggcagttgtaacatgctgggctgtgatagtacagatgtgtttaaagtgagggagagcccagagcaaggagagagaacctggcatctggtgatggtgtatcaagaacattttaggccagacacggtgactcacacctgtaatcccagcactttgagaggctgaggcaggcagatcgcttgaacccgggcgttcgagaccagcctgagcaacgtggtaagaccctgtctttataatttttttttttttttttctgagacggagtcttcactctgtcacctaggctggagtgcggtggtgctatcttggctcactgcaacctccacctcccgggctcaagtgattctcctgcctcagtctcccaagtagctgggattataggtgcccaccaccatgcccagctaatttttttatatttttagtagagacggagtttcaccatgttggtcaggctggtctcaaattcctgacctcaagtgatctgccctcctcagcctcccagagtgctgggattacgggcatgagccaccatgcctggcctctataaaaattgtttggaagaaattacctaggcctggtgatacacacctgtagtcctagctactcaggaggctgaggtggaaggaggtagaggctgcagtgagccatgattgagccactgtactccagcctgggcaacagagccagaccctgtttcaaaacaacaacaacaaaaacatttttaaggaggaggctgagaaccacgagaaccaagcttggatttgaagaaggatcagggctttctcagacagaaaaggagaggaagaacattccagatagacatcattgagagatggcactgagccttgtaatgggacactgcgaacttttcttcagttgttatgatctttttttttttttttttgagacggagtttcgctcttgttgcccaggctggagtgcaatggcgccatctcagctcaccgcaacctccgcctcccaggttcaagcgattcttctgcctcagcctcccaagtagctgggattacaggcatgcgccaccatgcctggctaattttttgtatttttagtagagacggggtttctccatgttggtcaggctggtctcaaactcctgacctcaggtgatccgcccgagtcggcctcccaaagtgctgggattacaggcgtgaaccaccgtgccttgttggtataattattagtattgatcttttttccttttcatgtgcctcttagtgggccccttgcttttgtcttccttctgtccccagggttgatcctgtgctcagcacataggccagggaagaatgtggctgtgacccagtgtccactcagatgtcctctctcccccagggcacccatactctgtccttagtgtcttttgtctggtgacatcttggcacagaggcagagggcggcctccgtctgattggcgcctggctttggtgacagtaccttaggaaggcagtgtattttctgggaacctaggaaataacaaggtatctaattccatcatcaacactggggacaatttccatggcagaaactatgactctgaatatgcagcgtaaagttaccacccagacactgctgctcctgagtctcgaatggcatcttctgcaggggctcccccacctgcccctgcagaaggtgcagttcgttcatttccaaggagcttgcttttgtgtgctgtctctcggagctctttgggaaacctgtggtagcaggaaacaaaggatttagaccaatgccgatgatccccttgctccgatagagtgtgacatgatgctggtcaccttttggtatctaggaggggggacattgattttgtttgcggaagtgaaatgatccatgctggcctctttttttttttttttttttgagacagagtcaccctatcgcccaggctggagtgcagtggcgcgatctcagctcactgcaacctctgcctcccgggttcaagtgattctcctgcctcagcttcccgggcagctgggactacaggcgcctgccaccacatctggctaatttttgtatttttagtagaggcagggtttcgccatgttggccaggctggtctcgaatttctgacctcaaatgatccgcccgcctcagcctctcgaagtgctgggattacatgcctgagccactgtgtctggtccatactagcctctttgagtgctgaaaggttatctctgtaacttatttagtgagaaccctccatttgcccagggcattactgcctataatgtatgttcacatgtgctatctcctttggtcaataccacacactacaggtgaggaaactgagtctctgctgggacactgggtcaggaagcaggcagttaaggtcacctgtgcacagtggcagcacagggggacagccttctaggtagccagcctggcctgagggttctgtcacttttacctcccactcagtgttgtttctctttctttcccctccttttaagatccctccaggcccaggatctggggacaacgctggtggggagtgatctgggtgtctgtgcaggaaaccgctgcactgggtgagatgggcatgggagactgtgcctggctgaccagagacctcgttttcttccagacagagggggaagacggtggggcctccccacctgccccgcagaagatgcagttctttggccgcctggtcaataccttcagtggcgtcaccaacttgttctctaacccattccgggtgaaggaggtggctgtggccgactacacctcgagtgaccgagttcgggaggaagggcagctgattctgttccagaacactcccaaccgcacctgggactgcgtcctggtcaaccccaggaactcacagagtggattccggtgggtgatgctcagcgggaacatacttctctcctttcactcccccacgtctcggattggaggtcttattggccgagaagcagtttctttgagtctctgtctgaggggtctggagaggggtgggagagaggggagactgtactcttggaccagagggaagggcttccgagactccacacttctggcccatcagtgtcccagcacgaggctgaggatggaagcctgggttgtttctggcctggaggctcgacctatatggacaaagggaagaaggaaggacagggagactgagagtgtccacatcagataaggcccatggggagaacctttagccctggctctttatttttggttttggtttttgttttttgagacagtcttgctctgttgcccaggctggagtgcagtggcgcaatctcggctcactgcaacctctgcctcccaggttcaagcgattctcctgcctcagcctcctgagtagctgggattacaggcacccaccaccacgcccagctgatttttgtatttttagcagagacggggtttcatcatattggccaggctggtctcaaactcctgacctcaggtgatctgcccaccttggcctcccaaagtgctgggattgcaggcgtgagccactgcacctggcctagccctggctctttaagggcatggccgttctcataggggctgcccagggtttgcttaggaaggctggacagagctgttgcctcttggggcatgctgggactcccctgggcctgaagagaaggctcaaaagccaggacaggcctgagggaaccgggccaacggcagagctggttgggaaaaggggagaagcagccaaggttccaaatgcaggccccagcagtgcttggcagactggcatctagttgggctcagacagatatccctgtttccgctcacctatccatctggctgtcctgtcagccatccattcaacatgcaccaagcacctccagtgtctccagagtcctgggcttcgggccagtcctggctggcctgtgagatgacaaacatgtcctgtgtctttaaggaacgtacagtctggtgggggaggtccggtgcaaacaggcgtcatagcaccccttgaggagtgctgtgacagagggagagcctaggaaacagtgtggatcacaaggaggtgattgagagctactctgcgtctggaagagtgaggaggagcctgtgtggcagaacaaaatggataaggtcgttccagccgtgcagaagtgtggaggtgtgagcctgcaggcaggtggctctggttggatcccaggtgcatgcagggctttggtgagagtgaggctgaaggaagcagctggggactcattctgactaaagaggcatggcaggaggggtctctgaaagtgtcaggctgggggccaggggctgccaccaacagaagagcaaggcaggtatcagggccccatccaatcaggtgagaattcagagcctggctccacaaggaacctgaggcagaggcacccacagcaggtgcttgggctaaatgcagctcagtggccagtgcaggcaccagttttaatacagtggggccattccagattctgagtgcagatggggctgagcagaccgccttccagctggactcgatcaggactgaccctggacggggcaggcttgcacttgtagcttcagagctccactgcaggcacagctgaccagggcagcgggtccactccttggagagctggacagccccacttttgaggtacacggccctggggataccactaatctccacgtaccaataatcaccaagttctgtcagttgtaaaatcccttgacaggattccagatttgtctcagccagcttaagccccagtgtgggcagacctccatcccaggaggatttagtcctttgtcagcagcttcttagctacacgtaagctattctgtggtactttatagtttacaggattttttgttttcttttttttttttttttgagacagagtctcgctctgtcacccaggctggagtacagtgacgcgatctcggcttactgcaagctccgcctcccaggttcacgccattctcctgcctcagcctcccaagtagctgggactacaggcacccgccaccacgcctggctaatattttgtatttttagtagagatggggtttcaccatgttagccaggatggtctcaatctcctgacctcgtgatccgcctgcctcggcctcccaaagtgctgggattacaattttacaggatgtttttaagtatgttgggttagcacattctctgccaatccgtggaggtgggcaaggaaggcagtattccattttatgcatgagaaaatagccttgggatgataagtgattcatcccacttatacacaggaagcagtgaagaaacagaatcagtgtcttctggttcccaattcatttctctgtgctgctgtgttgtttccatgtatgtatgtatgtatttatttttttgagacgttaagtcttgctctgttgcccaggctggagtgcagtggcatgatcttggcttacagcaacctctgcctcctgggttcaagctattcttctgcctcagcctcccgagtagctgagactacaggtgcgtgccaccatacctggctaatttttgtgttttttagtagagacagggtttcactgtgttagccaggatggtcttgaactcctgacctcgtgatctgcctgccttggcctcccaaagtgctgggattacaggcatgagtcaccatgcccggctttgtttgtcttatttctaaattttattgatttatttattttcacagtcatagctctggagtcttttttatcttctcccctctaacctgctcccacccgaacctttccatttcagcagatagcatcattgcaacgggctgtgccagatccagccatcacatccacctttccagccaaagggagggtggaagggcaggatgcagaaggtcaatctccccctcctcagggacatttcatggaagttgcacgcattggccagaacccggtcacatggccacagctaactgcaaaggatgctgggaagtgttgcctgtgttgcagacagccacgtgccagtcgaaaatcagaggttctttctccctccgtcttgctgctggctcgcttctccagaccacagtcattgtgcacgtgtctcctgctgctccggctgtggcctgcactcctctcatcctcttccaagctgctgtcacagcgctgtttccagagggcaaatctgattggtcactcccctgctttactccccaagggcttcctgttttcttttatttttatttttattttcattttttgagatggagtctcgctctgtcgctcaggctggagtgcagtggcacaatgtcagctcactgcaagatctgcctcctgggttcatgccattctcctgcctcagcctcccaagtagctgggactacaggcgcccgccaccacgcccagttaattttttttgtatttttagtagagacggggtttcaccatctactcttagccaggatggtctcgatctcctgaccttgtgatctgcccgcctcagcctcccaaagtgctgggattacaggagtgagccaccgcgcccggccagcttcctgttttcttaacacatcaggtgcttaatgacttaaaagggcccagtgtgatcaagtttctgcctctgtgttctcagctcatgccgccttgtgctcctggcctttgcccaggctcttgctgtggcctggaatactcccctttctttgcctgccttccttcctcttgccctcccctgacctgcaggctggattaggagtttctgctgggcatcccatggcacccgtccctgcactggggatcctgctttcctggtaggccacagaccttgtgaggggagggactgtgtctgttgggttcatgacagtgtgcccagcccccagcaggtgcctggcgtagatcaggtttgtggaacaaatgaatgtgatatattaatttagctttagagtattcattgagggctgctgtgtgccaggccctctgtgccacctgggtggagggtggaggactgttgcattgagggcagttgaaggagtgagctgggaagtgggaggtggaggatggggactgggatgcagggtttgaggttatcaggggtcccagaagcagtaatgccaaggcctaggctgtgacctggagtgagggctgcgatggggtggggtggggtcgaggctgtggaggagggtcatcagggcactgctggagccctggggttctccagggccgggggtggtcattgcagtgttctcccagctcctctcaacaccctgcggtctgtggagagcaggcctggtgcactggacttgcctctggccagggctgagtttctgccttctaaacgatcttcctcctgtgttgccctagaggcctctggactgtcctgagtacttgacgcgtgttagagtgagcatgggctgctagccttccgctccaggtggaggagtttctgttgttcttttgctgctgttgctgcagtgagctgccaggctgagcttctggatggacctgggggatggaattaggagcttctgaattcttgggttgtataacctaaggccggagagtcccacagcactgctgctgggcggagagactggaccctgctgatacagacagcgacagcagcaggagcatctgcagtttcccagcaggtcctgcatgcctgggcttggcactagtctaagtagtaactcatgttatcctcacgacagtcccacgaggtggggtcattactgacctcctattacagatgaggaaacagaggcttgcagaatttgagatcacacagctggtcagcgtagcgattattcagaccctgtcacctggctccagaacccactcgtttacctttcttacatcagggctgctttgtagtgtggcgagctgagtggagctccacccgcctgggctgatcctggcccttcctgcctgacctatggtgcgggggccctggctctccccgtgtgagcccccaggggtcacttgtaatatgcctgtgtacactatgatagcatagatacttctgttcctggtacagattaatcatttacggctggcattgacttgtaacagatgacatttgatgaaatcaaccagcctctcactggtatctcagcagaaacagggctgtacctcccaggcatcctgggaaggatgatagaagtgtgtgatctgtgcttccctaccgggagctgacttttgaggctctctggactgggactttgccataaaactgcttatcagaaacctcagataagtggagtgccctgtgtcctggccacgtactctggggccagctcctccatccattcagtcctcccacatcccatcttcaccaagcagagtggaaagcggcaggtctctgcgagaaaaggaggctctgtacccagccttcagtgagataactttagagtggggccttgtattccctacacaggccttgtccccgacacggcctctttgcccttgcttctccttctgctaagaatgctccttcccaactccttggctggacacacggctcctgctctgtgggcctgtcctgttcccactcagagcctcagcaccccccatgtggccaagacacagcccctcttgccttaggttgccgtgggtctgtttccacatctgtttcccctccagactgcagggctcctgagggacagggcctggggccaagtctcctctgcgttcctgatgcctggtggtgtgccacgctctccgtgggtgcacggtaaatatctgccgagtggctagatgtatccatggttgctgaaggccaagtgtgttgaccagagggcgtgggaaaggctccactggggtggctggggtagagatagaccttaaggggtccagaagactccaccagctggagggaaaggccctacagagacaaggtactaggaaaggcccagaggacagaggaggggccctgtggggagcctgtgggcaggaagggcctgtgctgggctttgaaactggggactcaggtactgctctagcgtgagggtccttggcattttttttggtccaggaccccctgaggtccctggggaatgagaacaggctcacacagccactttcaagaggtttgcaggtcccctgaggcttagccacagacccctcccaccccagcagagacacagcagaggcttctgagtggaggccaggtggcttcagcctggggttctagaagggagggaagagacacacccccgtgtgtcctccagagcctcagccttctccctgaatctcccctttgcctcctcactgtaacccacacctggctctccttgaaggacccgcttgccccgcagcctcctgagagttttctctcccagtccctctcccactgggcctggaggtggggtagggtcctccttgcccccagccttgaatcttctgtcaccctacaataccacttgctgtcaccccggtgataggtatctacgagcctggggtgctcccccacatcctcaaagatgtgagcccctgactcagcgttgcctctggttcctgaccctccacattcacatgaccacgcgctggcctttatcatcgccagtgacagcagctctcccgtaaatacaagtttcaagcaccccactttccagtctctgccttctgtctttccagttcattccctctagtcctccacccacacagtgcttttccccattgacagggaattgctcctggccgcttttcccagccccatcccgttcatgtgccttgctttgtacccagcatggactccatggcctgtcattgtcactccttcacctatacttcctgcctccttgcttctctctctcttcgtcatcctggcatcaccaccccagaactgcttggtttcagttctccaccatggctaggggaacatacctttttgctgactgctctcactttctttttttttttttttcttttttttttttttgacacagagtctcgctctgttgcccaggctggagtgcagtggcacactctcagctcactgcaacctccacctccggggttcaagcagttctctctgcctcagcctcctgagtagctggtattataggcacccgccaccacacccggctaatttttgtattttttttagtacagacagggttttgccatggtggccaggctggtcttgaactcctgacctcaggtgatatgcctgccttggcctcccaaagtgctgggattacaggcatgaaccaccctgcccggccctattgctctcactttgaaatcacgacatgagccacagtgagcctatgatgtggtttgacgtctttctgcatttctctgttcacccctctcccagaaggcatgcctccttccctcccctcagcctgcagccccttcccctccacgcttactctcagctgatagccctgctgctgtctcgctgagaaaatagaaatagccagaggagaattccctctaccccatgcacacacctctgtccccgcctactccacattccctgttgtcagcaccgatgtgtttagctgagggtggtccccccattcaaggccatcatctcctgtcatctacttcttgacaccatttgaacaattatctcccctctttcctacataacactttccccttttctactatatattttttgctatggattgaaagtatccccccgaaatcatatgttgaagccccaatccctcgtgtgatggtattaggaggtagagcactatgggggtgattaggtcatgaggatggagccctcatgaatgggattagtgcccttagacgaagaggcaagaaagagatgatctgtctctgccatgtgagggcacaacgagaagatagccatctgcaaaccaggaagtgaaccctcatcaggaactctatcagccagcaccttgatcatagacttcctagcctctagaactgtgagaaataaaggttgtttaagcctcccagtctgtagttttctgttataatgtcctgacctaagttattttccatcgctatacaatgggttatttttttctttaaaaaaaaattatttcttgactctactttttcctccagagactgcttatattccactgtcttcattcttctcctcctgttttctctctttaaacttttcaaaaatagcaaaatataacacatatagagaaaatgatatacagctcagtgatttatcacaaacacctgtgtaaccaccactcgaatctagagataggacattacagcaccccagaagccctccttttgtcccctcttcccaaagaagggtaaccaataacttgccttttatgataaaggctttttttttttgagatggagtctcactgtgttgcccaggttggagtgcggtggcgcaatctctgcttactgcaagctctgcctcctgggttcacgccattctcctgcctcagcctcctgagtagctgggactacaggtgcccgccaccacgcccggctaattttttgtattttagtagagacgaggtttcaccgtgttagccaggatggtcttgatctcctgacctcgtgatccacctgcctcagcctcccaaagtgctgggattacaggcgtgagccaccgcccccggccaagataaaggcttttctatctggcttctttgttagcattttgttggcgagattgatacgttttgtgtgcagctgtctgtcattttcattgcaatagaattccattgtctactatatcacagttactcattctactactgatgaaaatttgggttatttctagtttttttggtgcatacatgcatacatttctggtagacatacctagaagtgaactggctgcattatgggccataacttgtcttcaacgttagtaaataataccgcccgtctgttttccaagcagcagtaaatggcactttctgttacttcatatcttctgttacttggtactgtcaggttttaaaattttagtcattctgtcgggtgtctagtagtatgttattgtggttttattttgcatttgcctgattgcaaatgaagttgagcactttttgatacagtgattaaccatttggatatcctcttcagtgaagtatcagctcaattctcttgactatttaaaaaataaagttgtttatctttttcttacagagttttaggaggagttttttggtacatgtgcagtccaaatacacaccttttgtcagtgatacgtgttcagctgcacacacggtgttttgcctttttattcttttaatggtatctattgataaacatgagttcttagttttaatgaagtcaaatttgttcatcttctttacggtgtactttttgtgtcttgtttaaggaagtccttctctatcttaaagctttgagaagcattccttctttctcctattttctaaaaattgttgaagatctccttccttccttccttccttccttccttccttcctttcatctatctctctctcacccaggccaaacttcagtggcatgatcatggctcactgcagcctcaacttcccaggctcaagtgatcctcctgcctcagcctcctgagtagccaggactacaggcacgcaccaccatacctggctaattttaaaaattttttgtagagacacggtctcatcaagttacccaggctggtcttgaactcctgggctcaaacaatcctcccacctcagcctcccaaagtgctgggattacaggcatgagtcacatgtctagcctgtattctttctttcttaaatgtttggaagaattcatgggtaaaaccatgtgaccctggagtttatttgtgggaagcttttaaaacatggattcgatttctttaacaaatataggactatgagattttcatctcatgtcggtttgggtatgttgtgttttcaaggaatttttctattttatcgaagttgtcaaatttgtctgcaggtccccttatttcctttttaatgtatggaggatctgaagggatggtactttgtgttgtctctatttcttgtttggttttgctagtgatttgccaatttaaaaaatctttccaaagaaccaacttttggctttgtttattttttgaaaacctgagtagctgggattacaggcgcccaccaccacacccggctaatttttttatttttagtagaggtggggtttcaccatattggccaggctggtctcgaactcctgacctcagatgatccacccgcctcggcctcccaaagtgctgggattacaagtgtgagccagtgtgcctggcaagccgctttttaaatggcaccaatcccattcatgagggcagagccctgatgatcgaattacctcctaatggccccatttcttaatactatcacactgagaattaagttttaacataagaattttaggaagacacaaacattcagaccatggaacatatataaaacagttgtcctaccaactaacagaatacacattcttttcaagaacacctatataaaaattatagacactgacctatgctggccataaagcaaatatgaacaaatttcagatacctgaagagatttagactatgttctccaactacagtgcaattaagctagaaatcaatagcaaaaatgtaactataaatgagcccgtatgtttgaattttaagcaagatatatgtaaattatctatggttcaaaaaagaagtcacagtgaaatttagaaaatatcttgacgtggcgggttgcagtggctcacgcctgtaatcccagcactgtgggaggccaaggcgggtggatcacctgaggtaaggagtttgagaccagcctggccaacatggtgaaaccctgtctctactaaaaatacaaaacattagccaggcgtggtggtgggcacctgtggtcacagctacttgggaggctgaagcgggagaatcacttgaacccgggaggcagaggttgcagtgagccgagattgcaccactgcactccagcctgggcaacatgagtgaaacttcatctcaaaaaaaaaaaaaaaagaaaagaaaaagaaaatatcttgacccaatgatgatgcaaatactacgtatcaaacttgtaggatgaacttccacttctggccatgacagaggagcctgtatcagactagccttcctatttatatatttatttttgagatggggtgtcgctctgttgcccaggctggagtgcggtggtgcaatctcagctcactgcaacctccacctcctgagttcaagtaattctcctgtcccagccttccaagtagctggaattacaggcgcccaccaccacacccagctagttttttatatttttagtagagacggggtttcaccatgttggccaggctggtctcgacacctgacctcaggtgatccacctgcccctgcctcccaaagtgccgggattacaggtgtgagccactgcgcctggccgtgagtgacctttttaatgtgttgttgaatttgatttgctggtattttgttgagaagttttgcatcaatatccatcagggatactggcctgtagttttctttttttatatgtctttgtctggttttggtgtcagggcaatactggcctcatagaatgagtttggaagttttctctcctctgtttttcataatagtttgagtagggttggtattagtttttgtttaaatgtttggtaaaattaagcagtgaagccactgggtcccaggcttttctttgctgggagacttttcattacagctttgatctcattacttgttattggtctatttaggttttggatttcttcacggttccatcttggtaggttgtgtatgcctaggaatttatccatttcttctagggttttcaatttattggcatataattgttcacagtaacctctaataatcctttgagtttctgtgatattggttgtaatatctcttttgtcatttctgatttttttgtttgggttttctctctttttttgttagtctagttaaagatttattgattttgtttatcttttcaaaaaactttattttgttgatcttttgtattgttttgtttcaatttcatttatttctgctatgatctttattatttcttttcttctactaattttgggtttggtttgctcttttctagttctttaagagacatcattagattattttgaagtttttctacttacttgatgtaggtgcttataggtacaactttcctcttagtacttctttccctgtatctcacaggttttgatatgttgtgtttccattatcatttgtttcaggatgtttttaaatttccttcttaatttcttcattgaccattcaagagcatattatttcatttccatgtgttcgtatggtgtgcaaaataccttgtttttgatttgtagttttatttcattgtgatcacagaagatacttgatatgatttcaaatttaaaaagtaatttggctgggagaagtggctcatgcttgtaatcccagcgctttgggaggccgaggcaggcagatcacgaggtcaggagatcgagaccatcctggctaacacagtgaaaccccgtctctactaaaaatacaaaaaattagccaggcatggtggcaggtgcctgtagtcccagctactcaggaggctgaggcaggagaatggtgtgaacccgggaggcagagctggtagtgagccgagatcgcgccgctgcactccagcctgggtgacagagcaagactctgtctcaaaaaaaaaataataacaataataataatttaagacttgttttgtggcctaccatatggtctatccttgagaatgatccatatgctgaggagaagaatgtgtattctgcagccgttggatgaaatgttctgtaaatatctaataggttcatctgatctatactgcagactaaggctggtgtttctttgttgattttctgtctggatgaactgtctaatgctgaaagtggagtattgaagtctccagctattattgtattgaggtctatctctctctttagctctaagaatacttcctttatatatctgggtgttccagtgttgagtgcatatgtatttaaaattgttacattatcttgctgaattgacccttttatataatgaccttctttgtctctttttatagtttttgtcttgaagtctgttttgcctcatagaatagcatagctattcctgctcttatttggtttccatttgcatggaatatctttctccatccctttagtttcagtctatgtgtgtctttacaggtaaagtgtgtttcatgtaggcaacagatcactgggtcttgtttttctatccgttctgccactctgtgtcttttgattggagagtttagtccatttatgttcaatgttattactgacaagtaaggacttactcctgccactttattaattattttcttgttgctttgtgatcttctttctttccttcctgttctccttttagtgaaggtgattttctctggtggtatgttttaatttcttgctttttatttttttgtgtgtatctgctgtatgttttttgatttgaggttaacatgaggcttgcaaataatatcttataacctaatattttaaactgatgacaccttaacactgattgcataaacagacaaacaagcaaagagaaaactaataaaaactctacattttaactttgtccccccactttttaacttattgtactgtttatgtctgaaaagttgtagttattatttttgattggttcctcttttagtctttctactcaagatatgagtggtctacatatgacagtgttataatattctatatgtttctgtgtacttgctattaccattaagttctgtactttcaagtgatttcttattgctcattaatgtccttttctttcagattgaaaaactccctttagcatttagcagtatgtgaactgcatttttcaagtccagaatttctgcttgattcttttttttttttttgagatggagtcttgctctgtcgcccaggctggagtgcagtggcgcgatttccgctcactgcaagctctgcctcccgggttcacaccattcttctgcctcagcctcccgagtagctgggattacaggcgcccgccaccacgcctggctaattttttgtatttttagtagagatgggatttcaccatgttagccaggatagtctcgatctcctgaccttgtgatccgcctgccttggccttccgaagtgctgggattacaggcgtgagccactgtgcccagcctgcttgattcttttaaattatttcaatctctttgctaagtttatctgttaggattctgaattccttctctgtgttagcttgaatttcactgagttccctcaaaacagctattttgaattctctgtctgaaaggtcacatatctctgtctctccagaattggccactggtaccttaattagttcatttggtgaggtcatgttttcctgtatggtcttgatgcttgtgatgttcgtcagtgtctgggcattgaagttaggtatttattgtagtctttgcagtctgggcttgtttgtatctgttcttcttaggaagactttccaggtaataaaagggacttgggtattgtgatctaagtttttggtcactgcagccatatctgcattagggggcaccccaagcctactaatactatggctcttgcagactcgtaaaggtaccacttgggtggtcttggataagatctggaagaattctctggattaccaggcagaggctcttgttctcttcccttactttctcccctaaaagtggagtctctctctctgtgctgggccgcctggagctaggagaggggtgacacaggcacctctgtggccactatcactaggactatgctggctcagacctgaagccagcacagcactgggtctcacccaaggcctacagtctccactgcctggctactgcctacgtttgcttaaggcactagggctctacagtcagcaggtggtgaagccagtgagattatgtccttcccttcaaggcagcaagttccccctacccccatcctgggaaggtccttagatgccatctgggaggcagggcctgcagtcagaaaccttagtaatctccccagtgctctattctattacagcctggctgatacccaagccataaggcaaagtccttcctgctcttccctcccctttccacaagcagagaagtctctctccatggccaccactgccccagccctgtggcagtgctgccaggccactgccaacgttcattcagggcctaagggctcttgaagcaactgaacactgccaggcctgggactctccctttagggtagtgggctcccctctgacccagggcaggtccagaactgccaccccacagccaacacttagaatctgggaccccaagagccctcttggtgctctgccacactgtagctgagctggtacctaggctgatttttgctttttatgaaggtacttttttgtgtgtatagttcaatttggttttcctccagggaggacaattggtggaggtttctatttgggcatcttttttttttttttttgagacggagttttgctctttcacccaggctggagtgcagtggcgcgatctcggctcactgcaacctctgcctcctgggttcaagcgattctccagcctcagcctccccagtagctgggattacaggtgcctgccaccatgcttggctactttttttttcaattaaaaagtaaactttaatgtcgaaaatgcaaacttggggaaggcagaaagatcacacacaaggctgtcgcttcacacttggaaggttgcacggcggccaggagaggcactcctcacttcccagacagggcgggggccgggcagaggcgctcctcacttgccagacggggcggcggccacatgcctggctaatttttgtatttttagtagggacggggattctccgtgttggccaggctggtctcaaactcctgacttcaggtgatccacgcacctcggcctcccaaagtgctgggattacaggcatgagccaccgcgcccagccctatttggccatcttgctttgcctccaccttcatttgataacagaacacccccatgtaaccaccaccacaatcaagatataagacatttctgttattctccaaatttccttcaccctcctttatagtccatggcacccaccccatccctgggcaacacctatgtgcttcctttttttttttccccgcaggaggacgtcttcctatacctatgtgcattccatcactgctgcttttaatcatatagcgtgtagtcttatgagtctgactttttcacttagcataatgcttttgcaatttgtgattgagcgttttcatatgattctgttttttctgtctcttagcttggaagttatacactttttagtagtaactgttgggagatcgttctccaagagtctctctcatatttccatacatcctgctagcagagacattgactacctgtttttgtctgtttagtgttgctataaaggaatacctaagtctgagtattatacatagaaaagaggttttatttgtctcatggctcctcaggccatacaagaaacatggtgccagcatcttaccagtgtcacatggcaagaaaggaagtgaggaagagaaaataagttgttaactggttgttaaaaagtgccaggcacgggccaggcacagtggctcgtgcctgtaatcccagcactttgggtggccaaggcgagtggatcacctgaggtcgggagttttgagaccagcctgaccaacatggagaaaccctgtctctactaaaaaaaatacaaaaaaattagctgggcatggtggtgcatgcctgtaatcctagctactcgggaggctgaggcaggagaatttcttgaatccaggaggtggaggttgcagtgagccaagatcacctgggcgacaagagcgaaactctgtctcaaagaaaaaaaaagtgccaggctctttttaacaaccagttcttacaggaactaatagagtgaaaactcactcacccccaccccacagggagggcattcattcatgagggatccacccctatgacccaaacacctcccattagccccccacctccaacattggaatcaaaatttaacatgaggtttggggggcagaaatccaaattatagcactacctttgttccaggctaccttcaaaggatgtttatacagcaaacagccttggaaaatagagttagggtctccttgtagagcacagggtaagtttgcttacttttcagcataatcaagattgtgtcttcttctggagcaaaactttgacaacaacaagcggggcaaagtctgaaaccttttgcacatcttgacagaaccttagagattacgagatttatctctgccttactcaaggtccattagtatcttccagaacaataagttggtcttagaatcctttagctatgtattcccttccaggcttcgatgctgtgtgctgttgttttatttagtttttattttaaacccaacaagacgctataccatcaatacttatttagatccccccacatatttaacttgccatggtgcttcattctttcatgcctctttaagcatccatctaggatcgtgttcattccacatgaagagaaagcttttggcccagcacgatggctcacacctgtaatcccagcactttgggaagcctaggcgggaggatcgcttgagcccaggatttccagaccagcctgggctacgtggcaaaaccctgtctctactgaaaatacaaaaaattagccaggtgtggtggttcacgtccctgctactcgggaggctgaggtgggaggattacttaaacctgggaggttgaggctgcagtgagcgttgattgcaccactgcactccagcgtgggtgacaggagtgagaccatgtctccaaaaaaaaaaaagaaggaaagaaaaagcttttgtatttcctttcgtgtaggtctgctaatgacaaagtctctgggttttttgtttgactagagaaatgttttaattttaaccttattcttgaaggttttgtttttgttttcattttgttttgtgtgctaagtacagaattctcattggcatttatttatttagagacagagtcttgctctgtggcccaggctagagtacagtggcacgatctccgcctcccaggttcaagcgattctcctccctcaacctcctgagtagctggggctacaggcatgcaccactacacctgactaatttttgtatttttagtagagacggggtttcaccgtgttgcccaggctgatctcaaactcctgagctcaagtgatttgcctgccttggcctcccaaagtgctgggattataggcatgagccgccgtgcctggccagcatttattttcttttcagctctttaaggaagtcattccattatctctgggttccattgttgagaagccagctgtcattctaatggttgccctttgaagataacttttttccctctgctattttaaatatttcctccttgtattttattttcaacaggtgtaatgtggcacatatatcagcaattgttatgttacatacaatacatattgtgcaacatatgtatcattatcagttattgctgtgtaacaaactactccagaacacagtggcttataaaaggaatcatttatttagtccttaaatctgcaatttgagcagagctcagtgggaaagcctcagctttactttatatggcaccatataaggtaactcgcaactggcaagttggtgctggctgttggctggtagttcattcagggctcagggcccaggaccaagagtcgtcaccatggcttgcttcagcctccttgaggcatgatggctgggtcccaagagaagagaaatagaaacttccagtctcttaaggcattggtctggaagctgggacggcatcacttttgccatattctgttggtaacgcagttacatcgccagattaaagggtaaagagatacaaattcccactgctcagtgcaaggaatatcagtgattttagggggccctgttttaaaacccctacaaggtgctaagcgtggatttctggggctttcttgttttttgtttttttctatgtgtttttttttttttttttggtggtggggtcagggagggcttatagggtatgttaaatcagcagaataattttatttatttatttggagatggagtttcactcttttgcctaagctggagtgaagtagcgtgatcagagatggagtttcactcttttgcctaagctggagtgaagtagcgtgatctcggctcactgcaacctccgccccgctggttcaagcaattcccctgccttagcctcccaagtagctgggattataggcacccaccgccacgcccggctaatttttatatttttagtagacatggggtttcgccatggctagtctggaattcctgacctcaggtgatccacccaccttggcctcccaaagtggtgggattacaggtatgagccactgtgcctgacctataatgttttttaaaaatcagttttggaaagtttgcagacattaacttttcaaatgtagcttccatttgattctttttctactctgcctctgatcctccacttatgtatgtatgctagatcttttattagatagtctgtgtctcttatgtactctactatattttgtattcttctgtctctccatgctttattctgtttactctttcctgattatattttttaattttgtaatttccatttgatgcttttttgatcattcaaaactcttcaccaaaattctaaatttccttttttaacctctcgaatgttatcacagttactttaaagtctattttggataacttaaatatttacagtcccctcacagatatgtttcttttgtatattgtttctgttggttttctttcatgtcttatctccacatatgcctggtgagttttgattatgtgttggtcattgtatttgcaagtatgctcgtagaaataatctggaatggccgggcgcagtggctcatgcctgtaatcccagcactttgggaggctgaggcaggtggatcacgagatcaggagatcaagaccatcctggctaacatggtgaaaccccatctctactaaaaatacaaaaaattagctgagcatggtggcacgttcctgtaatccctgctactcgggaggctgaggcaggagaatcacttgaaccaggaggcagaggttgcagtgagccgagatcacgccactgcactccagcctgggtgacagagcgagactccgtctcaaaaaaaaaaaaaaaaaaaaaaaaagaaataatctagagcctagtttgatgtttccttacaaagaatgaatttatttttgcttctcccattgcaactaggataacctcagtctagtttctggaactgaaatcacttgaggctgaactgtggtctctgtgagagcgtgtctgtgtatggctcacccttattcctaggctacgtagttctttaggaccctaacccaaagtaagagatgttcatcagggctctcctcttggcagacgcctgggctccagtccctgtgtcctgagccccatgaggctgttactggtgctgctcgtctgcccatcctctccagtaacagccacctgaacactgcaattcctgggtttccatcattccttccagcctggtgagtcatcagtgtcttttgaggtatccagtgcctgccagcagatgttttttaataatttgtccagcatttctggctgtcctcagtaggtggtctgtttcacattccctagtctgctgttaatggaaagtggaagttctgagagagaatcatcgttcccgtcagcattcaaatgcctgattacactttccccattcgctatcctttcctttatttgctcctcaccacagcaaaactcctcaaaaatatctatctttgcaatcttcagattctcacattgtgtccttaaacccactttaatcaggccttggttccctccattccactaaaagtaatgttgtcaaggtcgtgcatgcctccgtgatgctaattccagtgatgagttttcagttgtcattctctgacatatcggcaacacttgatgtggagtaccctgatgttgagaggctggtgagatgaaggaaaaacccagccaagggcaatgaggaatggcttccttccgcctcctccttccctatctttgttgtggtttttgttgtttctgtaacactgattacgttatagtttatttaatgtacttccttattctatgtttttactttagtcattttgttgatctcctccataataacataggctcgggccaagcacagtggctcacgcctgtaatcccagcactttgggagaccaagatgggtggatcacttgaggtgaggagttcgagaccagcctggccaacatggcgaaaccctgtgcctactaaaaatacaaaaattagctgggcgtggtagcaagcgcctgtaatcccagctactagggaggctgaagcaggagaattgcaggagaatcacttgaacccagggggcagaggttgcagtgagctgagatcgcgccactgcactccagcctgggtaacagagtgagactctgtctcaaaaaaaaaaaaaaaaaaaaggcttcaggagggcagagcattttatgcaattgttcattaattgacccctccatttggcacagatcacatgcccagtagttaactgttaatcaacgcactctctgtggaacaacaggctggtcccgttgagccaacactctctgggcactgccttcactagactctggctggctgctgcgcttgtagaggtatgcaagacaaaaccttttggtatgttaaaagccctggtcagaactttaagtaaccatcactgacatataatggttatggttttgaaagtgcttttatagtggtttttcatctgtcctcacagcacctctgggaggtaggtaggacaggtacagttagtctcatgtttcaaatggggctcagagagggaaaaggatttcccaagatcacacagcaccttagtagcaaaacttggactcaacctcaacacttaaaaatgaacaaagctggccgggcgcagtggctcatgcctgtaatcctagcactttgggaggcccaggcaggcaggtcacctgaggccaggagtttaagatcagcctggccaacatgacaaaactctgtctcttctaaaaatacaaaaaattagccgggcatggtggcgggtgcctgtaatcccagctactcaggaggctgaggcaggagaatcacttgaacctgggagatggaggctgcagtgagccgagatcgtgccattgtactccagcctgggcaacaagaatgaaactccatctcaaaaaaaaaaaaaagaaaagaaaagaaaaagaaaagtttccctttttttaaatatctcattttaatgactgcataatagtttattacatagttataccataatttatataatattttgttgctgtacatttaggttaaacaatacttacttagttcctactatgaagaggggccaagtactcgaggctggagctctcacatgtggcaatgaaattagaaagtggatatggcagggctgtggtaaaataaaatataaaaataataaatgatattaccaaagaaaaggaaagtttttcaaaataaaggaaaatctagacaagcatagtggctcacacctgtaatcccagtacttttggaggctgaggcaggaggaacacttgaggccaggagttcaagaccagcctgggcaacatagcaagaccccctgtcaacaaaaataaaaaaaaattaggccaggcacagtggctcacggtggctagtgcctgaaatcctagcactttgagaggctgaggggggtggattgcctgagctcaggagttcgagaccagcctgggcaacatggccaaaccccatctctactaaaaacacaaaaaattagccaggtgtggcagcacacgcctttaatcccagctactctggagactgaggtaggagaattgcttgaacccgggaggtgaaggtcgcagtgaggtgagattacaacactgcactccagcctgggtgacaaaatgagactctatctcaaaaaaaaaaaaaattagctgggcatggtggtgcatgcctgtaatcccagctactcaggaactaaggtaggaggatcccttcagcccaggaattcgaagatgcagtgagtcatgatcacaccaccgcaccccagcctgggttacagagcaagaccttgtctctaaaaaacaaagaaagtctaacctaaacgccattatgtcatttacatgtgtataggggtgtgtgtgtgtgtgtgtgtgtgtgtgtgtgtgtgtgtgtgtgtgtgtgtttgcttgggaggggagtcgggctggagctggccaggccgcagcctggggaccttctgattccagcagggatgtgggccgagggtcccgccttactcatttcgggtcttgctcctctgtcctggctctacagactcttccagctggagttggaggctgacgccctagtgaatttccatcagtattcttcccagctgctacccttctatgagagctcccctcaggtcctgcacactgaggtcctgcagcacctgaccgacctcatccgtaaccaccccagctggtcagtggcccacctggctgtggagctagggatccgcgagtgcttccatcacagccgtatcatcaggtgagcaagggaacaagaccatttggacaacgtgtgtgtacctgcttgtgtgggcagtgggggccgcaggcctcggttcccctccatagtttgacttaaaaaggagcagggcctggcatggtcgctcactaacgcagtcccagcactttgggaggctgaggagggaggatcacttgagactaggagttcaagaccagcctggcaaaatagcaagaccttgtctctacgaaaaaattaaaaaattagcatgtgtctatactcctagctacttgggatgctgaggcaggaggattgcttgagcccaggagttagagtttacagtgagctatgattgcaccactgcacttcagcctgggtgacagaatgagaccttgtctctaggaaaaaaaaaaaaaaaaaaaaaaaggtgctgcgttgctaccagattaaaatgtaagaaggacaatgtaatgtttccagagtccggagtgctcaccaggtgccaggtctgtgggagctgatttctacccaccatgaaattgaattttcccaacccccacaaggtatcgtcattttattttactttattttattttattttattttattttattttattttattttatgttacgttatgttattttattttgagacggagtcttattctgtcacccaggctggagtgcagtggcgcgatcttggctcactgcaccctctgcctcctgggttcaggtgattctcctgcctcagcctccggaatagctgggattacagtaatgtgccatcatgcccgggtaattttttttttttttttttttttttttgagacggagtctcgctctgtcgcccaggctggagtgcagtggcgcgatctcggctcactgcaagctccgcctcccgggttcacgccattctcctgcctcagcctcccgcgtagctgggactacaggcgcccgccaccacgcccggctaatttttttgtgttttttagtagagacggggtttcaccatgttggccaggttggtctcgaactcctaacctcaggtgatctgccctccttggcctcccaaagtgccgggattacaggcgtgagccaccatgcccggcccaggtatcatcattctagagagagctaacaggacttgtgcaggtcactcagccagagagggtgaaagaggggcttggatccttggtgtctgcccaggctgctcttctggaagctgaaggcctccttttgtgaatccattcagccagcagatggagcagctgttgcccctggtgagggcactgtccccacccttgcacagggcaccagttggccatcttgtgcagaggtagccacacctcctctgagtctctatcctagatagctcagttaagctcccaggcccagaactcaaaacctcactgctggccgggcgtggtggctcacacctgtaatcccagcactttgtgaggccgaggcgggtgtatcacttgaggtcaggagtttgagaccagcctggccaacgtggtgaaaccccgtctctactaaaaatacaaaaaattagcaaggcgtggtggcgcacgcctgtaatcccagctactcgggaggctgaggcaggagaattgcttgaacccagaggcggaggttgcagtgagccgagattgtgtcactgcattacagcctgggcaacaagagtgaaactccacctcaaaaaaacaaaacaaaacaaaaaccctcactgcactttagtttccaggcgtgcttttggacagcactgtctcatctcaccatcactctgtccatttcctggggcaggcacagcagcttgtgtcgataaggatattgacgcccagaaaggttaagtgaattgcctgaggctagtgagatatccgtgttctgtgaccctttcctgtgccaccaccctgcccacttcctgctggtgtggccctggggcccatctcttgtacgagtgagcaaactgaacagaaacctgatacaggtcacatcagatataattacattcaaatcagcccaactagctgagtggcgggaatgctcttgagctcaaataaaccagaaagtccgagtttccgagtgcacttccctgcatgtgcacttaggtccccctgccaccttgtaccacacctgctcacctctgctcaccctggccctctcctgcagctgtgccaattgcgcggagaacgaggagggctgcacacccctgcacctggcctgccgcaagggtgatggggagatcctggtggagctggtgcagtactgccacactcagatggatgtcaccgactacaagggagagaccgtcttccattatgctgtccagggtgacaattctcaggtgctgcaggtgagcagggggaggggcagggtgactggtactgatacctcccggtgtccacggttccctttgggcccctaggctcaggtgtcactctcaggcctctcactgtcccccattggtccttgaggcctgagctccttcatggagggtgcagacccctccctggctcttccctcccagcccttttccaggagccacgtcctcagtctctttgcttgataaacctggggacggcctccaacccagcaaaataaaccccaaaaaaggcccagctccagtcagttagttcagttccacttttcctgagcacaaactgtgagccagatgcctgcctggaggggctcgtgggccagcgggacctgggcttaaccttttgcaagcttgtccaatctgtggccctgcaggctgcatgcagcccaggacggctttgaatgtggcccaacacaaattcacaaactttcttaaaacattatgagatccatgcatggaccttttttttagatcagctgttgttagcgttcatgtattttatgtgtgacccaagacaattcttctgatgtggcccagggaggccaaaatattggacaaccctattttacaggaattcaaaccaagcaaaccaaactgtctccagttcctgtaggcatttgtgccagaggccctcctgttaacgtttttgattacctgggcaaaagatgtgattttttaattgtgggcaagcagatggggtgatactattaaatagctatttcatatattagattgaacagaaaaggcaggatgttggattatgttttattgtctagaattagaaaattcttctaaagatcatgttctctctgccttggcatcagaatgcaactacgttataccagaaaatgtggattcctttttttttttttttttttttttttttgagacagagtttccctatgtctcccaggctagagtgcagtggtgcgatctcggctcactgcaacctccacctcctgggttgaagtgatgctcgtgcctcagcttcctgagtagctgggattacaggcatgtgccaccatgcctgggtagtttccgtatttttagtagggatggggttttgccatgttgcccaggctggtctccaactcctggccttaagtgatccacctgcctcagcctcccaaaatgccgggattacaggtgtgagccactgtgcccggcccagaaaatgtggattcatatcttatgcttcttgctctcagggaagggaattctccacccactgttgaactccactttcaccgagaatcctctgcgcacccagcatggtgccgcgcagaccctgcctccatgcgggggtgtgcacacccgcttctcgatagtcatgcacgactgcagctgtcctttatccggtgctgattggtgcctgaccttgaactgagtgttgtatgtgttccagttaattcttagaatacactcatggggtggaggtcattattcccctttcctctccgaagaaactgaggttcagtgttgttaattaagaagcgtgcccagggagggccacaaagctgagagagtggggcttgaccttacattggcctcgatgccagccctttgctcttcctgctgtgtctctggcctgccttcaggtccagtgggactgctgtgaggtgaccctggtgtcacatgggtacactgtggttgtaatgaacctcatggggacagcactgagccaaaagtgagacagtaaaaccctcctagcactttcttttttttgagacagcatctagctctgtcgcccaggctggagtgcagtggtgtgattgtggctcactgcagcctcaacctcctggactcaggtgatcctcccacctcagcctcctgagcagctgggactacaggctcgtgccaccacatgggctaattttttttttttttgagacggagtcttgctctgtcgcccaggctggagtgcagtggcgcgatcttggctcactgcaagctctgcctcccgggttcatgccatcctcctgcctcagcctccagagtagctgggactacaggcgcccgccaccacacccggctaattttttttgtatttttagtagagacagggtttcaccgtgttcgccaggatggtcttggtctcctgaccttgtgatccgcctgcctcggcctcccaaagtgctgggattacaggcgtgagccaccacacccaggccacgccagctaatttttaaaatttttttggtaaagatggggtctccctatgttgccgaggctggtatcacactcttggtctcaagtgatcctctcacctcccagtgtgttggaattacaagcatgagccactgcgcctggcccctggctctctttttaatactgctgttctttcattgaaaacatagtacctgcatgtagaaaaaaatcagtcaggacagaatgaaaagcaagaatcattcccacctggacccccagtgcccatcctgagatacagctaccttttaagttccttgactcagaaatgtttcatgtgagccacagtcatgccaggtcgaccccttccctcccatccacactggcacttggctttcctggtgcttctctttacgttctttttttttagacagagtttttgctctattgcccaggctagagtgcaatgatgcaatctcagctcactgcaacctctgcctcctgggttcaagcgattctctttcctcaggttcctgagtagctgggattacaggtgcctgccaccatgcccggctaatttttgtatcgttagaagagacgacatttcaccatgttggccaggctggtctcaaactcttgacctcaggtgatccacccaccttggcctcccaaagtgctaggattacaggcatgagccactgcgcccggcctctttacgttcttatcagcatcctatggagtcaaacttcccttcctctttcatcagctccttggaaggaacgcagtggctggcctgaaccaggtgaataaccaagggctgaccccgctgcacctggcctgccagctggggaagcaggagatggtccgcgtgctgctgctgtgcaatgctcggtgcaacatcatgggccccaacggctaccccatccactcggccatgaagttctctcagaaggggtaagacctcctcccctccccatctgctggcctgctgggctccagctctcctgtcacctgtcccgtgcctgaggcaagcagtatccaccatagatcttagcatctccagcctcagagcagaggccccgggttcacaagcctcattaggccccgcctggcccaaagaaggtgctccatcattgtatcatgggtaggaatctcggttcacaagttcagctgtgcaaggaggagactttaaaatttttctggctgggcgcggtgtctcacgcctgtaatcccaacactttgggaggctgaggtgggcagatcacctgaggtcgggagttcgagaccagcctgaccaacatgaagaaaccccatctctactaaaaaatacaaaattagctgggcgtggtgacacatgcctgtaatcccagctacttggaaggctgaggcaggagaatcggttgaacccgggaggcggaggttgcagtgagccgagatcgcaccgttgcactccagcctgggcaataagagcgaaactgtctcaaaaaataaataaataaataaataaataaataaataaaaataaatttatttaatgtaccttaattcctaggagtgaatctccctctataaaactggagacaaccaatcttagccctctttggggtctcctctttccagctcccctccaggtggtgctccagttctggagtctgatgcaaccccaaggcccacctggcccctcctctaacccagcccagcctgatctgaacagccccccgatggcttcagtgctccttggtttcttgtgtgcccagctcaaagcctgggaaatgcttggtaaggtggccgagtgcccgtccacctagatgcctctttcctttctggctggtggcacgttgggaggcaggtacaggctcatgttttgggagcctgggaacccctggtgtcaggaaaattgtcttcaaaggggtaggggatgagataaaaagataaatgaatatctcaaatctcaaaatactatctaggccaggcgcggtggctcacacctgtaatcccagcagtttgggaggccaaggtgggtggatcacctgaagtcaggagttcgagaccagcctgaccaatatggtgaaaccctgtctctactaaaaatacaaaaattagccaggtgtggtggtgtgtgcctgtagtcccagctactcaggaggctgagacaggagaattgtttgaaactgggaggcagaggttgcagtgatttgagattgtgccacagcactccagccagggcgacagaacaagactccatctcaagaaaaaaaatactatctaacaggaacaacatctagaatgaatgaatgagccaatgagtccttcgatcctggcactgtgctaaagcaccagcctcaccgaaatgaataagccactccaggacaggagacaccccagccacccagaatctcatagcgcagtgccagacaagcagtgagaaggcatggacgggcagcactcaggcagggaggctggcacttgtgcctgtcctcaggttgttccttcctctgggagctgcatccaccttgctagccccatggggcattgctagcccttctaagggctggaccaagcctggacaaaccctcctttccttgaatctcccaagcacagccagaatgagctagagctttcagaaatacttgaccaaacagagaagataccaacacccccagccccgcagtcaggttccccatttgcaggttgtgacctgagtggacaccaggtgatgctcttctctacccagagggctggcacatggccccactcttgcttgtctccagccaccctgagctgtactgggcaggagctgtaattgaccagttttctctctcttcaaacaacctcagccctcaccggtccctctgtccccacacaggccatcctgggtgggtccagcgtcccatcacataagaggatctttgcacagaagacaaaggaagaggctcctaccttgagtggagcagggagatcccttatcgacttggcagccagcacagccctactccaagaatcccacggcctcagtgttactgacaagtggttccctcacagctcagactaggagctccctcgctgtttttctttttcttttcttttctttgttttgtttttgagacagagtttcactctgtcacccaggctggagtgcaatggcatgatcttggctcactgcaacctctgcctcccaggttcaactgattctcctgcctcagcctcccaaggagctgggattacaggtgtgcgccactatgcccagctaatttttgtatttttagtagagatggggtttcatcatgttgaccaggctagtcttgaactcctgacctcaggtgatctacttgcctcgccctcccaacatgctgggattacaggcgtgagccaccgcgcctggccacctctgctgtttttcaatgcagctgacctttcccacaaagctcggtttgtgcctgcggttctcagatggttaagcccctgctgaggaagggaaacagataatcccagacagtgagatggaggctgagactgaggatgcctgggggctgcactaggagctcagagacggcatcaggcagctggagttcagggaaggtttgggggcagcagagcccgagccaagccatggacactagccggagctggccactcgggtgaagacttggggggctccagagggcccagggaaagaagctgggcctgactccatgtgcctagtgctgagcaccaagcgctggcataagggctgtagggagctgggcagcataaatcctgggcctgtgctgggcacccctaataatagagaacagcagctgaacactaacgctgtcccagccaccggcttagccttcatgtgggctatttcactatagcccagagagctgatgtattttattccccctctaaagctgagggccaagtgtggtggctcatgcctctaatcccagcactttgggaggctgaggcaggaggatcgcttgagcctaggagtttgaggctacagtgagctatgatcatgccattgccctccagcctgggtgacaaagggaaatcctgtctcaaacaaacaaacaaaaaacagatgaggaaaccagggcttagagagattaagtaatttgctcaaagtcaggcagtcagtaagtgccagacctgggaattaaacccatgtgggctgtcctagtaattgcactaaaaaaaaaaaaaaaaaaaagctttattgagatatagttcctattccatacaatccacctattgaaagtatacaatgattctgatatattatgtttattttttccaactgtgatagattatatataacataaaatttgccattttaaccacttttgttttttgtttttgagacagagtttcgctctcgttgctcaggctggagtgcaatggtgtgatctcggcttaccgttacctccacctcccgggttcaagtgattctcctgcctcagcctcccgagtagtagctgggattacaggcatgcaccaccatgcccagttaattttgtattttttagtagagacagggtttctccatgttggtcaggctggtctcgaactcccgacctcaggtgatccacccaccttggcctcccaaagtgctgggattacaggcgtgagccaccacacccggcccattttaaccacttttaagtgtacaattcggtggttttaatcacatttacaatgttgtccaaccattacccctttctaaaacttttcttatcacctcaaacagaaactgtaaccattaataactcccgattctcccctccccacagcccccgataagtcccatatcctctctgtctctcagaacttgcctgttctagaacctcgtatcagtgaaatcatacagcgtttgtccttttgtgcctggcttatttcacttagcatgatgtcttcaaggctcatccatgttgcagcacgtatcagaatttcctttctttttaaggcagaatactattttgtttatccattcagtccttcactgatagacgcctgggttgtttccaccttttgtctgttgtgaagaatgctgctgtgtacatgggtctgcaaatgtccattcaagtccctgcattccgtcctttgatacttccgacctcaggtgatccgcctgcctcagcctcccaaagtgttgggattacaggcgtgagacaccgcgcccagccagaaaaattttaaagtcttctccttgcacagctgaacttgtgaaccgagattcctacccatgatacaatgatggagcactttctttgggccaggcggggcctaatgaggcttgtgaacccggggcctctgctctgaggctggagatgctaagatctctggtggacactgcttgcctcaggcaccgagtagaaagcaattgtgctctttcccactctgtcatactgcttcctatagcatgcaggtcactgtgtgactcactgacagtgtggtaaggaggtggagggtggctgtgtgccaggcacagaactgggctctgaaatgcctggtcttccttacaccccagccactcctctcagcactctctccatgttgctcagcttctggaggccaccagtgaggaagctggggcttgacttcaagcccatctgactctaaagccagtaccagggagggtgatcattgctggtggcagcatcaggaaggcttcctggaggagggggttagttgtgccttgaggggctcagtacagccttaaccatggtgagtgtgctggttgggtttgctgaactttgtttgcagtgatgctctctgtaagcagtagatgaagctccaagtcctggcttcatcccacgccacgcagaccctagcttctgctcaccaaccggggcccctctctcaccaggtgtgcggagatgatcatcagcatggacagcagccagatccacagcaaagacccccgttacggagccagccccctccactgggccaagaacgcagaggtgagtggatcctgaggtgggtgggtggggcagggggccgggccccgcaggtcctcagggccctcaggaagcaggttcccgagaggaccctgaggctagcacttgggggctgaccttgcagtgggtgtgcaggcagagaagtccatgaagagctgggatcctggcagggctctgctgctctctggctgggcggggggatccgccctgtgcctcagtttcctcatccatgaattctgctttggcgatgtgatgaagtcagcaaggcagtgtgtgacaaaactcggcacaaattgtaaagtgcttcccaaatagaaggtggcgtgatgatgattgtattattagtcaggattctctagagggccagaactaacaggagatatatatatagagagagaggggggtttatttttttattttattttttttgagacggagtctcgctctgtcgcccaggctggagtgcagtggcacaatcttggctcactgcaagctctgcctcccaggttcatgccattctcctgcctcagcctcctgagtagctgggactacaggcgcccgccaccacacccggctaatttttttgtatttttagtagagacgaggtttcaccgtgttagccaggatggtctcgatctcctgacctcgtgatctgcctgccttggcctcccaaagtgctgggattataggcgtgagccaccgtgcctggcctaaagggggatttattaaggagcattaactcacacgatcacaaggtcccacaataggccatcgcaagctgaggagcaaggaagccagtccaagtcccagagctgaaggacttggagtctgatgtttgagggcaggaagcatccagcacgggagaaagatgtaggctgggaggctaagccagtctagccttttcacatttttttctgcctgctttatattctggccgtgctggcagctgattagatggtgcccacccagattaagggtaggtctgccttcccctactgactcaaatgttaatctccgttagcagcaccctctcagacacacccagggtcaatactttacatccttcaatccaatcaagttgacactcattattaaccatcaagatgatgatgatgatgatggatgatgatggtggtggtggtggtgctgggcctagctgcacacacagggagcctggctgggcatctcctctgagttcttcccctaagctaagctctgtcctcctgggaggatggaggcctctggtctcatcaccaggaagcacagcttgacagagaatgggatgccccagagttcatggcctacttctcaatgtgatgggccaggagggagggcactgccagcctcagggtacctctgcattccaggagccggacaccgagtcaggcccttccgtgtaggtttggtcactcattgtcatcacatgctgtgaggtggggacttgcattcccatcttcacagaagccctgaagtgcacatggctacagtgacccatccaagcgcaggcagctgggatgagtgaagctgggctttgggctcaggtctgtgactccaaagccaggctcccctccctgttcccaaggctctgccagggatgtgcattgccaaggcccagtgagaggtgatacctttgcagggttccagggagggatgcagggagcggggtgcttcaggacaggccccagaggagcctttgcaaggagagtgggttctgttggcactaggaaaggaccagaagcctcttaaaacagtcagcacatctttggctttttgtccctagtcttgggatgctgatgggatgggaggcagtctaggcccccctagaactggggcctgcccctggaatcctcttgctagcgctttccaacatcccagtacctgtaggcctctcagagcagaagtggcagtgcccacgtgtcccggggtgcggcagctccccgagtgcctgtgctaactcagcctgaccgtctcccgcagatggcccgcatgctgctgaaacggggctgcaacgtgaacagcaccagctccgcggggaacacggccctgcacgtggcggtgatgcgcaaccgcttcgactgtgccatagtgctgctgacccacggggccaacgcggatgcccgcggagagcacggcaacaccccgctgcacctggccatgtcggtgagcccaggaccgcgtgtcctgccctgtggggccccggtgggaatgcaggagggctgtccggactggagccctcctccccactgtctccctcctatcgtcagctgctccaaatcatcttcccacccaaagctcagttcagaccctgactcctccctcaggaagccttccaagtccccctctcagcccaaaataacaccacctcctgtgtgctgtggtaccttttccacctgtgcccccatttggcacttgcatggcacgagagggaaaaatgacagctctggccatagactggccctgagcaagccatgtcacctgtcagcctcgatttcctcatctggaaaatggtggtgtcaatacttatctggaagagttgtggaaaagttatggtggacacttggtcaccctctacagaatgtctaagtgacacacgcagtacctggcccgagtgagcatcctgcttcccttcactggtccgcgtgttgctctcatcttccctgggaggctgtaagatcctggcaggcaaagcctgagtgtgcagcccagcagcctgtggcaggtgccaggcatattcgttggtttattatagaacacagttcctgccctcaaagcccttactgtctggttacacatctagagtatgaacatattaaacctagcagaggaggacgttactgtgttacagacatatgtgtgtgcatgtattcttttttttcgagatggagtctcgcactgtcgcccaggctggagtgcagtggcgcgatctcggctcaccacaacctccgcctcccaggttcaagcgattctcctgcctcagcctcccaagtagctgggactgcaggcacgtgccaccatgcccagctaatttttgtatttttagtagagacggggtttcaccacgttggccaggctggtctcgaactcctgtgttggccaggctggtctcaaactcctgacctcatgatccacccgccttggcaccccaaagtgctgggattacaggcgtgagccaccgcgccccaccgtgtgcacgttttctatagcaataccgtatgtacagaagtctgtttactgagtctcagtgacagaacatgagagacccccgggactctaaaagctgattcaggacacattcagagacatcctgttttataccaaaggtcaaaacttggaagagatgttgttgcccaaaaggctgaaactataaatagtttcatttttgaaactgtggacatttttagcactgggtgggcccttggaatgatctaactcagcagttctcaagttttttggcctatttgatccctttatactctgaaaaattattgaggatcacaaagattttttaatcatctggattttctttatctatatttaccattttagaaatttaaagtgtgaaaatttcaaaatattaattcatttaaaaataacaataataaatatatatgcctactatgtacccacaaaaattaaaattaaaaattttttaaaaaacttaaaaaataactggccagctgcagtggctcgtgtacaccagcactttgggaggccaagatggtcagatcacctgaggccaggagttcgagaccagcctggccaacatggcgaaagcccatctctactaaaaatgcaaaattagctgggtgtgagacctctgaaagggtatcacgtgttcacaggggtccccaggtcttactttaagaactgctgatagactttggtcatcttcatcccatcttcacagtttttggcatattcatcaaccacctttacaattatgtacttaatcacctcttcaaattggcttacttttatttatttattttgagacagagtttcgcttttgttgcccaggctggagtgcaatggcacgatcttggctcaccgcaacctctgcctcctgggttcaagcgattctcctgcctcagcttcccgagtagctgggattacgttcatgcgccaccacacctggctaattttgtatttttagtagagacggggtttctccatgttggtcaggctggtcttgaactcctgacctcaggtgttccacctgcctcagcctcccaaactgctgggattacaagcgtgagccaccgtgcccggcctggcttacttttaaactgacttaaatttattttgagagaaatgttgcatcactaccataaatggccatccatccatccagtgccaaccataaaaggtaaccaatgcagggcgcggtggctcacgcctgtaatcccagcattttgggaggccgaggtgggcgaatcacgaggtcaggagttcaagaccagcctggccaacatggtgaaaccctgtctctactaaaaatacaaaaaattagctgggcgtagtggtgggcacctgtaataccagctactctggaggctgaggcaggagaattgcttgaactcggtaggtagaggttgcagtgagctgagatcacgccactgcactccagcctgggtgacagagtgagactccgtctcaaaaaaaacaaaacaaaacagtaacaacaacaaaaaatcacagttaatgctgaaaacacacacatatctgtagccatagaagtcctaatagaatgtgaagaactgtttggaaaaccccattctagacccacagcttcattctctaggcagggaaatcgggtcccaagaagaggaaggtgacaaggccagagcccacagttccaggtggccagtgtgtcctctgaaaccatgccatgctctgcgcccctgcccggcctccaggtgtggaaatgtgtgacgttcttcgtggggacactcccccgaaggctgccattaggggcacgtgtgttcggttacccctcagggatgacaccctggactgggtgggcaagatggccttccctgccctcacccaccctctccttgctactcctgaaagccatcagcagctgacctactgtgtccccatggctcctgggtcggggtcacagatgcactgcatctttggaggcggagctggcagagcaggggcgagtcacttctagtttctgcctgggttcttacaccctcccctgtgggtgcttttaagcctgtttgtcaggtccccagccatcaaatggcagactttggactaccagattgacttgggtgggggtgaggagggttccagtgtctccccgtgctgaggagaggcccgctgggtgagttgacaggttggggctggcagccaggggcccctttgttcttcacttccccggcagttgcacgtcttatcctctctccatctccaacagaaagacaacgtggagatgatcaaggccctcatcgtgttcggagcagaagtggacaccccgaatgactttggggagactcctacattcctagcctccaaaatcggcagacgtatgtgctctgcactctggggctggagtggggtgagggttgggtggatacagggaccgaggaggagggaagtcccaggcatcaggtgccagcatcctgtgctgacccgccctgctcagagctgccaggagcacctcgtactcagagagggggcttccttacccaagcacaagggccctgagcagtagatgcaggcccaccacggggcttgctataccagcatcctctcccgtgcagcgccccccacctcagggagctaagattcccagcaggggtggggacaggagagccagcagcagccttctttccccaccgttggggaattcactgatggaaccactggctagaatgaccaagggtgcatgcactacactgcacgagctctgggcatgcctgtgtgggcagagtgcatggccatgtgctgcacgctcgcacagtgagccttagcttcagagctggacagagcagatcctcctcaccagaggcctggagcccgctctggagggtttcagcagctgtgggggtcactgtgggcaggtacctgatggcagcagtgtgtgtgtgccagtgcacacgtgtgtgtctgcatgcaccgcatctatgacctccttttcagcaatcccatccatcaaatggagtaggtgccccctggctggctcattagtccctttggaaccctgaactatcacttagcatttttgagaatcactgaatgtggccatgggattcctgctttcttggctggagtagaaggaaagaaggggttcccacaggcatcgggcagggtgacactgacctcctcctcccatatcctccttccctggccttaggaagctgcttgggatgtaccagcctgggggcagcactccctgtcagggtgggctgaggcctctggagcagcccacgtgcccagggcctgggagctgggacaggggacggagtgtggaaaggaggggcctctcctttgcatgttgacatcatttctgatcctgtgccatctccccttccccaaaccatgacaagttgtcaccaggaaggcgatcttgactctgctgagaaccgtgggggccgaatactgcttcccacccatccacggggtccccgcggagcagggctctgcagcgccacatcatcccttctccctggaaagagctcagcccccaccgatcagcctaaacaacctaggtaggcctcgcctcccgactccctcttctccagctggttcccaggcccctggatcacagcaggccccaccaaagcaacaggatccctaggacggaagtcactaaaggaagccggggaggatggggccggagttgtcagcctctaggcagccagcaacccacagatcccagaggcctagggtgtccctggctgatgtcccatgctccgttgcccctgagaggatgtgtcctgcacacagtctcaggcctgggcatttccagtggcacccatgaggtggctgctgttactgccctcctgtccccagggcgttcagggtgggcagtgaggagtgctgtcgggggactgggggcccgggccctctggcttcacctgtccctctggcttcacctctatcacactgtttgaatctcggttgggcctgagacctgtgtgcccccttcctggccccgtggtgactttcagacgttgaatgtggccaggcagccagcatctgccccggtgcattccttggtgcccagggagacatccccagactagacaggacccttctctggactttctgtgggctggcccactcagggacctccattgtttgggagcggggtcccctgaacagagggcagccaggagccagtccttggtgagccagacttcactgtggaggcggcagcaccttcagccagggtagcccgaccaagcctggaactctggagaggcaccgtgactgtggcttctagtcctggctccacctctctctcccctcccaggaactccccctccacctcccatctttatctctcaattttgcaggcagtcacccaagccaggccggatggtgggcctggggtgcggcgtcagatgggtaacgccctgggcctggagaggccaccgagcctagccatgcggcattagctctagctctcactccctaatccgtccttcttagctgcgcacacaccacacgccccctcccctgcaccctgtccccggcctctctcagccactcttctgcttcccttgttcactgtggagccgtgtgccctggggagggggagacaccgcttcgcagccctcggttctgctttgctgcttctagactctgcacagtggtggggggctgtcagagttggggtcacgcgggctgctgcaccaggcacctggggactgggctgcttgtcaggaggggcagctagtcagttgggtggacgtcaggcaggccttggacacaaaggaagacatggacagagtggatggtgggcctgatcccggaggccactgggatttccagacctgggatcaggacgagggatgtctcctttcatccatggacttaaaccccgaggaacgtcctgactcagccttttgactaaatgaccttgggtgaattatggaccctcttagagcctcacctgtcaatagggaataagaattcttaggccccaggtggttattgcagcatcggctccgatgcaagaagaagcactttgtctgaagaggacacgcaagggtattcatgccttggggtttcaagaggaagagattgaggggaacctgggagctggctgggcagggtggggagcccttcccagagcagtgggcccccctttccactccagcccatttctctcctgtggcctgtggctcagctttctcctgggacagagtccttcctgtggggaagggacagatgacagggggagtggggggatgagggcgtggccgtgggcgaggcacagcccaggtttgatctagggacctctggggtagcagggcttggggacccacctgaccacagcatgccctgctctgtgcctcacagaactacaggatctcatgcacatctcacgggcccggaagccagcgttcatcctgggctccatgagggacgagaagcggacgtaagtggatcgagatcgggggcagagcggggaacgtgtgcgctttcctgcccctcacccaccccctgttgtgggctcagggctttactctctgcaccctcacagccggcgaagtggctctgctcctagtcttatagttctcagcagagacagaacatggagagcctgtgtcgctcgttcattaatgctgggcggtgcaggctctggagaccagcccagggtgccaggcttcttggacttggtggggctggcgcagtgttctggcctccctccctgatctccttatggctagaagagggggagatgcctgggtcccccctggggagatctcagcagctgcttcccactgctcctactggcttccttaaccacctcccactgcagaatagtggcgtgggctgccttccccagcacctgctgtatacctagtcccattgtaagaggcgggcctgggtgacaggatgcaaagagaagacgcccaggccttgcccttcaggcataatcccgggtgcttgaactcagtgccagctggcacggcaaggtaccaggacaaatgcgtttccagccactgtgctgtcgccacctcccttgattgctgcagttgattcatttattctttattagtctctcatgttcctaatagccttcccagggaggaatttgtaaccttgttttacagatgcagaacctgagcccctgagaggtgaagtgacttgctcaaggtcacacggagtgagtgtcagggtggcaactcacagccgggtcttccgaacccacgtcctttgtgctaccgcaggctctctctgggttctctgtggactctatacctagtgccagccctctgcagggaaagctctcttctcagaatcagaggcagctccactcccagggccaggcagtgatcgtgcagctctgtgggtcctctcacttcgcactcacttccatgctaccctgttgtgtgccctggaggttcccctgccccatcagcattccctcccctgtgccccctgcatgctcttgcacgcgggcacacgcacacacacacgcacacatgcacgcacacacacccacatgcacatgcctgcgggttgcccacatgcatgtgttgcccacatgcaaacacatggacacgcacacacatgcacacatgcaaacacacgtgcatgcacacacatacacatgcgcacacatacacatgcatgcatgcacatggacacccacacacatgcacacacatgtacacacatgcatgtacatacacacacctgtgcaggggctgaggtgaggcagctgcacctgaaggggggacccacatttcccaagggaggaaaagcagattccccagattctggagcctcagaaccctgcctggagcggggctgaggcaagagtcaggagacccctcggtagctccccacttgggccttccaagctacagagccctgcgccctctgggttgatctctgtcgccagccccgcatcttcgggagtttgctttggcctccagcaacagtgtagtctctcccctgccacctctaggcttgctgtggggctgggtacctggtccaggaaaagacccctagaggtgggacccgggcctcctccatttatcagccctcttgggcacctcctgcatccccttgacacacagcgctgcccagagcagaggcggcttctgccctggtggagcttccaggtcagcgcaggagagagtaaaagaaagattgcgaatggaatggaagcagcctccaccaggaagcaggtggagcagcaggcgggctgtgagggagggtctcgatggcatcagggcaggcttctctcagcttcatcaagctgagatgggaagatgagaagatcagaggaaggttccagactgaaccaaccacaaaggcattcccccagggcatggccaatgaggacaggcaggatgtggggagacgtgtcagggcgcgctggagagcatgtgactcaggaggcggcagacctgggtccaggtccagtccgcatccatatgacttggttcccgtcacctaacctctgagctacactccctccgtcactcaaaaatatgcacagagagtaggcgcagtggctcctgcctgtagtcccagctactcgggaggatcacttgagctcagaaggttgaggctgccgtgaactgtgattgcaccaccacacaccagcctgggtgacagagtgagaccctgtctctataaataaataaataaataaataaggctgggcacggtggctcgtgcctgtaatcccagcactttgggaggccgagacaggcggatcacatgaggtcgggagttcaagaccagcctggccaacatggagaaaccccgtctctattaaaaatacaaaattagctgggtgtggtggcgggcacctgtgatcccagctactcgggaggttgaggcaggagaatcgtttgaacccgggaggcagaggttgcggtgagccgagatcgcgttattgcactccagcctgggcaacaagagtgaaactccgtctctaaataaataagcacagggatgtcagggagggtctgcctcagaggcgtttgggacaatgacatgagctaatgctggtagcacccctcccatagcccctggcatgaacctctcccttcctccctgccccctcctcccctgcttcttccaccttgtgtggaggccctgatactctgtcactgcccattcctggcctggctgtagggtccccgcccctccttccccagccttatttaattccaacagactttatcaggcacctgctttggatcaggcctgatactgaccaaaatcaggtgtcccaagttggggagactggccgagatcctgctgggatggcgcctggtcagtgatgctatcccccgaccttcctttccctttctctgttgcactctccagcccctgaaatactagacatttgttcctttactgccctcacccccaccctcgctgtcctgcataggacagaagttcctcgggtccgtctgggtctgtctgccaggacacagctgcaggggacaagggctatgagggtggatgtaaagtactgggctgtggcaggaccctcctctctcccactgctgttcccactgcagccacgaccacctgctgtgcctggatggaggaggagtgaaaggcctcatcatcatccagctcctcatcgccatcgagaaggcctcgggtgtggccaccaaggacctgtttgactgggtggcgggcaccagcactggaggcatcctggccctggccattctgcacagtgagggcggcccctggggatggggccaggcggggctgagacctgtgtcctcaaggggccgagtttgtcttcagggctttgcaaaaagagagtggaggagtagaggagggctataagcactttgaggaggcaggggcggggctgcaggtgctgaggtcccaggctggaaggagaagggctgggcccatgggcttgggtttggggatcccccgccctctggccacagagggtagagctggctgtgtgaaattttggcataggaagcgtttcctatcgactgccttaacccctcctcccctcacccctgcaaagcaggcaccaggggccacacagcctgctgcacataaggaatcccattcccagggtgcacgcagcaggcagtctcaggaatgaggagccactgagcctcaggatgccagagccctcgcctgcacacttcattttactgggaaattttactgggaaattaagttcccaggtggggagggatgacgtgaagtcacatagctcatccatggggtcgctgggctggagcacagtcccctagactcccagcctggcacctcctaggccacagggcactgtgtagtctcctttcactgccgctttgcgaaggcgcctggcttgctggacagatagccgggtggtcagtgttgtgacggctcctctgtggagctgtctgagcttctaggtgctgacaggtggggaggggcactgccagatcagggtcctcagctccccccaaccccctggacattgtcctgggactcaacatgtctgactggtgcccctgcccctgtgctggtcagattccattttctccagagcgcccccacatctggatcctggtcatgcaaagtcttggaggtgcccggggaggactccccaccctagggtgggtatcagggcctgtgggccaggcctgtgttggatgctggggatgcagagctgagccaggcataccccagcctcaggagcagggggctcagccagtccaggaggtgctggggacagagtcccatgggcggaggaggagagtcatctgtcaagttgccgggacgttagtgtccacggcggtttattgactggtatttcatttccttttgatgattctcaccatagccctgcggggtgagcagatggggaaactgagaaccagagaggatcagccagtgaattgggcagtcaggactgggtctccagcagtgtgcccagctctctaccccagcctcagggtcccagcatcccctctctggtcttccacagggtccaagggcgggcacgaggtctgagcaggcagactgggcagagtcctagcttcttctccaaaagggccacgtccttcttcagggaccatttcttccccatccggggtcttgagactcccaggggccatggaggggatttgagaggtctcctggctgatcctccggtgtgggcagatggcctcctttcagctaccctctgcttgtacatccctggccctggggaactcactgcctcacgggggaagtggggcagcttctccttcctggaggtgcagccggccccttggccctgtctgttctgaaggctcaaaggacagggctattccttgttttctgtgacaaacaacgtgggtctagcttttataagcttttactcttgaggggctcttctttaaggaaaataatacaaaatcatgaatacaagatgaagtgcagagccgtggggcttcagtggtttttgagtctctccgttgcccaggctggagtgcagtggtgcatcttggctcactgcaacctccgctcccgggttcaagcgattctcctgcctctcagcctcccgagtagctgggactacaggcgcccgccaccacacctggcgaatttttgtatttttaatagacggggtttcaccatgttgggcaggctggtctcaaactcctgacctcaagtgatccacctgcctcagcctcccaaagtgctgggattacaggcgcgagccaccatgtccagccggaaggaggtttctctctgtctgtctgggaggttgcaaaggaagggcccagaatttgggtttgcttaggcctcggtaaacccgcttcctcctgccacctcctgcgttcaggcgctctgcaggctgttctacgggagccctgcgtgtggccgctgcatctccccgcctctgacccctttgttcctaggtaagtccatggcctacatgcgcggcatgtactttcgcatgaaggatgaggtgttccggggctccaggccctacgagtcggggcccctggaggagttcctgaagcgggagtttggggagcacaccaagatgacggacgtcaggaaacccaagtaagccctggcgcactggggccgtggccgcagctgtgcccactgtggctgttccctggggacagagggctccctgtcctgctgagggagggggaagagcgccccacgcttgaggggagcagagggaacccccttcccagggaggcagagggctggggtgtggctctcacttgggcatgcagacacctgctgagcgcaggaggggcgtggcctggtgggcctggctctgccctgcctggctctgccctgcccggctctgccctgccggctctgccctgcctggctctgccctgcccggccaggggtctggggcttgcctggagagagcctgggccacccttctctgagaccacctgggcagaggctgggtttttgctgcccaggcaaaaggaacccactggcctttcaaatgacacggctaaacattttctcacatttcagacagcactcgctcccaggatcggactactaggttataatcagagggcttcagtcttacctttaatttaaggcctacaagacttgaactaatttaagtcagactgaaggagaaagtcacatttccaggaaacatttgtttgggaagcccaaatcctaggactaagcaatgcatcccgttcggggctggatgaatggtgtgttccaagaggagtgttttgagcatttctgagtgattttttcatattttgaaagtgagtgtcccccagtcttaggggcccggcatcccctctgcggtcttccctagggtccaaggccagggaccttcaatcttttttcccactctgtggcttgtctttctgctctgtggtgtttctaggtttttgttttttgttttttgttttggttttggttttggtggcccatgttcttaatgaggtagataatatttataaatatttttcttcttgtagtttgtgattttttcctttctttctttcttttttttgaaacagggtcttgctgtggggcccatgctggagtatattgctgtgaacacggcttactgcagcctcgacctcctgggttcaagcagtcctcccatctcagccgcctgagtgcctgggactactagcatgtgccaacacatgtattttttgtagagatggggtttcaccatgttgtccaggctagtcttgaactcctgagctgaggcgatcctcccgccttggtttcccattacaggcatcagccaccatgcccagcctagtttgtgctttttatttctcgttcataaacccctttgctgcccccaagcagcacacgattctcctgtgtcgagctggaaagctctctagatctgccttttacattgaggtcttttatcaacctggaattgatttttgtatgagggtgaaatccaagatccaatttaatgttttccacgtgattggccaatttttcccagccccatctgtgaagtctgtccttccctccgcttcctcagcagtgggtcaagcatccctctgctcttggatctgctccaggctgtgttttgttccactggttggaaagctgtctctgtgcccggaccacagagcataaaaaactaccgctgtgtggtgagtcctggtgtctgggtggcagatcctccaccttggccttcttcaaaaacatcatggctattcttgggggcagtagagagaagtggatacaagcatagaccctgaagtttctacctcttctcaaaaataggaatatgccaggcatggtggctcaagcctgtaatcccagctctttgggag

SEQ ID NO: 15729 - DNA, 70281 bp, Homo sapiens
ggaagtaggaggaagtagaagtgctgagtaagccgaggtgagtgacctcgcgggtgggcggggcctgggggtccgttccccaacttcctcggcgctccggactcccaagtctccgccggaccctcctttggatattcctcgtgtctccgattctgaggcatgtcctccattaacccttatgtgactccctgagtgcccccaccttccatcttttcatccccctgcgtccccaattcccatcccgagaccgcccgtgtctcatctcgaacttgtggaccccagggaccccagcttcgaccctgagtttctcccctgaaccccagtctcctccgtgtgtctccctcagtatccctaacttcccgagtcaatccatctcttctctttccccgaccctcagtgcctctttaggccccattggccgtcctaattttccttcctgtgctcctctaagtgctcacttgattccccacttcacgtccgtctccacctttcgtggtgcctctactcatttctcactccctgcttctcctgcctttcctccctgctttttttccttgcctttcctctctcgcgtgcctccagacctgcccccgacatgctccctccttcccctcagcctggccaccccagagtctcccacccctaatcctgtgtccacctcctgctcccacagatgacttggaagctggtgacagggagcatgtgaccagggtgatcatgggactgggtcggggcaagcctgtgggtgtgggacagggagggcacagggcaaggggacctgtggccgtatttttaatgggctacccacatgaccccaacgaatacctccccctagcttctgggtctttccctcacctgcctcttacccgcccaacaggatgtcaggcaggttcggtttggcaacgttgaggctgcacccttgggctgaatgcattgtttttgaatgcattgtttttgttagagtttctgcctggagtttggaacctgttttctgtccaagtctcagtttcctcatctgtgacaggggaactgtacctcctgccctcgtaagtctgccatgaggttcaaaatttgaatgagaaaatgtagaaggtaaagctttataaccagtatggccctgtacaaatacatgattttactgttgggtcataggcagaattgaaaggagtggaaagggaaagggctagaatgagaagacaaggagagaaggatgagcaggaggtcccttgtctttcagtgtatcatttggcagtgtttgttcatcacctcttgtgagtcaggctcttctgtatatgttctcttcaccattcattcagtcatcgtttatctaacaaatatttacggactgtctgatgttctaggctacccttggtgtggccaatgatattctcacttcacatgagaaaaagagggcgcatgagttgcttgaggtcacaccgatgaggttgaagctggaatctgacaccagagcctgtgtgattgtcctgatgtgtaaggtttgctactgtttaggacacttcttgttccttccgtggattactttcttgttacatgagagactccccaaaagggagtttccctcttactcagcagaatgacatcactaagagatacagaaaggagaaatttaaatactctgtgtgtgtgtgtgtgtgtgtgtgtgtgtgtgtgtgtgtgtgtctgcagacatctattgggtgtgtgtgctgggggaagtaggtaggcaaggagtaaggggccgtagtgaagagtgtgttacaaacttcactttgtagagggtggctccctgggagaatatgttctgtgtctttcacagtggattttgatagggtcatgtcttaaatgcctcttctcgttttcggatggtgatctcatccagtcttatttctttaagtgccgtctctattctgtcagcccacaaatttatatccccagtccagtccagacctttccctggaatgacatactcaaatctagttgcttactcagcacctcaaacttaggcttttcaaacttgaagtatttatttattgatttatttattttttgagacagagtctcactctgtcacccaggctggaatgcaatggcacgatctcggctcactgcaacctccacctcctgattctcctgcctcagcctcccaagtagctgggattacaagcatgcgccatcatgcccaactaatttttgtatttttgtagaggcggggtttcaccgtgttggccaggctggtctcgaactcctgatctcaagtgatccacctgccttggcctcccaaagtggtgggattacaggtgtgagccaccgcgccaggcctcaaacttaagagtttagaattgagctcctgttagttctgccctccatccctgaccccactcttcaccaaaacatgtccctcccactctctttctcatcttaggacataggagtattgttcattcagttgctcaggtcaaagctgtgagattatctatgatgcctctctgtttcttaccccacacccagccagagtgatcttgttaaaatgttgtttctttgcagtggcctctcctctcatggcacatgcctggccccctgttgcctctctgatgtcactggcttccttgcttttcctggaactcgctaaacatgttccagccccatggcctttgcacacgctctctttgcctagctattcatatgactttcatctctctccatcaggtatttatttaagatcaatttcttggtgaagacttctctcctcacccaatctaaaatttcactctccacctcagcacttcctatccccattctctggtttttctcctcagtagttaattgtcatctaaaacctttgtaaatatttacctgtttatcttctttattattagtagctctgtctaaaatataagttccaggatgtcagggattttgtggggttttttttggttggttggttgttttggttttgagacagggtctcactctgttgcccaggctggagcgcagtggtgcgatctcagctcactgcagcctccgcctcctgggtttgagtgattctcccacctcagtctcccaggaagctggaattacaggtgcacgccaccacacccagctaatttttgtattttttggtagagatggggtttcactatgttggccaggccggtcttgaactcttgacctcaagtgatccacccgcctcggcctcccaaagttctgggattactggtgtgagccaccgcgcccggccttgttttgttttaagacagggtctcactgtcgctcaggctggattgcagtggcacaatcacagctcactgcagcctcgacctgctagacttaagcaatccccccacctcagccaccttagtagctgggacttacaggcatgagagataccatgcctgggtaattgttaagtttttgtagaggtgaggtctcactatattacccaggctggtctcaaagtcctgagcttaagtgatcctccttccttggcctcctaaagtgctgggattacaggagtgaactgccgtgcctgaccagtctgttttgtttacgattgtatcctcagcggttagaacaatgcctgccacaatccatctcagtaaatatttgtggagtgagtcataacatgggccacactgtaccgtgccaccagcccaaagatctcttaaagtcacccctgtctcatgtgcttgggagctccagtgacagtttcggggcagtttgcttccagctgtggtccagccaagcggagtgaatgaaagagatgctttttccttttgtgaaaggacgttttgctctggctcacgtgagcagcagtgcattttgagacgagggccttggcttttggaatctaagagcctgttgagcaagcctcgctcagccaccttctttcagctttctcctgaaggcagtttgaggattaagagcctgatgctctggattccacctaattgggttcagatcctggcaaactgtgtaacctgtgccccagtttcctgtgtaatgtggagagacctggaccttttcttacaggtgtttggagggttaaatgtggcaattcggccgggcgcagtggctcatgcctgtaaccccagcactttgggaggtggaggtgggcggatcaccggaggtcaggagttcaagaccagcctggttaacatggtgaaaccccgtttctactaaaaatacaaaaaattagccgagtgtggtggtgcgcgcctgtaatcccagctagtctggagactgaggcaggagaatcgcttgaacccgggaggcagaggttgcagtgagccaagatcacgccattgcactccagcttgggcaacaagagtgaaactctgtctcaaaaaaaaaaaaaaaaaaaaagtggcaatttacccgaaactgtggtgaagcgtctggcgccctgtgggtgctgggcagcagtgggtgctgatggggtgtgaggggatgggatcaagccctttcccactaacttaggaaagaggttggaatgagctggggtcagagggaacatttgcggggacattttgccgggaggctgccttggaggttcagaggctcagatgacccctgtgttcattcagtgttttctcacccacagattgagcacctgctgtgtggccagccctttgcctagtgctgttcaagagtcagaggacataggcaggcaatcccccaccacaacctgccaccccatttcctctcttggggccttgatttctccacatgccaaacagggagaatgattgcaccttccttgtttctttttttttttttttgagacagtctcactttgtcatccaagctttagtgcagtggcatgatctcggctcactgcagcctctgcctctcgggttcaaagattctcctgcttcagcctcccaagtagctgtgattataggcacccaccatcacgccaggctaattttttttgtagttttagtagagatggggtttttttctcacacgttggccaggctggtcttgaacttctgacctcaggtgatctgcccatctcaccctcccaaagtgctgggattacaggtgtgagccaccgcgcccggctgcgccttccctgtttctttgtgagcttggaggtggatcacaagtgtgaaaccctttgccaaccgtgaggcatggtggccttgtgagaggacggaggccggtgtgtggtggcatgctcccgtgctgtgtggcacagacggagctacaggaaggaagttggggcagcttggcactctgagtggaccctgagtttccagcctgctctgtcttgactgggtgggaggagggtgctcaggagggtgtcactgctgccaggttctgctgccaggaccatccaacagttgttccaatcatgggacatcctgtcgtcagcagctggggctcgtgaggcctgatttccacctcgggcagttctgtgtgtgctcctggaatcccccacgtggccaagcctgtgaggtctgcttcctggcctgctgcctgtgggttcctgtcacgcacctctcgggcagctgtccggctcctctgctctcggcttagtcaagaaggaagcagaaggcttggagtctttcctgcttggactaggagtgagctcagcctaagtgccctgactatatataaagctgaactttccagaccgaagcctggggatggatcagtccgatcacttagggccgctcctgaaggagtgcaggtgctagatacaggttctcccggtggaggagcgaaccccttgtgggccgttagctactggtgggatttgagcatggtatttccctatccgttgtggagaggagcatggcagctcagagtgggtgggaacagtgtgtggtccctgttatcaccttcaagggaataaagtgtgtctgggggcttcagaggtgctggccccatgggcttataggtggttcattcattcattctcattcattcattcaccaaacttattaaacacccactgtgagtcaggaacatcatgccaggtgcttagggaaacaaatcaaagcgggttgggtgagcagcccaagccaacagatgcacccccattctcacatggtgtgtgttcctgtgggctgggccctgggtggtgtggggtgctggggagaagaggaaggcacaccaggctgcagggcggaggtgcgggtatgaattttcagaggagatggcacctgagctgtatcttcatggataagaagagatttgttcatttgtcctttgtggagcacacattcaggttaagaaagtggggaggatgggctacgctgatggagcgtatgtgtggtatccccaagtgcactgagacacgagtttgacgtgttctgggaagatcgatggtgcggcgtggctggagtagaggtgagggatgagttggaggggtgagttgggccagctctcatggatgctggagtctgggctttccctgggaggtcatggggcgccactggccagggtcagcagggagacctgcagctggatttgcatcgtacagtgggcatggaggggtgtcaggctgggttgggaaccgtgcaggctggaagggcactctggtgctctgagcattcagagggggcagctgggccttgaaggatgagcaggggctccagcaggaactggagagcgcattccagggaggacgcaagtgcaggcccctttcactacagaaaagcagttttcacacagaccttccaaaggggaggagaggggactgcctgggcctggcagctgcggcaggtagcagcaatcagagggcagggaccgctcctcccgtgcctgagacctgcccagggtccttcagggaattcgtagctgaggaggaaccagatttttgggactgagttctccctcaccacccgctctgagccaccctcttggtcccttgtcctctactgcacttcttccggggcttggctcctcgtcatgagaggagcttccctgggcatggcgaggggcgtgactgacatagcagccctggacaagtggctccaggtgacctgtgttcacgttgatcacagcactaaccacggcccctcctctcagcaccttcccctctcgagccgtccagtcccagtgaaaatgctcaccgttcatgggtgggctgagcaagcccctgatctctgccttcctccgtgttctgatctgcttcatctgctgtgaaggcctctcgccatttcccccgctggcaaactcctgttcttcctggaaagttcagctaaaaagtcatcccctttaggggtccttccctcaggggaccgtgcacttggcgagacagggactggtcttgggtctctctgttgactgttttatgaacccaggtagtcacttccagggaactcatcagagatgctaccattggctccaatctccctctgttcccactcgaggttttttgtttcttcgtttgtttttctttctttctttttttttgagacagagtctcgctctcgcccaggctggagtgcagtgacatgatctcggctcactgcaagctccgcctcccgggttcacgccattctcctgcctcagcctcccgaatagctgggactacaggcacccgccaccacgcccagctaattttttttgtatttttagtagagacggggtttcaccatgttagccaggatggtctcaatctcctgatttcgtgatccgcccgccttaacctcccaaagtgctgggattacaggcgtgagccactgcgcccagcccgtttgtttttgttttttggtggacatcaactttaatttgccctttgttttgttttgtttttgaggcagggtcttgctctgtctcccaggctggagtgcagtagtgcaatcttggctcactgcagtctcgacctcaagaggatcaagcaatcctcttgccttagcctcccgagtagctgggaccacaggcgcacaccaccatgcccagctaattttattttatattttgtagagacagggttttgccatgttccccaggctggtctcaaattcctgggctcaagcaatccgtctgcctcagcctcccaaaatgctggaattacaggcacgagccactgtgcccggccttaatttgccctttgaacatgtacaattcagggcctctctgggcctcagtttcttgatctctgagatgggaagatgggataataatacttgttcctcccgtccttcagctcctccaggggaccctcacaccagcacactctctgtcagtcttccctcaatgaacccagcaggcaagcttggttttgacagaggatgggtgagcagagataaggaaaacggccagaaatatctggcttccctcagcaggggcaccaaaattggtacctggaaattgcctggcttggacaggcagaattgtcactgtcaacccccaccaccaaaggtcttgggtctttgtctttctgcttgtggtgtttgagagagctgcttgacacagccgaggtgcggtctgtgtcaggtgacctgggcatcctgggggtgcagggagaagcccaggtaaggaggaggaggggccggtcatcagtggggaaaagtgattgtctaccccacgggaaggtcaagggtaggacgctgtgagaagccagggggagagatgaagtgaggcatgatgcggggggccctcatccaccatccccctcttgcagctgtgctgggaagagcctaggctccagggtccaaggtggcagggacagaaggaagcacgtgtgagcactttctccctgctggcccgccttcctggttggcaatgccgtgagtgttccaggatgtggccccgtggctgtcatttcctttcttccacctagtgataacaatggccactgtttgtgtgcccacagtcggcctgtgtcccagacaccttccctccattgcgtcatctcgtcctcctgcctaccctgaaggctggatgccagccaagcctgtcgtttctgtggccatgctgtcgtgggtgtgtggggggcatcccctagccccaggctctggtggggggtacacaggctgggccattgacgaaggggtgtgtggaatctttctttgatttcactgcacccctggtgactttctccctcaatctgaggctcatgggtgctggatgctcttgactctctgcccttcctgggcgcacccctccgcgtccctgtgggcccgtcctcggggtagcctctctgcgctcttccaggccaggcctgagtcccacaggtccccatcttcccggctgcagcccccagaggctcagcctatactgctacttcctttgaaaactataatcgctttacatagcatctggaaaatagggaaaaggaaaaaacaaaagcccataaacccagcaccctcatctactcaatggcatgttttctgtcagtctatcttggtttgttttctatcaggctttgttttttctatgcataatatttactcagttaaatttttgttttgacaaactttctgtgagccaagcttgtggacggagatgaaaagacgagcagctgcctttgagaaactcagactctgggccagcccatctgggtgccagctttcactgctccacccactagctgggtgaccctgggcccgtgactttacccctctgttctttggtgttctcatatgtaaaatgaggataataatagtaaccagttcatagagtggttgtcagacagaatgattaatgtacgtaaagctttcaggatggtgccagcaagatgcacaggagtgtttggtaggaggatgacgaagcttaccgtctggcaggaggggcagttgtaacatgctgggctgtgatagtacagatgtgtttaaagtgagggagagcccagagcaaggagagagaacctggcatctggtgatggtgtatcaagaacattttaggccagacacggtgactcacacctgtaatcccagcactttgagaggctgaggcaggcagatcgcttgaacccgggcgttcgagaccagcctgagcaacgtggtaagaccctgtctttataatttttttttttttttttctgagacggagtcttcactctgtcacctaggctggagtgcggtggtgctatcttggctcactgcaacctccacctcccgggctcaagtgattctcctgcctcagtctcccaagtagctgggattataggtgcccaccaccatgcccagctaatttttttatatttttagtagagacggagtttcaccatgttggtcaggctggtctcaaattcctgacctcaagtgatctgccctcctcagcctcccagagtgctgggattacgggcatgagccaccatgcctggcctctataaaaattgtttggaagaaattacctaggcctggtgatacacacctgtagtcctagctactcaggaggctgaggtggaaggaggtagaggctgcagtgagccatgattgagccactgtactccagcctgggcaacagagccagaccctgtttcaaaacaacaacaacaaaaacatttttaaggaggaggctgagaaccacgagaaccaagcttggatttgaagaaggatcagggctttctcagacagaaaaggagaggaagaacattccagatagacatcattgagagatggcactgagccttgtaatgggacactgcgaacttttcttcagttgttatgatctttttttttttttttttgagacggagtttcgctcttgttgcccaggctggagtgcaatggcgccatctcagctcaccgcaacctccgcctcccaggttcaagcgattcttctgcctcagcctcccaagtagctgggattacaggcatgcgccaccatgcctggctaattttttgtatttttagtagagacggggtttctccatgttggtcaggctggtctcaaactcctgacctcaggtgatccgcccgagtcggcctcccaaagtgctgggattacaggcgtgaaccaccgtgccttgttggtataattattagtattgatcttttttccttttcatgtgcctcttagtgggccccttgcttttgtcttccttctgtccccagggttgatcctgtgctcagcacataggccagggaagaatgtggctgtgacccagtgtccactcagatgtcctctctcccccagggcacccatactctgtccttagtgtcttttgtctggtgacatcttggcacagaggcagagggcggcctccgtctgattggcgcctggctttggtgacagtaccttaggaaggcagtgtattttctgggaacctaggaaataacaaggtatctaattccatcatcaacactggggacaatttccatggcagaaactatgactctgaatatgcagcgtaaagttaccacccagacactgctgctcctgagtctcgaatggcatcttctgcaggggctcccccacctgcccctgcagaaggtgcagttcgttcatttccaaggagcttgcttttgtgtgctgtctctcggagctctttgggaaacctgtggtagcaggaaacaaaggatttagaccaatgccgatgatccccttgctccgatagagtgtgacatgatgctggtcaccttttggtatctaggaggggggacattgattttgtttgcggaagtgaaatgatccatgctggcctctttttttttttttttttttgagacagagtcaccctatcgcccaggctggagtgcagtggcgcgatctcagctcactgcaacctctgcctcccgggttcaagtgattctcctgcctcagcttcccgggcagctgggactacaggcgcctgccaccacatctggctaatttttgtatttttagtagaggcagggtttcgccatgttggccaggctggtctcgaatttctgacctcaaatgatccgcccgcctcagcctctcgaagtgctgggattacatgcctgagccactgtgtctggtccatactagcctctttgagtgctgaaaggttatctctgtaacttatttagtgagaaccctccatttgcccagggcattactgcctataatgtatgttcacatgtgctatctcctttggtcaataccacacactacaggtgaggaaactgagtctctgctgggacactgggtcaggaagcaggcagttaaggtcacctgtgcacagtggcagcacagggggacagccttctaggtagccagcctggcctgagggttctgtcacttttacctcccactcagtgttgtttctctttctttcccctccttttaagatccctccaggcccaggatctggggacaacgctggtggggagtgatctgggtgtctgtgcaggaaaccgctgcactgggtgagatgggcatgggagactgtgcctggctgaccagagacctcgttttcttccagacagagggggaagacggtggggcctccccacctgccccgcagaagatgcagttctttggccgcctggtcaataccttcagtggcgtcaccaacttgttctctaacccattccgggtgaaggaggtggctgtggccgactacacctcgagtgaccgagttcgggaggaagggcagctgattctgttccagaacactcccaaccgcacctgggactgcgtcctggtcaaccccaggaactcacagagtggattccggtgggtgatgctcagcgggaacatacttctctcctttcactcccccacgtctcggattggaggtcttattggccgagaagcagtttctttgagtctctgtctgaggggtctggagaggggtgggagagaggggagactgtactcttggaccagagggaagggcttccgagactccacacttctggcccatcagtgtcccagcacgaggctgaggatggaagcctgggttgtttctggcctggaggctcgacctatatggacaaagggaagaaggaaggacagggagactgagagtgtccacatcagataaggcccatggggagaacctttagccctggctctttatttttggttttggtttttgttttttgagacagtcttgctctgttgcccaggctggagtgcagtggcgcaatctcggctcactgcaacctctgcctcccaggttcaagcgattctcctgcctcagcctcctgagtagctgggattacaggcacccaccaccacgcccagctgatttttgtatttttagcagagacggggtttcatcatattggccaggctggtctcaaactcctgacctcaggtgatctgcccaccttggcctcccaaagtgctgggattgcaggcgtgagccactgcacctggcctagccctggctctttaagggcatggccgttctcataggggctgcccagggtttgcttaggaaggctggacagagctgttgcctcttggggcatgctgggactcccctgggcctgaagagaaggctcaaaagccaggacaggcctgagggaaccgggccaacggcagagctggttgggaaaaggggagaagcagccaaggttccaaatgcaggccccagcagtgcttggcagactggcatctagttgggctcagacagatatccctgtttccgctcacctatccatctggctgtcctgtcagccatccattcaacatgcaccaagcacctccagtgtctccagagtcctgggcttcgggccagtcctggctggcctgtgagatgacaaacatgtcctgtgtctttaaggaacgtacagtctggtgggggaggtccggtgcaaacaggcgtcatagcaccccttgaggagtgctgtgacagagggagagcctaggaaacagtgtggatcacaaggaggtgattgagagctactctgcgtctggaagagtgaggaggagcctgtgtggcagaacaaaatggataaggtcgttccagccgtgcagaagtgtggaggtgtgagcctgcaggcaggtggctctggttggatcccaggtgcatgcagggctttggtgagagtgaggctgaaggaagcagctggggactcattctgactaaagaggcatggcaggaggggtctctgaaagtgtcaggctgggggccaggggctgccaccaacagaagagcaaggcaggtatcagggccccatccaatcaggtgagaattcagagcctggctccacaaggaacctgaggcagaggcacccacagcaggtgcttgggctaaatgcagctcagtggccagtgcaggcaccagttttaatacagtggggccattccagattctgagtgcagatggggctgagcagaccgccttccagctggactcgatcaggactgaccctggacggggcaggcttgcacttgtagcttcagagctccactgcaggcacagctgaccagggcagcgggtccactccttggagagctggacagccccacttttgaggtacacggccctggggataccactaatctccacgtaccaataatcaccaagttctgtcagttgtaaaatcccttgacaggattccagatttgtctcagccagcttaagccccagtgtgggcagacctccatcccaggaggatttagtcctttgtcagcagcttcttagctacacgtaagctattctgtggtactttatagtttacaggattttttgttttcttttttttttttttttgagacagagtctcgctctgtcacccaggctggagtacagtgacgcgatctcggcttactgcaagctccgcctcccaggttcacgccattctcctgcctcagcctcccaagtagctgggactacaggcacccgccaccacgcctggctaatattttgtatttttagtagagatggggtttcaccatgttagccaggatggtctcaatctcctgacctcgtgatccgcctgcctcggcctcccaaagtgctgggattacaattttacaggatgtttttaagtatgttgggttagcacattctctgccaatccgtggaggtgggcaaggaaggcagtattccattttatgcatgagaaaatagccttgggatgataagtgattcatcccacttatacacaggaagcagtgaagaaacagaatcagtgtcttctggttcccaattcatttctctgtgctgctgtgttgtttccatgtatgtatgtatgtatttatttttttgagacgttaagtcttgctctgttgcccaggctggagtgcagtggcatgatcttggcttacagcaacctctgcctcctgggttcaagctattcttctgcctcagcctcccgagtagctgagactacaggtgcgtgccaccatacctggctaatttttgtgttttttagtagagacagggtttcactgtgttagccaggatggtcttgaactcctgacctcgtgatctgcctgccttggcctcccaaagtgctgggattacaggcatgagtcaccatgcccggctttgtttgtcttatttctaaattttattgatttatttattttcacagtcatagctctggagtcttttttatcttctcccctctaacctgctcccacccgaacctttccatttcagcagatagcatcattgcaacgggctgtgccagatccagccatcacatccacctttccagccaaagggagggtggaagggcaggatgcagaaggtcaatctccccctcctcagggacatttcatggaagttgcacgcattggccagaacccggtcacatggccacagctaactgcaaaggatgctgggaagtgttgcctgtgttgcagacagccacgtgccagtcgaaaatcagaggttctttctccctccgtcttgctgctggctcgcttctccagaccacagtcattgtgcacgtgtctcctgctgctccggctgtggcctgcactcctctcatcctcttccaagctgctgtcacagcgctgtttccagagggcaaatctgattggtcactcccctgctttactccccaagggcttcctgttttcttttatttttatttttattttcattttttgagatggagtctcgctctgtcgctcaggctggagtgcagtggcacaatgtcagctcactgcaagatctgcctcctgggttcatgccattctcctgcctcagcctcccaagtagctgggactacaggcgcccgccaccacgcccagttaattttttttgtatttttagtagagacggggtttcaccatctactcttagccaggatggtctcgatctcctgaccttgtgatctgcccgcctcagcctcccaaagtgctgggattacaggagtgagccaccgcgcccggccagcttcctgttttcttaacacatcaggtgcttaatgacttaaaagggcccagtgtgatcaagtttctgcctctgtgttctcagctcatgccgccttgtgctcctggcctttgcccaggctcttgctgtggcctggaatactcccctttctttgcctgccttccttcctcttgccctcccctgacctgcaggctggattaggagtttctgctgggcatcccatggcacccgtccctgcactggggatcctgctttcctggtaggccacagaccttgtgaggggagggactgtgtctgttgggttcatgacagtgtgcccagcccccagcaggtgcctggcgtagatcaggtttgtggaacaaatgaatgtgatatattaatttagctttagagtattcattgagggctgctgtgtgccaggccctctgtgccacctgggtggagggtggaggactgttgcattgagggcagttgaaggagtgagctgggaagtgggaggtggaggatggggactgggatgcagggtttgaggttatcaggggtcccagaagcagtaatgccaaggcctaggctgtgacctggagtgagggctgcgatggggtggggtggggtcgaggctgtggaggagggtcatcagggcactgctggagccctggggttctccagggccgggggtggtcattgcagtgttctcccagctcctctcaacaccctgcggtctgtggagagcaggcctggtgcactggacttgcctctggccagggctgagtttctgccttctaaacgatcttcctcctgtgttgccctagaggcctctggactgtcctgagtacttgacgcgtgttagagtgagcatgggctgctagccttccgctccaggtggaggagtttctgttgttcttttgctgctgttgctgcagtgagctgccaggctgagcttctggatggacctgggggatggaattaggagcttctgaattcttgggttgtataacctaaggccggagagtcccacagcactgctgctgggcggagagactggaccctgctgatacagacagcgacagcagcaggagcatctgcagtttcccagcaggtcctgcatgcctgggcttggcactagtctaagtagtaactcatgttatcctcacgacagtcccacgaggtggggtcattactgacctcctattacagatgaggaaacagaggcttgcagaatttgagatcacacagctggtcagcgtagcgattattcagaccctgtcacctggctccagaacccactcgtttacctttcttacatcagggctgctttgtagtgtggcgagctgagtggagctccacccgcctgggctgatcctggcccttcctgcctgacctatggtgcgggggccctggctctccccgtgtgagcccccaggggtcacttgtaatatgcctgtgtacactatgatagcatagatacttctgttcctggtacagattaatcatttacggctggcattgacttgtaacagatgacatttgatgaaatcaaccagcctctcactggtatctcagcagaaacagggctgtacctcccaggcatcctgggaaggatgatagaagtgtgtgatctgtgcttccctaccgggagctgacttttgaggctctctggactgggactttgccataaaactgcttatcagaaacctcagataagtggagtgccctgtgtcctggccacgtactctggggccagctcctccatccattcagtcctcccacatcccatcttcaccaagcagagtggaaagcggcaggtctctgcgagaaaaggaggctctgtacccagccttcagtgagataactttagagtggggccttgtattccctacacaggccttgtccccgacacggcctctttgcccttgcttctccttctgctaagaatgctccttcccaactccttggctggacacacggctcctgctctgtgggcctgtcctgttcccactcagagcctcagcaccccccatgtggccaagacacagcccctcttgccttaggttgccgtgggtctgtttccacatctgtttcccctccagactgcagggctcctgagggacagggcctggggccaagtctcctctgcgttcctgatgcctggtggtgtgccacgctctccgtgggtgcacggtaaatatctgccgagtggctagatgtatccatggttgctgaaggccaagtgtgttgaccagagggcgtgggaaaggctccactggggtggctggggtagagatagaccttaaggggtccagaagactccaccagctggagggaaaggccctacagagacaaggtactaggaaaggcccagaggacagaggaggggccctgtggggagcctgtgggcaggaagggcctgtgctgggctttgaaactggggactcaggtactgctctagcgtgagggtccttggcattttttttggtccaggaccccctgaggtccctggggaatgagaacaggctcacacagccactttcaagaggtttgcaggtcccctgaggcttagccacagacccctcccaccccagcagagacacagcagaggcttctgagtggaggccaggtggcttcagcctggggttctagaagggagggaagagacacacccccgtgtgtcctccagagcctcagccttctccctgaatctcccctttgcctcctcactgtaacccacacctggctctccttgaaggacccgcttgccccgcagcctcctgagagttttctctcccagtccctctcccactgggcctggaggtggggtagggtcctccttgcccccagccttgaatcttctgtcaccctacaataccacttgctgtcaccccggtgataggtatctacgagcctggggtgctcccccacatcctcaaagatgtgagcccctgactcagcgttgcctctggttcctgaccctccacattcacatgaccacgcgctggcctttatcatcgccagtgacagcagctctcccgtaaatacaagtttcaagcaccccactttccagtctctgccttctgtctttccagttcattccctctagtcctccacccacacagtgcttttccccattgacagggaattgctcctggccgcttttcccagccccatcccgttcatgtgccttgctttgtacccagcatggactccatggcctgtcattgtcactccttcacctatacttcctgcctccttgcttctctctctcttcgtcatcctggcatcaccaccccagaactgcttggtttcagttctccaccatggctaggggaacatacctttttgctgactgctctcactttctttttttttttttttcttttttttttttttgacacagagtctcgctctgttgcccaggctggagtgcagtggcacactctcagctcactgcaacctccacctccggggttcaagcagttctctctgcctcagcctcctgagtagctggtattataggcacccgccaccacacccggctaatttttgtattttttttagtacagacagggttttgccatggtggccaggctggtcttgaactcctgacctcaggtgatatgcctgccttggcctcccaaagtgctgggattacaggcatgaaccaccctgcccggccctattgctctcactttgaaatcacgacatgagccacagtgagcctatgatgtggtttgacgtctttctgcatttctctgttcacccctctcccagaaggcatgcctccttccctcccctcagcctgcagccccttcccctccacgcttactctcagctgatagccctgctgctgtctcgctgagaaaatagaaatagccagaggagaattccctctaccccatgcacacacctctgtccccgcctactccacattccctgttgtcagcaccgatgtgtttagctgagggtggtccccccattcaaggccatcatctcctgtcatctacttcttgacaccatttgaacaattatctcccctctttcctacataacactttccccttttctactatatattttttgctatggattgaaagtatccccccgaaatcatatgttgaagccccaatccctcgtgtgatggtattaggaggtagagcactatgggggtgattaggtcatgaggatggagccctcatgaatgggattagtgcccttagacgaagaggcaagaaagagatgatctgtctctgccatgtgagggcacaacgagaagatagccatctgcaaaccaggaagtgaaccctcatcaggaactctatcagccagcaccttgatcatagacttcctagcctctagaactgtgagaaataaaggttgtttaagcctcccagtctgtagttttctgttataatgtcctgacctaagttattttccatcgctatacaatgggttatttttttctttaaaaaaaaattatttcttgactctactttttcctccagagactgcttatattccactgtcttcattcttctcctcctgttttctctctttaaacttttcaaaaatagcaaaatataacacatatagagaaaatgatatacagctcagtgatttatcacaaacacctgtgtaaccaccactcgaatctagagataggacattacagcaccccagaagccctccttttgtcccctcttcccaaagaagggtaaccaataacttgccttttatgataaaggctttttttttttgagatggagtctcactgtgttgcccaggttggagtgcggtggcgcaatctctgcttactgcaagctctgcctcctgggttcacgccattctcctgcctcagcctcctgagtagctgggactacaggtgcccgccaccacgcccggctaattttttgtattttagtagagacgaggtttcaccgtgttagccaggatggtcttgatctcctgacctcgtgatccacctgcctcagcctcccaaagtgctgggattacaggcgtgagccaccgcccccggccaagataaaggcttttctatctggcttctttgttagcattttgttggcgagattgatacgttttgtgtgcagctgtctgtcattttcattgcaatagaattccattgtctactatatcacagttactcattctactactgatgaaaatttgggttatttctagtttttttggtgcatacatgcatacatttctggtagacatacctagaagtgaactggctgcattatgggccataacttgtcttcaacgttagtaaataataccgcccgtctgttttccaagcagcagtaaatggcactttctgttacttcatatcttctgttacttggtactgtcaggttttaaaattttagtcattctgtcgggtgtctagtagtatgttattgtggttttattttgcatttgcctgattgcaaatgaagttgagcactttttgatacagtgattaaccatttggatatcctcttcagtgaagtatcagctcaattctcttgactatttaaaaaataaagttgtttatctttttcttacagagttttaggaggagttttttggtacatgtgcagtccaaatacacaccttttgtcagtgatacgtgttcagctgcacacacggtgttttgcctttttattcttttaatggtatctattgataaacatgagttcttagttttaatgaagtcaaatttgttcatcttctttacggtgtactttttgtgtcttgtttaaggaagtccttctctatcttaaagctttgagaagcattccttctttctcctattttctaaaaattgttgaagatctccttccttccttccttccttccttccttccttcctttcatctatctctctctcacccaggccaaacttcagtggcatgatcatggctcactgcagcctcaacttcccaggctcaagtgatcctcctgcctcagcctcctgagtagccaggactacaggcacgcaccaccatacctggctaattttaaaaattttttgtagagacacggtctcatcaagttacccaggctggtcttgaactcctgggctcaaacaatcctcccacctcagcctcccaaagtgctgggattacaggcatgagtcacatgtctagcctgtattctttctttcttaaatgtttggaagaattcatgggtaaaaccatgtgaccctggagtttatttgtgggaagcttttaaaacatggattcgatttctttaacaaatataggactatgagattttcatctcatgtcggtttgggtatgttgtgttttcaaggaatttttctattttatcgaagttgtcaaatttgtctgcaggtccccttatttcctttttaatgtatggaggatctgaagggatggtactttgtgttgtctctatttcttgtttggttttgctagtgatttgccaatttaaaaaatctttccaaagaaccaacttttggctttgtttattttttgaaaacctgagtagctgggattacaggcgcccaccaccacacccggctaatttttttatttttagtagaggtggggtttcaccatattggccaggctggtctcgaactcctgacctcagatgatccacccgcctcggcctcccaaagtgctgggattacaagtgtgagccagtgtgcctggcaagccgctttttaaatggcaccaatcccattcatgagggcagagccctgatgatcgaattacctcctaatggccccatttcttaatactatcacactgagaattaagttttaacataagaattttaggaagacacaaacattcagaccatggaacatatataaaacagttgtcctaccaactaacagaatacacattcttttcaagaacacctatataaaaattatagacactgacctatgctggccataaagcaaatatgaacaaatttcagatacctgaagagatttagactatgttctccaactacagtgcaattaagctagaaatcaatagcaaaaatgtaactataaatgagcccgtatgtttgaattttaagcaagatatatgtaaattatctatggttcaaaaaagaagtcacagtgaaatttagaaaatatcttgacgtggcgggttgcagtggctcacgcctgtaatcccagcactgtgggaggccaaggcgggtggatcacctgaggtaaggagtttgagaccagcctggccaacatggtgaaaccctgtctctactaaaaatacaaaacattagccaggcgtggtggtgggcacctgtggtcacagctacttgggaggctgaagcgggagaatcacttgaacccgggaggcagaggttgcagtgagccgagattgcaccactgcactccagcctgggcaacatgagtgaaacttcatctcaaaaaaaaaaaaaaaagaaaagaaaaagaaaatatcttgacccaatgatgatgcaaatactacgtatcaaacttgtaggatgaacttccacttctggccatgacagaggagcctgtatcagactagccttcctatttatatatttatttttgagatggggtgtcgctctgttgcccaggctggagtgcggtggtgcaatctcagctcactgcaacctccacctcctgagttcaagtaattctcctgtcccagccttccaagtagctggaattacaggcgcccaccaccacacccagctagttttttatatttttagtagagacggggtttcaccatgttggccaggctggtctcgacacctgacctcaggtgatccacctgcccctgcctcccaaagtgccgggattacaggtgtgagccactgcgcctggccgtgagtgacctttttaatgtgttgttgaatttgatttgctggtattttgttgagaagttttgcatcaatatccatcagggatactggcctgtagttttctttttttatatgtctttgtctggttttggtgtcagggcaatactggcctcatagaatgagtttggaagttttctctcctctgtttttcataatagtttgagtagggttggtattagtttttgtttaaatgtttggtaaaattaagcagtgaagccactgggtcccaggcttttctttgctgggagacttttcattacagctttgatctcattacttgttattggtctatttaggttttggatttcttcacggttccatcttggtaggttgtgtatgcctaggaatttatccatttcttctagggttttcaatttattggcatataattgttcacagtaacctctaataatcctttgagtttctgtgatattggttgtaatatctcttttgtcatttctgatttttttgtttgggttttctctctttttttgttagtctagttaaagatttattgattttgtttatcttttcaaaaaactttattttgttgatcttttgtattgttttgtttcaatttcatttatttctgctatgatctttattatttcttttcttctactaattttgggtttggtttgctcttttctagttctttaagagacatcattagattattttgaagtttttctacttacttgatgtaggtgcttataggtacaactttcctcttagtacttctttccctgtatctcacaggttttgatatgttgtgtttccattatcatttgtttcaggatgtttttaaatttccttcttaatttcttcattgaccattcaagagcatattatttcatttccatgtgttcgtatggtgtgcaaaataccttgtttttgatttgtagttttatttcattgtgatcacagaagatacttgatatgatttcaaatttaaaaagtaatttggctgggagaagtggctcatgcttgtaatcccagcgctttgggaggccgaggcaggcagatcacgaggtcaggagatcgagaccatcctggctaacacagtgaaaccccgtctctactaaaaatacaaaaaattagccaggcatggtggcaggtgcctgtagtcccagctactcaggaggctgaggcaggagaatggtgtgaacccgggaggcagagctggtagtgagccgagatcgcgccgctgcactccagcctgggtgacagagcaagactctgtctcaaaaaaaaaataataacaataataataatttaagacttgttttgtggcctaccatatggtctatccttgagaatgatccatatgctgaggagaagaatgtgtattctgcagccgttggatgaaatgttctgtaaatatctaataggttcatctgatctatactgcagactaaggctggtgtttctttgttgattttctgtctggatgaactgtctaatgctgaaagtggagtattgaagtctccagctattattgtattgaggtctatctctctctttagctctaagaatacttcctttatatatctgggtgttccagtgttgagtgcatatgtatttaaaattgttacattatcttgctgaattgacccttttatataatgaccttctttgtctctttttatagtttttgtcttgaagtctgttttgcctcatagaatagcatagctattcctgctcttatttggtttccatttgcatggaatatctttctccatccctttagtttcagtctatgtgtgtctttacaggtaaagtgtgtttcatgtaggcaacagatcactgggtcttgtttttctatccgttctgccactctgtgtcttttgattggagagtttagtccatttatgttcaatgttattactgacaagtaaggacttactcctgccactttattaattattttcttgttgctttgtgatcttctttctttccttcctgttctccttttagtgaaggtgattttctctggtggtatgttttaatttcttgctttttatttttttgtgtgtatctgctgtatgttttttgatttgaggttaacatgaggcttgcaaataatatcttataacctaatattttaaactgatgacaccttaacactgattgcataaacagacaaacaagcaaagagaaaactaataaaaactctacattttaactttgtccccccactttttaacttattgtactgtttatgtctgaaaagttgtagttattatttttgattggttcctcttttagtctttctactcaagatatgagtggtctacatatgacagtgttataatattctatatgtttctgtgtacttgctattaccattaagttctgtactttcaagtgatttcttattgctcattaatgtccttttctttcagattgaaaaactccctttagcatttagcagtatgtgaactgcatttttcaagtccagaatttctgcttgattcttttttttttttttgagatggagtcttgctctgtcgcccaggctggagtgcagtggcgcgatttccgctcactgcaagctctgcctcccgggttcacaccattcttctgcctcagcctcccgagtagctgggattacaggcgcccgccaccacgcctggctaattttttgtatttttagtagagatgggatttcaccatgttagccaggatagtctcgatctcctgaccttgtgatccgcctgccttggccttccgaagtgctgggattacaggcgtgagccactgtgcccagcctgcttgattcttttaaattatttcaatctctttgctaagtttatctgttaggattctgaattccttctctgtgttagcttgaatttcactgagttccctcaaaacagctattttgaattctctgtctgaaaggtcacatatctctgtctctccagaattggccactggtaccttaattagttcatttggtgaggtcatgttttcctgtatggtcttgatgcttgtgatgttcgtcagtgtctgggcattgaagttaggtatttattgtagtctttgcagtctgggcttgtttgtatctgttcttcttaggaagactttccaggtaataaaagggacttgggtattgtgatctaagtttttggtcactgcagccatatctgcattagggggcaccccaagcctactaatactatggctcttgcagactcgtaaaggtaccacttgggtggtcttggataagatctggaagaattctctggattaccaggcagaggctcttgttctcttcccttactttctcccctaaaagtggagtctctctctctgtgctgggccgcctggagctaggagaggggtgacacaggcacctctgtggccactatcactaggactatgctggctcagacctgaagccagcacagcactgggtctcacccaaggcctacagtctccactgcctggctactgcctacgtttgcttaaggcactagggctctacagtcagcaggtggtgaagccagtgagattatgtccttcccttcaaggcagcaagttccccctacccccatcctgggaaggtccttagatgccatctgggaggcagggcctgcagtcagaaaccttagtaatctccccagtgctctattctattacagcctggctgatacccaagccataaggcaaagtccttcctgctcttccctcccctttccacaagcagagaagtctctctccatggccaccactgccccagccctgtggcagtgctgccaggccactgccaacgttcattcagggcctaagggctcttgaagcaactgaacactgccaggcctgggactctccctttagggtagtgggctcccctctgacccagggcaggtccagaactgccaccccacagccaacacttagaatctgggaccccaagagccctcttggtgctctgccacactgtagctgagctggtacctaggctgatttttgctttttatgaaggtacttttttgtgtgtatagttcaatttggttttcctccagggaggacaattggtggaggtttctatttgggcatcttttttttttttttttgagacggagttttgctctttcacccaggctggagtgcagtggcgcgatctcggctcactgcaacctctgcctcctgggttcaagcgattctccagcctcagcctccccagtagctgggattacaggtgcctgccaccatgcttggctactttttttttcaattaaaaagtaaactttaatgtcgaaaatgcaaacttggggaaggcagaaagatcacacacaaggctgtcgcttcacacttggaaggttgcacggcggccaggagaggcactcctcacttcccagacagggcgggggccgggcagaggcgctcctcacttgccagacggggcggcggccacatgcctggctaatttttgtatttttagtagggacggggattctccgtgttggccaggctggtctcaaactcctgacttcaggtgatccacgcacctcggcctcccaaagtgctgggattacaggcatgagccaccgcgcccagccctatttggccatcttgctttgcctccaccttcatttgataacagaacacccccatgtaaccaccaccacaatcaagatataagacatttctgttattctccaaatttccttcaccctcctttatagtccatggcacccaccccatccctgggcaacacctatgtgcttcctttttttttttccccgcaggaggacgtcttcctatacctatgtgcattccatcactgctgcttttaatcatatagcgtgtagtcttatgagtctgactttttcacttagcataatgcttttgcaatttgtgattgagcgttttcatatgattctgttttttctgtctcttagcttggaagttatacactttttagtagtaactgttgggagatcgttctccaagagtctctctcatatttccatacatcctgctagcagagacattgactacctgtttttgtctgtttagtgttgctataaaggaatacctaagtctgagtattatacatagaaaagaggttttatttgtctcatggctcctcaggccatacaagaaacatggtgccagcatcttaccagtgtcacatggcaagaaaggaagtgaggaagagaaaataagttgttaactggttgttaaaaagtgccaggcacgggccaggcacagtggctcgtgcctgtaatcccagcactttgggtggccaaggcgagtggatcacctgaggtcgggagttttgagaccagcctgaccaacatggagaaaccctgtctctactaaaaaaaatacaaaaaaattagctgggcatggtggtgcatgcctgtaatcctagctactcgggaggctgaggcaggagaatttcttgaatccaggaggtggaggttgcagtgagccaagatcacctgggcgacaagagcgaaactctgtctcaaagaaaaaaaaagtgccaggctctttttaacaaccagttcttacaggaactaatagagtgaaaactcactcacccccaccccacagggagggcattcattcatgagggatccacccctatgacccaaacacctcccattagccccccacctccaacattggaatcaaaatttaacatgaggtttggggggcagaaatccaaattatagcactacctttgttccaggctaccttcaaaggatgtttatacagcaaacagccttggaaaatagagttagggtctccttgtagagcacagggtaagtttgcttacttttcagcataatcaagattgtgtcttcttctggagcaaaactttgacaacaacaagcggggcaaagtctgaaaccttttgcacatcttgacagaaccttagagattacgagatttatctctgccttactcaaggtccattagtatcttccagaacaataagttggtcttagaatcctttagctatgtattcccttccaggcttcgatgctgtgtgctgttgttttatttagtttttattttaaacccaacaagacgctataccatcaatacttatttagatccccccacatatttaacttgccatggtgcttcattctttcatgcctctttaagcatccatctaggatcgtgttcattccacatgaagagaaagcttttggcccagcacgatggctcacacctgtaatcccagcactttgggaagcctaggcgggaggatcgcttgagcccaggatttccagaccagcctgggctacgtggcaaaaccctgtctctactgaaaatacaaaaaattagccaggtgtggtggttcacgtccctgctactcgggaggctgaggtgggaggattacttaaacctgggaggttgaggctgcagtgagcgttgattgcaccactgcactccagcgtgggtgacaggagtgagaccatgtctccaaaaaaaaaaaagaaggaaagaaaaagcttttgtatttcctttcgtgtaggtctgctaatgacaaagtctctgggttttttgtttgactagagaaatgttttaattttaaccttattcttgaaggttttgtttttgttttcattttgttttgtgtgctaagtacagaattctcattggcatttatttatttagagacagagtcttgctctgtggcccaggctagagtacagtggcacgatctccgcctcccaggttcaagcgattctcctccctcaacctcctgagtagctggggctacaggcatgcaccactacacctgactaatttttgtatttttagtagagacggggtttcaccgtgttgcccaggctgatctcaaactcctgagctcaagtgatttgcctgccttggcctcccaaagtgctgggattataggcatgagccgccgtgcctggccagcatttattttcttttcagctctttaaggaagtcattccattatctctgggttccattgttgagaagccagctgtcattctaatggttgccctttgaagataacttttttccctctgctattttaaatatttcctccttgtattttattttcaacaggtgtaatgtggcacatatatcagcaattgttatgttacatacaatacatattgtgcaacatatgtatcattatcagttattgctgtgtaacaaactactccagaacacagtggcttataaaaggaatcatttatttagtccttaaatctgcaatttgagcagagctcagtgggaaagcctcagctttactttatatggcaccatataaggtaactcgcaactggcaagttggtgctggctgttggctggtagttcattcagggctcagggcccaggaccaagagtcgtcaccatggcttgcttcagcctccttgaggcatgatggctgggtcccaagagaagagaaatagaaacttccagtctcttaaggcattggtctggaagctgggacggcatcacttttgccatattctgttggtaacgcagttacatcgccagattaaagggtaaagagatacaaattcccactgctcagtgcaaggaatatcagtgattttagggggccctgttttaaaacccctacaaggtgctaagcgtggatttctggggctttcttgttttttgtttttttctatgtgtttttttttttttttttggtggtggggtcagggagggcttatagggtatgttaaatcagcagaataattttatttatttatttggagatggagtttcactcttttgcctaagctggagtgaagtagcgtgatcagagatggagtttcactcttttgcctaagctggagtgaagtagcgtgatctcggctcactgcaacctccgccccgctggttcaagcaattcccctgccttagcctcccaagtagctgggattataggcacccaccgccacgcccggctaatttttatatttttagtagacatggggtttcgccatggctagtctggaattcctgacctcaggtgatccacccaccttggcctcccaaagtggtgggattacaggtatgagccactgtgcctgacctataatgttttttaaaaatcagttttggaaagtttgcagacattaacttttcaaatgtagcttccatttgattctttttctactctgcctctgatcctccacttatgtatgtatgctagatcttttattagatagtctgtgtctcttatgtactctactatattttgtattcttctgtctctccatgctttattctgtttactctttcctgattatattttttaattttgtaatttccatttgatgcttttttgatcattcaaaactcttcaccaaaattctaaatttccttttttaacctctcgaatgttatcacagttactttaaagtctattttggataacttaaatatttacagtcccctcacagatatgtttcttttgtatattgtttctgttggttttctttcatgtcttatctccacatatgcctggtgagttttgattatgtgttggtcattgtatttgcaagtatgctcgtagaaataatctggaatggccgggcgcagtggctcatgcctgtaatcccagcactttgggaggctgaggcaggtggatcacgagatcaggagatcaagaccatcctggctaacatggtgaaaccccatctctactaaaaatacaaaaaattagctgagcatggtggcacgttcctgtaatccctgctactcgggaggctgaggcaggagaatcacttgaaccaggaggcagaggttgcagtgagccgagatcacgccactgcactccagcctgggtgacagagcgagactccgtctcaaaaaaaaaaaaaaaaaaaaaaaaagaaataatctagagcctagtttgatgtttccttacaaagaatgaatttatttttgcttctcccattgcaactaggataacctcagtctagtttctggaactgaaatcacttgaggctgaactgtggtctctgtgagagcgtgtctgtgtatggctcacccttattcctaggctacgtagttctttaggaccctaacccaaagtaagagatgttcatcagggctctcctcttggcagacgcctgggctccagtccctgtgtcctgagccccatgaggctgttactggtgctgctcgtctgcccatcctctccagtaacagccacctgaacactgcaattcctgggtttccatcattccttccagcctggtgagtcatcagtgtcttttgaggtatccagtgcctgccagcagatgttttttaataatttgtccagcatttctggctgtcctcagtaggtggtctgtttcacattccctagtctgctgttaatggaaagtggaagttctgagagagaatcatcgttcccgtcagcattcaaatgcctgattacactttccccattcgctatcctttcctttatttgctcctcaccacagcaaaactcctcaaaaatatctatctttgcaatcttcagattctcacattgtgtccttaaacccactttaatcaggccttggttccctccattccactaaaagtaatgttgtcaaggtcgtgcatgcctccgtgatgctaattccagtgatgagttttcagttgtcattctctgacatatcggcaacacttgatgtggagtaccctgatgttgagaggctggtgagatgaaggaaaaacccagccaagggcaatgaggaatggcttccttccgcctcctccttccctatctttgttgtggtttttgttgtttctgtaacactgattacgttatagtttatttaatgtacttccttattctatgtttttactttagtcattttgttgatctcctccataataacataggctcgggccaagcacagtggctcacgcctgtaatcccagcactttgggagaccaagatgggtggatcacttgaggtgaggagttcgagaccagcctggccaacatggcgaaaccctgtgcctactaaaaatacaaaaattagctgggcgtggtagcaagcgcctgtaatcccagctactagggaggctgaagcaggagaattgcaggagaatcacttgaacccagggggcagaggttgcagtgagctgagatcgcgccactgcactccagcctgggtaacagagtgagactctgtctcaaaaaaaaaaaaaaaaaaaaggcttcaggagggcagagcattttatgcaattgttcattaattgacccctccatttggcacagatcacatgcccagtagttaactgttaatcaacgcactctctgtggaacaacaggctggtcccgttgagccaacactctctgggcactgccttcactagactctggctggctgctgcgcttgtagaggtatgcaagacaaaaccttttggtatgttaaaagccctggtcagaactttaagtaaccatcactgacatataatggttatggttttgaaagtgcttttatagtggtttttcatctgtcctcacagcacctctgggaggtaggtaggacaggtacagttagtctcatgtttcaaatggggctcagagagggaaaaggatttcccaagatcacacagcaccttagtagcaaaacttggactcaacctcaacacttaaaaatgaacaaagctggccgggcgcagtggctcatgcctgtaatcctagcactttgggaggcccaggcaggcaggtcacctgaggccaggagtttaagatcagcctggccaacatgacaaaactctgtctcttctaaaaatacaaaaaattagccgggcatggtggcgggtgcctgtaatcccagctactcaggaggctgaggcaggagaatcacttgaacctgggagatggaggctgcagtgagccgagatcgtgccattgtactccagcctgggcaacaagaatgaaactccatctcaaaaaaaaaaaaaagaaaagaaaagaaaaagaaaagtttccctttttttaaatatctcattttaatgactgcataatagtttattacatagttataccataatttatataatattttgttgctgtacatttaggttaaacaatacttacttagttcctactatgaagaggggccaagtactcgaggctggagctctcacatgtggcaatgaaattagaaagtggatatggcagggctgtggtaaaataaaatataaaaataataaatgatattaccaaagaaaaggaaagtttttcaaaataaaggaaaatctagacaagcatagtggctcacacctgtaatcccagtacttttggaggctgaggcaggaggaacacttgaggccaggagttcaagaccagcctgggcaacatagcaagaccccctgtcaacaaaaataaaaaaaaattaggccaggcacagtggctcacggtggctagtgcctgaaatcctagcactttgagaggctgaggggggtggattgcctgagctcaggagttcgagaccagcctgggcaacatggccaaaccccatctctactaaaaacacaaaaaattagccaggtgtggcagcacacgcctttaatcccagctactctggagactgaggtaggagaattgcttgaacccgggaggtgaaggtcgcagtgaggtgagattacaacactgcactccagcctgggtgacaaaatgagactctatctcaaaaaaaaaaaaaattagctgggcatggtggtgcatgcctgtaatcccagctactcaggaactaaggtaggaggatcccttcagcccaggaattcgaagatgcagtgagtcatgatcacaccaccgcaccccagcctgggttacagagcaagaccttgtctctaaaaaacaaagaaagtctaacctaaacgccattatgtcatttacatgtgtataggggtgtgtgtgtgtgtgtgtgtgtgtgtgtgtgtgtgtgtgtgtgtgtgtgtttgcttgggaggggagtcgggctggagctggccaggccgcagcctggggaccttctgattccagcagggatgtgggccgagggtcccgccttactcatttcgggtcttgctcctctgtcctggctctacagactcttccagctggagttggaggctgacgccctagtgaatttccatcagtattcttcccagctgctacccttctatgagagctcccctcaggtcctgcacactgaggtcctgcagcacctgaccgacctcatccgtaaccaccccagctggtcagtggcccacctggctgtggagctagggatccgcgagtgcttccatcacagccgtatcatcaggtgagcaagggaacaagaccatttggacaacgtgtgtgtacctgcttgtgtgggcagtgggggccgcaggcctcggttcccctccatagtttgacttaaaaaggagcagggcctggcatggtcgctcactaacgcagtcccagcactttgggaggctgaggagggaggatcacttgagactaggagttcaagaccagcctggcaaaatagcaagaccttgtctctacgaaaaaattaaaaaattagcatgtgtctatactcctagctacttgggatgctgaggcaggaggattgcttgagcccaggagttagagtttacagtgagctatgattgcaccactgcacttcagcctgggtgacagaatgagaccttgtctctaggaaaaaaaaaaaaaaaaaaaaaaaggtgctgcgttgctaccagattaaaatgtaagaaggacaatgtaatgtttccagagtccggagtgctcaccaggtgccaggtctgtgggagctgatttctacccaccatgaaattgaattttcccaacccccacaaggtatcgtcattttattttactttattttattttattttattttattttattttattttattttatgttacgttatgttattttattttgagacggagtcttattctgtcacccaggctggagtgcagtggcgcgatcttggctcactgcaccctctgcctcctgggttcaggtgattctcctgcctcagcctccggaatagctgggattacagtaatgtgccatcatgcccgggtaattttttttttttttttttttttttttgagacggagtctcgctctgtcgcccaggctggagtgcagtggcgcgatctcggctcactgcaagctccgcctcccgggttcacgccattctcctgcctcagcctcccgcgtagctgggactacaggcgcccgccaccacgcccggctaatttttttgtgttttttagtagagacggggtttcaccatgttggccaggttggtctcgaactcctaacctcaggtgatctgccctccttggcctcccaaagtgccgggattacaggcgtgagccaccatgcccggcccaggtatcatcattctagagagagctaacaggacttgtgcaggtcactcagccagagagggtgaaagaggggcttggatccttggtgtctgcccaggctgctcttctggaagctgaaggcctccttttgtgaatccattcagccagcagatggagcagctgttgcccctggtgagggcactgtccccacccttgcacagggcaccagttggccatcttgtgcagaggtagccacacctcctctgagtctctatcctagatagctcagttaagctcccaggcccagaactcaaaacctcactgctggccgggcgtggtggctcacacctgtaatcccagcactttgtgaggccgaggcgggtgtatcacttgaggtcaggagtttgagaccagcctggccaacgtggtgaaaccccgtctctactaaaaatacaaaaaattagcaaggcgtggtggcgcacgcctgtaatcccagctactcgggaggctgaggcaggagaattgcttgaacccagaggcggaggttgcagtgagccgagattgtgtcactgcattacagcctgggcaacaagagtgaaactccacctcaaaaaaacaaaacaaaacaaaaaccctcactgcactttagtttccaggcgtgcttttggacagcactgtctcatctcaccatcactctgtccatttcctggggcaggcacagcagcttgtgtcgataaggatattgacgcccagaaaggttaagtgaattgcctgaggctagtgagatatccgtgttctgtgaccctttcctgtgccaccaccctgcccacttcctgctggtgtggccctggggcccatctcttgtacgagtgagcaaactgaacagaaacctgatacaggtcacatcagatataattacattcaaatcagcccaactagctgagtggcgggaatgctcttgagctcaaataaaccagaaagtccgagtttccgagtgcacttccctgcatgtgcacttaggtccccctgccaccttgtaccacacctgctcacctctgctcaccctggccctctcctgcagctgtgccaattgcgcggagaacgaggagggctgcacacccctgcacctggcctgccgcaagggtgatggggagatcctggtggagctggtgcagtactgccacactcagatggatgtcaccgactacaagggagagaccgtcttccattatgctgtccagggtgacaattctcaggtgctgcaggtgagcagggggaggggcagggtgactggtactgatacctcccggtgtccacggttccctttgggcccctaggctcaggtgtcactctcaggcctctcactgtcccccattggtccttgaggcctgagctccttcatggagggtgcagacccctccctggctcttccctcccagcccttttccaggagccacgtcctcagtctctttgcttgataaacctggggacggcctccaacccagcaaaataaaccccaaaaaaggcccagctccagtcagttagttcagttccacttttcctgagcacaaactgtgagccagatgcctgcctggaggggctcgtgggccagcgggacctgggcttaaccttttgcaagcttgtccaatctgtggccctgcaggctgcatgcagcccaggacggctttgaatgtggcccaacacaaattcacaaactttcttaaaacattatgagatccatgcatggaccttttttttagatcagctgttgttagcgttcatgtattttatgtgtgacccaagacaattcttctgatgtggcccagggaggccaaaatattggacaaccctattttacaggaattcaaaccaagcaaaccaaactgtctccagttcctgtaggcatttgtgccagaggccctcctgttaacgtttttgattacctgggcaaaagatgtgattttttaattgtgggcaagcagatggggtgatactattaaatagctatttcatatattagattgaacagaaaaggcaggatgttggattatgttttattgtctagaattagaaaattcttctaaagatcatgttctctctgccttggcatcagaatgcaactacgttataccagaaaatgtggattcctttttttttttttttttttttttttttgagacagagtttccctatgtctcccaggctagagtgcagtggtgcgatctcggctcactgcaacctccacctcctgggttgaagtgatgctcgtgcctcagcttcctgagtagctgggattacaggcatgtgccaccatgcctgggtagtttccgtatttttagtagggatggggttttgccatgttgcccaggctggtctccaactcctggccttaagtgatccacctgcctcagcctcccaaaatgccgggattacaggtgtgagccactgtgcccggcccagaaaatgtggattcatatcttatgcttcttgctctcagggaagggaattctccacccactgttgaactccactttcaccgagaatcctctgcgcacccagcatggtgccgcgcagaccctgcctccatgcgggggtgtgcacacccgcttctcgatagtcatgcacgactgcagctgtcctttatccggtgctgattggtgcctgaccttgaactgagtgttgtatgtgttccagttaattcttagaatacactcatggggtggaggtcattattcccctttcctctccgaagaaactgaggttcagtgttgttaattaagaagcgtgcccagggagggccacaaagctgagagagtggggcttgaccttacattggcctcgatgccagccctttgctcttcctgctgtgtctctggcctgccttcaggtccagtgggactgctgtgaggtgaccctggtgtcacatgggtacactgtggttgtaatgaacctcatggggacagcactgagccaaaagtgagacagtaaaaccctcctagcactttcttttttttgagacagcatctagctctgtcgcccaggctggagtgcagtggtgtgattgtggctcactgcagcctcaacctcctggactcaggtgatcctcccacctcagcctcctgagcagctgggactacaggctcgtgccaccacatgggctaattttttttttttttgagacggagtcttgctctgtcgcccaggctggagtgcagtggcgcgatcttggctcactgcaagctctgcctcccgggttcatgccatcctcctgcctcagcctccagagtagctgggactacaggcgcccgccaccacacccggctaattttttttgtatttttagtagagacagggtttcaccgtgttcgccaggatggtcttggtctcctgaccttgtgatccgcctgcctcggcctcccaaagtgctgggattacaggcgtgagccaccacacccaggccacgccagctaatttttaaaatttttttggtaaagatggggtctccctatgttgccgaggctggtatcacactcttggtctcaagtgatcctctcacctcccagtgtgttggaattacaagcatgagccactgcgcctggcccctggctctctttttaatactgctgttctttcattgaaaacatagtacctgcatgtagaaaaaaatcagtcaggacagaatgaaaagcaagaatcattcccacctggacccccagtgcccatcctgagatacagctaccttttaagttccttgactcagaaatgtttcatgtgagccacagtcatgccaggtcgaccccttccctcccatccacactggcacttggctttcctggtgcttctctttacgttctttttttttagacagagtttttgctctattgcccaggctagagtgcaatgatgcaatctcagctcactgcaacctctgcctcctgggttcaagcgattctctttcctcaggttcctgagtagctgggattacaggtgcctgccaccatgcccggctaatttttgtatcgttagaagagacgacatttcaccatgttggccaggctggtctcaaactcttgacctcaggtgatccacccaccttggcctcccaaagtgctaggattacaggcatgagccactgcgcccggcctctttacgttcttatcagcatcctatggagtcaaacttcccttcctctttcatcagctccttggaaggaacgcagtggctggcctgaaccaggtgaataaccaagggctgaccccgctgcacctggcctgccagctggggaagcaggagatggtccgcgtgctgctgctgtgcaatgctcggtgcaacatcatgggccccaacggctaccccatccactcggccatgaagttctctcagaaggggtaagacctcctcccctccccatctgctggcctgctgggctccagctctcctgtcacctgtcccgtgcctgaggcaagcagtatccaccatagatcttagcatctccagcctcagagcagaggccccgggttcacaagcctcattaggccccgcctggcccaaagaaggtgctccatcattgtatcatgggtaggaatctcggttcacaagttcagctgtgcaaggaggagactttaaaatttttctggctgggcgcggtgtctcacgcctgtaatcccaacactttgggaggctgaggtgggcagatcacctgaggtcgggagttcgagaccagcctgaccaacatgaagaaaccccatctctactaaaaaatacaaaattagctgggcgtggtgacacatgcctgtaatcccagctacttggaaggctgaggcaggagaatcggttgaacccgggaggcggaggttgcagtgagccgagatcgcaccgttgcactccagcctgggcaataagagcgaaactgtctcaaaaaataaataaataaataaataaataaataaataaaaataaatttatttaatgtaccttaattcctaggagtgaatctccctctataaaactggagacaaccaatcttagccctctttggggtctcctctttccagctcccctccaggtggtgctccagttctggagtctgatgcaaccccaaggcccacctggcccctcctctaacccagcccagcctgatctgaacagccccccgatggcttcagtgctccttggtttcttgtgtgcccagctcaaagcctgggaaatgcttggtaaggtggccgagtgcccgtccacctagatgcctctttcctttctggctggtggcacgttgggaggcaggtacaggctcatgttttgggagcctgggaacccctggtgtcaggaaaattgtcttcaaaggggtaggggatgagataaaaagataaatgaatatctcaaatctcaaaatactatctaggccaggcgcggtggctcacacctgtaatcccagcagtttgggaggccaaggtgggtggatcacctgaagtcaggagttcgagaccagcctgaccaatatggtgaaaccctgtctctactaaaaatacaaaaattagccaggtgtggtggtgtgtgcctgtagtcccagctactcaggaggctgagacaggagaattgtttgaaactgggaggcagaggttgcagtgatttgagattgtgccacagcactccagccagggcgacagaacaagactccatctcaagaaaaaaaatactatctaacaggaacaacatctagaatgaatgaatgagccaatgagtccttcgatcctggcactgtgctaaagcaccagcctcaccgaaatgaataagccactccaggacaggagacaccccagccacccagaatctcatagcgcagtgccagacaagcagtgagaaggcatggacgggcagcactcaggcagggaggctggcacttgtgcctgtcctcaggttgttccttcctctgggagctgcatccaccttgctagccccatggggcattgctagcccttctaagggctggaccaagcctggacaaaccctcctttccttgaatctcccaagcacagccagaatgagctagagctttcagaaatacttgaccaaacagagaagataccaacacccccagccccgcagtcaggttccccatttgcaggttgtgacctgagtggacaccaggtgatgctcttctctacccagagggctggcacatggccccactcttgcttgtctccagccaccctgagctgtactgggcaggagctgtaattgaccagttttctctctcttcaaacaacctcagccctcaccggtccctctgtccccacacaggccatcctgggtgggtccagcgtcccatcacataagaggatctttgcacagaagacaaaggaagaggctcctaccttgagtggagcagggagatcccttatcgacttggcagccagcacagccctactccaagaatcccacggcctcagtgttactgacaagtggttccctcacagctcagactaggagctccctcgctgtttttctttttcttttcttttctttgttttgtttttgagacagagtttcactctgtcacccaggctggagtgcaatggcatgatcttggctcactgcaacctctgcctcccaggttcaactgattctcctgcctcagcctcccaaggagctgggattacaggtgtgcgccactatgcccagctaatttttgtatttttagtagagatggggtttcatcatgttgaccaggctagtcttgaactcctgacctcaggtgatctacttgcctcgccctcccaacatgctgggattacaggcgtgagccaccgcgcctggccacctctgctgtttttcaatgcagctgacctttcccacaaagctcggtttgtgcctgcggttctcagatggttaagcccctgctgaggaagggaaacagataatcccagacagtgagatggaggctgagactgaggatgcctgggggctgcactaggagctcagagacggcatcaggcagctggagttcagggaaggtttgggggcagcagagcccgagccaagccatggacactagccggagctggccactcgggtgaagacttggggggctccagagggcccagggaaagaagctgggcctgactccatgtgcctagtgctgagcaccaagcgctggcataagggctgtagggagctgggcagcataaatcctgggcctgtgctgggcacccctaataatagagaacagcagctgaacactaacgctgtcccagccaccggcttagccttcatgtgggctatttcactatagcccagagagctgatgtattttattccccctctaaagctgagggccaagtgtggtggctcatgcctctaatcccagcactttgggaggctgaggcaggaggatcgcttgagcctaggagtttgaggctacagtgagctatgatcatgccattgccctccagcctgggtgacaaagggaaatcctgtctcaaacaaacaaacaaaaaacagatgaggaaaccagggcttagagagattaagtaatttgctcaaagtcaggcagtcagtaagtgccagacctgggaattaaacccatgtgggctgtcctagtaattgcactaaaaaaaaaaaaaaaaaaaagctttattgagatatagttcctattccatacaatccacctattgaaagtatacaatgattctgatatattatgtttattttttccaactgtgatagattatatataacataaaatttgccattttaaccacttttgttttttgtttttgagacagagtttcgctctcgttgctcaggctggagtgcaatggtgtgatctcggcttaccgttacctccacctcccgggttcaagtgattctcctgcctcagcctcccgagtagtagctgggattacaggcatgcaccaccatgcccagttaattttgtattttttagtagagacagggtttctccatgttggtcaggctggtctcgaactcccgacctcaggtgatccacccaccttggcctcccaaagtgctgggattacaggcgtgagccaccacacccggcccattttaaccacttttaagtgtacaattcggtggttttaatcacatttacaatgttgtccaaccattacccctttctaaaacttttcttatcacctcaaacagaaactgtaaccattaataactcccgattctcccctccccacagcccccgataagtcccatatcctctctgtctctcagaacttgcctgttctagaacctcgtatcagtgaaatcatacagcgtttgtccttttgtgcctggcttatttcacttagcatgatgtcttcaaggctcatccatgttgcagcacgtatcagaatttcctttctttttaaggcagaatactattttgtttatccattcagtccttcactgatagacgcctgggttgtttccaccttttgtctgttgtgaagaatgctgctgtgtacatgggtctgcaaatgtccattcaagtccctgcattccgtcctttgatacttccgacctcaggtgatccgcctgcctcagcctcccaaagtgttgggattacaggcgtgagacaccgcgcccagccagaaaaattttaaagtcttctccttgcacagctgaacttgtgaaccgagattcctacccatgatacaatgatggagcactttctttgggccaggcggggcctaatgaggcttgtgaacccggggcctctgctctgaggctggagatgctaagatctctggtggacactgcttgcctcaggcaccgagtagaaagcaattgtgctctttcccactctgtcatactgcttcctatagcatgcaggtcactgtgtgactcactgacagtgtggtaaggaggtggagggtggctgtgtgccaggcacagaactgggctctgaaatgcctggtcttccttacaccccagccactcctctcagcactctctccatgttgctcagcttctggaggccaccagtgaggaagctggggcttgacttcaagcccatctgactctaaagccagtaccagggagggtgatcattgctggtggcagcatcaggaaggcttcctggaggagggggttagttgtgccttgaggggctcagtacagccttaaccatggtgagtgtgctggttgggtttgctgaactttgtttgcagtgatgctctctgtaagcagtagatgaagctccaagtcctggcttcatcccacgccacgcagaccctagcttctgctcaccaaccggggcccctctctcaccaggtgtgcggagatgatcatcagcatggacagcagccagatccacagcaaagacccccgttacggagccagccccctccactgggccaagaacgcagaggtgagtggatcctgaggtgggtgggtggggcagggggccgggccccgcaggtcctcagggccctcaggaagcaggttcccgagaggaccctgaggctagcacttgggggctgaccttgcagtgggtgtgcaggcagagaagtccatgaagagctgggatcctggcagggctctgctgctctctggctgggcggggggatccgccctgtgcctcagtttcctcatccatgaattctgctttggcgatgtgatgaagtcagcaaggcagtgtgtgacaaaactcggcacaaattgtaaagtgcttcccaaatagaaggtggcgtgatgatgattgtattattagtcaggattctctagagggccagaactaacaggagatatatatatagagagagaggggggtttatttttttattttattttttttgagacggagtctcgctctgtcgcccaggctggagtgcagtggcacaatcttggctcactgcaagctctgcctcccaggttcatgccattctcctgcctcagcctcctgagtagctgggactacaggcgcccgccaccacacccggctaatttttttgtatttttagtagagacgaggtttcaccgtgttagccaggatggtctcgatctcctgacctcgtgatctgcctgccttggcctcccaaagtgctgggattataggcgtgagccaccgtgcctggcctaaagggggatttattaaggagcattaactcacacgatcacaaggtcccacaataggccatcgcaagctgaggagcaaggaagccagtccaagtcccagagctgaaggacttggagtctgatgtttgagggcaggaagcatccagcacgggagaaagatgtaggctgggaggctaagccagtctagccttttcacatttttttctgcctgctttatattctggccgtgctggcagctgattagatggtgcccacccagattaagggtaggtctgccttcccctactgactcaaatgttaatctccgttagcagcaccctctcagacacacccagggtcaatactttacatccttcaatccaatcaagttgacactcattattaaccatcaagatgatgatgatgatgatggatgatgatggtggtggtggtggtgctgggcctagctgcacacacagggagcctggctgggcatctcctctgagttcttcccctaagctaagctctgtcctcctgggaggatggaggcctctggtctcatcaccaggaagcacagcttgacagagaatgggatgccccagagttcatggcctacttctcaatgtgatgggccaggagggagggcactgccagcctcagggtacctctgcattccaggagccggacaccgagtcaggcccttccgtgtaggtttggtcactcattgtcatcacatgctgtgaggtggggacttgcattcccatcttcacagaagccctgaagtgcacatggctacagtgacccatccaagcgcaggcagctgggatgagtgaagctgggctttgggctcaggtctgtgactccaaagccaggctcccctccctgttcccaaggctctgccagggatgtgcattgccaaggcccagtgagaggtgatacctttgcagggttccagggagggatgcagggagcggggtgcttcaggacaggccccagaggagcctttgcaaggagagtgggttctgttggcactaggaaaggaccagaagcctcttaaaacagtcagcacatctttggctttttgtccctagtcttgggatgctgatgggatgggaggcagtctaggcccccctagaactggggcctgcccctggaatcctcttgctagcgctttccaacatcccagtacctgtaggcctctcagagcagaagtggcagtgcccacgtgtcccggggtgcggcagctccccgagtgcctgtgctaactcagcctgaccgtctcccgcagatggcccgcatgctgctgaaacggggctgcaacgtgaacagcaccagctccgcggggaacacggccctgcacgtggcggtgatgcgcaaccgcttcgactgtgccatagtgctgctgacccacggggccaacgcggatgcccgcggagagcacggcaacaccccgctgcacctggccatgtcggtgagcccaggaccgcgtgtcctgccctgtggggccccggtgggaatgcaggagggctgtccggactggagccctcctccccactgtctccctcctatcgtcagctgctccaaatcatcttcccacccaaagctcagttcagaccctgactcctccctcaggaagccttccaagtccccctctcagcccaaaataacaccacctcctgtgtgctgtggtaccttttccacctgtgcccccatttggcacttgcatggcacgagagggaaaaatgacagctctggccatagactggccctgagcaagccatgtcacctgtcagcctcgatttcctcatctggaaaatggtggtgtcaatacttatctggaagagttgtggaaaagttatggtggacacttggtcaccctctacagaatgtctaagtgacacacgcagtacctggcccgagtgagcatcctgcttcccttcactggtccgcgtgttgctctcatcttccctgggaggctgtaagatcctggcaggcaaagcctgagtgtgcagcccagcagcctgtggcaggtgccaggcatattcgttggtttattatagaacacagttcctgccctcaaagcccttactgtctggttacacatctagagtatgaacatattaaacctagcagaggaggacgttactgtgttacagacatatgtgtgtgcatgtattcttttttttcgagatggagtctcgcactgtcgcccaggctggagtgcagtggcgcgatctcggctcaccacaacctccgcctcccaggttcaagcgattctcctgcctcagcctcccaagtagctgggactgcaggcacgtgccaccatgcccagctaatttttgtatttttagtagagacggggtttcaccacgttggccaggctggtctcgaactcctgtgttggccaggctggtctcaaactcctgacctcatgatccacccgccttggcaccccaaagtgctgggattacaggcgtgagccaccgcgccccaccgtgtgcacgttttctatagcaataccgtatgtacagaagtctgtttactgagtctcagtgacagaacatgagagacccccgggactctaaaagctgattcaggacacattcagagacatcctgttttataccaaaggtcaaaacttggaagagatgttgttgcccaaaaggctgaaactataaatagtttcatttttgaaactgtggacatttttagcactgggtgggcccttggaatgatctaactcagcagttctcaagttttttggcctatttgatccctttatactctgaaaaattattgaggatcacaaagattttttaatcatctggattttctttatctatatttaccattttagaaatttaaagtgtgaaaatttcaaaatattaattcatttaaaaataacaataataaatatatatgcctactatgtacccacaaaaattaaaattaaaaattttttaaaaaacttaaaaaataactggccagctgcagtggctcgtgtacaccagcactttgggaggccaagatggtcagatcacctgaggccaggagttcgagaccagcctggccaacatggcgaaagcccatctctactaaaaatgcaaaattagctgggtgtgagacctctgaaagggtatcacgtgttcacaggggtccccaggtcttactttaagaactgctgatagactttggtcatcttcatcccatcttcacagtttttggcatattcatcaaccacctttacaattatgtacttaatcacctcttcaaattggcttacttttatttatttattttgagacagagtttcgcttttgttgcccaggctggagtgcaatggcacgatcttggctcaccgcaacctctgcctcctgggttcaagcgattctcctgcctcagcttcccgagtagctgggattacgttcatgcgccaccacacctggctaattttgtatttttagtagagacggggtttctccatgttggtcaggctggtcttgaactcctgacctcaggtgttccacctgcctcagcctcccaaactgctgggattacaagcgtgagccaccgtgcccggcctggcttacttttaaactgacttaaatttattttgagagaaatgttgcatcactaccataaatggccatccatccatccagtgccaaccataaaaggtaaccaatgcagggcgcggtggctcacgcctgtaatcccagcattttgggaggccgaggtgggcgaatcacgaggtcaggagttcaagaccagcctggccaacatggtgaaaccctgtctctactaaaaatacaaaaaattagctgggcgtagtggtgggcacctgtaataccagctactctggaggctgaggcaggagaattgcttgaactcggtaggtagaggttgcagtgagctgagatcacgccactgcactccagcctgggtgacagagtgagactccgtctcaaaaaaaacaaaacaaaacagtaacaacaacaaaaaatcacagttaatgctgaaaacacacacatatctgtagccatagaagtcctaatagaatgtgaagaactgtttggaaaaccccattctagacccacagcttcattctctaggcagggaaatcgggtcccaagaagaggaaggtgacaaggccagagcccacagttccaggtggccagtgtgtcctctgaaaccatgccatgctctgcgcccctgcccggcctccaggtgtggaaatgtgtgacgttcttcgtggggacactcccccgaaggctgccattaggggcacgtgtgttcggttacccctcagggatgacaccctggactgggtgggcaagatggccttccctgccctcacccaccctctccttgctactcctgaaagccatcagcagctgacctactgtgtccccatggctcctgggtcggggtcacagatgcactgcatctttggaggcggagctggcagagcaggggcgagtcacttctagtttctgcctgggttcttacaccctcccctgtgggtgcttttaagcctgtttgtcaggtccccagccatcaaatggcagactttggactaccagattgacttgggtgggggtgaggagggttccagtgtctccccgtgctgaggagaggcccgctgggtgagttgacaggttggggctggcagccaggggcccctttgttcttcacttccccggcagttgcacgtcttatcctctctccatctccaacagaaagacaacgtggagatgatcaaggccctcatcgtgttcggagcagaagtggacaccccgaatgactttggggagactcctacattcctagcctccaaaatcggcagacgtatgtgctctgcactctggggctggagtggggtgagggttgggtggatacagggaccgaggaggagggaagtcccaggcatcaggtgccagcatcctgtgctgacccgccctgctcagagctgccaggagcacctcgtactcagagagggggcttccttacccaagcacaagggccctgagcagtagatgcaggcccaccacggggcttgctataccagcatcctctcccgtgcagcgccccccacctcagggagctaagattcccagcaggggtggggacaggagagccagcagcagccttctttccccaccgttggggaattcactgatggaaccactggctagaatgaccaagggtgcatgcactacactgcacgagctctgggcatgcctgtgtgggcagagtgcatggccatgtgctgcacgctcgcacagtgagccttagcttcagagctggacagagcagatcctcctcaccagaggcctggagcccgctctggagggtttcagcagctgtgggggtcactgtgggcaggtacctgatggcagcagtgtgtgtgtgccagtgcacacgtgtgtgtctgcatgcaccgcatctatgacctccttttcagcaatcccatccatcaaatggagtaggtgccccctggctggctcattagtccctttggaaccctgaactatcacttagcatttttgagaatcactgaatgtggccatgggattcctgctttcttggctggagtagaaggaaagaaggggttcccacaggcatcgggcagggtgacactgacctcctcctcccatatcctccttccctggccttaggaagctgcttgggatgtaccagcctgggggcagcactccctgtcagggtgggctgaggcctctggagcagcccacgtgcccagggcctgggagctgggacaggggacggagtgtggaaaggaggggcctctcctttgcatgttgacatcatttctgatcctgtgccatctccccttccccaaaccatgacaagttgtcaccaggaaggcgatcttgactctgctgagaaccgtgggggccgaatactgcttcccacccatccacggggtccccgcggagcagggctctgcagcgccacatcatcccttctccctggaaagagctcagcccccaccgatcagcctaaacaacctaggtaggcctcgcctcccgactccctcttctccagctggttcccaggcccctggatcacagcaggccccaccaaagcaacaggatccctaggacggaagtcactaaaggaagccggggaggatggggccggagttgtcagcctctaggcagccagcaacccacagatcccagaggcctagggtgtccctggctgatgtcccatgctccgttgcccctgagaggatgtgtcctgcacacagtctcaggcctgggcatttccagtggcacccatgaggtggctgctgttactgccctcctgtccccagggcgttcagggtgggcagtgaggagtgctgtcgggggactgggggcccgggccctctggcttcacctgtccctctggcttcacctctatcacactgtttgaatctcggttgggcctgagacctgtgtgcccccttcctggccccgtggtgactttcagacgttgaatgtggccaggcagccagcatctgccccggtgcattccttggtgcccagggagacatccccagactagacaggacccttctctggactttctgtgggctggcccactcagggacctccattgtttgggagcggggtcccctgaacagagggcagccaggagccagtccttggtgagccagacttcactgtggaggcggcagcaccttcagccagggtagcccgaccaagcctggaactctggagaggcaccgtgactgtggcttctagtcctggctccacctctctctcccctcccaggaactccccctccacctcccatctttatctctcaattttgcaggcagtcacccaagccaggccggatggtgggcctggggtgcggcgtcagatgggtaacgccctgggcctggagaggccaccgagcctagccatgcggcattagctctagctctcactccctaatccgtccttcttagctgcgcacacaccacacgccccctcccctgcaccctgtccccggcctctctcagccactcttctgcttcccttgttcactgtggagccgtgtgccctggggagggggagacaccgcttcgcagccctcggttctgctttgctgcttctagactctgcacagtggtggggggctgtcagagttggggtcacgcgggctgctgcaccaggcacctggggactgggctgcttgtcaggaggggcagctagtcagttgggtggacgtcaggcaggccttggacacaaaggaagacatggacagagtggatggtgggcctgatcccggaggccactgggatttccagacctgggatcaggacgagggatgtctcctttcatccatggacttaaaccccgaggaacgtcctgactcagccttttgactaaatgaccttgggtgaattatggaccctcttagagcctcacctgtcaatagggaataagaattcttaggccccaggtggttattgcagcatcggctccgatgcaagaagaagcactttgtctgaagaggacacgcaagggtattcatgccttggggtttcaagaggaagagattgaggggaacctgggagctggctgggcagggtggggagcccttcccagagcagtgggcccccctttccactccagcccatttctctcctgtggcctgtggctcagctttctcctgggacagagtccttcctgtggggaagggacagatgacagggggagtggggggatgagggcgtggccgtgggcgaggcacagcccaggtttgatctagggacctctggggtagcagggcttggggacccacctgaccacagcatgccctgctctgtgcctcacagaactacaggatctcatgcacatctcacgggcccggaagccagcgttcatcctgggctccatgagggacgagaagcggacgtaagtggatcgagatcgggggcagagcggggaacgtgtgcgctttcctgcccctcacccaccccctgttgtgggctcagggctttactctctgcaccctcacagccggcgaagtggctctgctcctagtcttatagttctcagcagagacagaacatggagagcctgtgtcgctcgttcattaatgctgggcggtgcaggctctggagaccagcccagggtgccaggcttcttggacttggtggggctggcgcagtgttctggcctccctccctgatctccttatggctagaagagggggagatgcctgggtcccccctggggagatctcagcagctgcttcccactgctcctactggcttccttaaccacctcccactgcagaatagtggcgtgggctgccttccccagcacctgctgtatacctagtcccattgtaagaggcgggcctgggtgacaggatgcaaagagaagacgcccaggccttgcccttcaggcataatcccgggtgcttgaactcagtgccagctggcacggcaaggtaccaggacaaatgcgtttccagccactgtgctgtcgccacctcccttgattgctgcagttgattcatttattctttattagtctctcatgttcctaatagccttcccagggaggaatttgtaaccttgttttacagatgcagaacctgagcccctgagaggtgaagtgacttgctcaaggtcacacggagtgagtgtcagggtggcaactcacagccgggtcttccgaacccacgtcctttgtgctaccgcaggctctctctgggttctctgtggactctatacctagtgccagccctctgcagggaaagctctcttctcagaatcagaggcagctccactcccagggccaggcagtgatcgtgcagctctgtgggtcctctcacttcgcactcacttccatgctaccctgttgtgtgccctggaggttcccctgccccatcagcattccctcccctgtgccccctgcatgctcttgcacgcgggcacacgcacacacacacgcacacatgcacgcacacacacccacatgcacatgcctgcgggttgcccacatgcatgtgttgcccacatgcaaacacatggacacgcacacacatgcacacatgcaaacacacgtgcatgcacacacatacacatgcgcacacatacacatgcatgcatgcacatggacacccacacacatgcacacacatgtacacacatgcatgtacatacacacacctgtgcaggggctgaggtgaggcagctgcacctgaaggggggacccacatttcccaagggaggaaaagcagattccccagattctggagcctcagaaccctgcctggagcggggctgaggcaagagtcaggagacccctcggtagctccccacttgggccttccaagctacagagccctgcgccctctgggttgatctctgtcgccagccccgcatcttcgggagtttgctttggcctccagcaacagtgtagtctctcccctgccacctctaggcttgctgtggggctgggtacctggtccaggaaaagacccctagaggtgggacccgggcctcctccatttatcagccctcttgggcacctcctgcatccccttgacacacagcgctgcccagagcagaggcggcttctgccctggtggagcttccaggtcagcgcaggagagagtaaaagaaagattgcgaatggaatggaagcagcctccaccaggaagcaggtggagcagcaggcgggctgtgagggagggtctcgatggcatcagggcaggcttctctcagcttcatcaagctgagatgggaagatgagaagatcagaggaaggttccagactgaaccaaccacaaaggcattcccccagggcatggccaatgaggacaggcaggatgtggggagacgtgtcagggcgcgctggagagcatgtgactcaggaggcggcagacctgggtccaggtccagtccgcatccatatgacttggttcccgtcacctaacctctgagctacactccctccgtcactcaaaaatatgcacagagagtaggcgcagtggctcctgcctgtagtcccagctactcgggaggatcacttgagctcagaaggttgaggctgccgtgaactgtgattgcaccaccacacaccagcctgggtgacagagtgagaccctgtctctataaataaataaataaataaataaggctgggcacggtggctcgtgcctgtaatcccagcactttgggaggccgagacaggcggatcacatgaggtcgggagttcaagaccagcctggccaacatggagaaaccccgtctctattaaaaatacaaaattagctgggtgtggtggcgggcacctgtgatcccagctactcgggaggttgaggcaggagaatcgtttgaacccgggaggcagaggttgcggtgagccgagatcgcgttattgcactccagcctgggcaacaagagtgaaactccgtctctaaataaataagcacagggatgtcagggagggtctgcctcagaggcgtttgggacaatgacatgagctaatgctggtagcacccctcccatagcccctggcatgaacctctcccttcctccctgccccctcctcccctgcttcttccaccttgtgtggaggccctgatactctgtcactgcccattcctggcctggctgtagggtccccgcccctccttccccagccttatttaattccaacagactttatcaggcacctgctttggatcaggcctgatactgaccaaaatcaggtgtcccaagttggggagactggccgagatcctgctgggatggcgcctggtcagtgatgctatcccccgaccttcctttccctttctctgttgcactctccagcccctgaaatactagacatttgttcctttactgccctcacccccaccctcgctgtcctgcataggacagaagttcctcgggtccgtctgggtctgtctgccaggacacagctgcaggggacaagggctatgagggtggatgtaaagtactgggctgtggcaggaccctcctctctcccactgctgttcccactgcagccacgaccacctgctgtgcctggatggaggaggagtgaaaggcctcatcatcatccagctcctcatcgccatcgagaaggcctcgggtgtggccaccaaggacctgtttgactgggtggcgggcaccagcactggaggcatcctggccctggccattctgcacagtgagggcggcccctggggatggggccaggcggggctgagacctgtgtcctcaaggggccgagtttgtcttcagggctttgcaaaaagagagtggaggagtagaggagggctataagcactttgaggaggcaggggcggggctgcaggtgctgaggtcccaggctggaaggagaagggctgggcccatgggcttgggtttggggatcccccgccctctggccacagagggtagagctggctgtgtgaaattttggcataggaagcgtttcctatcgactgccttaacccctcctcccctcacccctgcaaagcaggcaccaggggccacacagcctgctgcacataaggaatcccattcccagggtgcacgcagcaggcagtctcaggaatgaggagccactgagcctcaggatgccagagccctcgcctgcacacttcattttactgggaaattttactgggaaattaagttcccaggtggggagggatgacgtgaagtcacatagctcatccatggggtcgctgggctggagcacagtcccctagactcccagcctggcacctcctaggccacagggcactgtgtagtctcctttcactgccgctttgcgaaggcgcctggcttgctggacagatagccgggtggtcagtgttgtgacggctcctctgtggagctgtctgagcttctaggtgctgacaggtggggaggggcactgccagatcagggtcctcagctccccccaaccccctggacattgtcctgggactcaacatgtctgactggtgcccctgcccctgtgctggtcagattccattttctccagagcgcccccacatctggatcctggtcatgcaaagtcttggaggtgcccggggaggactccccaccctagggtgggtatcagggcctgtgggccaggcctgtgttggatgctggggatgcagagctgagccaggcataccccagcctcaggagcagggggctcagccagtccaggaggtgctggggacagagtcccatgggcggaggaggagagtcatctgtcaagttgccgggacgttagtgtccacggcggtttattgactggtatttcatttccttttgatgattctcaccatagccctgcggggtgagcagatggggaaactgagaaccagagaggatcagccagtgaattgggcagtcaggactgggtctccagcagtgtgcccagctctctaccccagcctcagggtcccagcatcccctctctggtcttccacagggtccaagggcgggcacgaggtctgagcaggcagactgggcagagtcctagcttcttctccaaaagggccacgtccttcttcagggaccatttcttccccatccggggtcttgagactcccaggggccatggaggggatttgagaggtctcctggctgatcctccggtgtgggcagatggcctcctttcagctaccctctgcttgtacatccctggccctggggaactcactgcctcacgggggaagtggggcagcttctccttcctggaggtgcagccggccccttggccctgtctgttctgaaggctcaaaggacagggctattccttgttttctgtgacaaacaacgtgggtctagcttttataagcttttactcttgaggggctcttctttaaggaaaataatacaaaatcatgaatacaagatgaagtgcagagccgtggggcttcagtggtttttgagtctctccgttgcccaggctggagtgcagtggtgcatcttggctcactgcaacctccgctcccgggttcaagcgattctcctgcctctcagcctcccgagtagctgggactacaggcgcccgccaccacacctggcgaatttttgtatttttaatagacggggtttcaccatgttgggcaggctggtctcaaactcctgacctcaagtgatccacctgcctcagcctcccaaagtgctgggattacaggcgcgagccaccatgtccagccggaaggaggtttctctctgtctgtctgggaggttgcaaaggaagggcccagaatttgggtttgcttaggcctcggtaaacccgcttcctcctgccacctcctgcgttcaggcgctctgcaggctgttctacgggagccctgcgtgtggccgctgcatctccccgcctctgacccctttgttcctaggtaagtccatggcctacatgcgcggcatgtactttcgcatgaaggatgaggtgttccggggctccaggccctacgagtcggggcccctggaggagttcctgaagcgggagtttggggagcacaccaagatgacggacgtcaggaaacccaagtaagccctggcgcactggggccgtggccgcagctgtgcccactgtggctgttccctggggacagagggctccctgtcctgctgagggagggggaagagcgccccacgcttgaggggagcagagggaacccccttcccagggaggcagagggctggggtgtggctctcacttgggcatgcagacacctgctgagcgcaggaggggcgtggcctggtgggcctggctctgccctgcctggctctgccctgcccggctctgccctgccggctctgccctgcctggctctgccctgcccggccaggggtctggggcttgcctggagagagcctgggccacccttctctgagaccacctgggcagaggctgggtttttgctgcccaggcaaaaggaacccactggcctttcaaatgacacggctaaacattttctcacatttcagacagcactcgctcccaggatcggactactaggttataatcagagggcttcagtcttacctttaatttaaggcctacaagacttgaactaatttaagtcagactgaaggagaaagtcacatttccaggaaacatttgtttgggaagcccaaatcctaggactaagcaatgcatcccgttcggggctggatgaatggtgtgttccaagaggagtgttttgagcatttctgagtgattttttcatattttgaaagtgagtgtcccccagtcttaggggcccggcatcccctctgcggtcttccctagggtccaaggccagggaccttcaatcttttttcccactctgtggcttgtctttctgctctgtggtgtttctaggtttttgttttttgttttttgttttggttttggttttggtggcccatgttcttaatgaggtagataatatttataaatatttttcttcttgtagtttgtgattttttcctttctttctttcttttttttgaaacagggtcttgctgtggggcccatgctggagtatattgctgtgaacacggcttactgcagcctcgacctcctgggttcaagcagtcctcccatctcagccgcctgagtgcctgggactactagcatgtgccaacacatgtattttttgtagagatggggtttcaccatgttgtccaggctagtcttgaactcctgagctgaggcgatcctcccgccttggtttcccattacaggcatcagccaccatgcccagcctagtttgtgctttttatttctcgttcataaacccctttgctgcccccaagcagcacacgattctcctgtgtcgagctggaaagctctctagatctgccttttacattgaggtcttttatcaacctggaattgatttttgtatgagggtgaaatccaagatccaatttaatgttttccacgtgattggccaatttttcccagccccatctgtgaagtctgtccttccctccgcttcctcagcagtgggtcaagcatccctctgctcttggatctgctccaggctgtgttttgttccactggttggaaagctgtctctgtgcccggaccacagagcataaaaaactaccgctgtgtggtgagtcctggtgtctgggtggcagatcctccaccttggccttcttcaaaaacatcatggctattcttgggggcagtagagagaagtggatacaagcatagaccctgaagtttctacctcttctcaaaaataggaatatgccaggcatggtggctcaagcctgtaatcccagctctttgggaggctgaggcaggaggatcacttgaggccaggaggtcgagaccagcctgggcaacatagtgagaccctcatctctacaaaaaatttaaaactaacaattagctgggcatggtggcactatggctgtagtcccagctaattgagaggctgaggtgggaggatcacttgagccccggaggctgaggctacagtgggctgtgatcccatcactgcactccagcctgggcaatagagtgagaccctgtcttaagacaaaaaaaaaaaaacaaaaacaaacaaactcacaaactataaaaagaaaaaatatttataaattctactccattaagaacatgggtccatccaaataaataaataaaacaaaaacaccataaagggagtaaaaagacaagccacagagtgggagaaaagatttcgaatccatacatccatcaaaggactcattttcaaaatatgaaaagatcattcagaaatgctcaaaatagtaaccaccattttactttctcttcctatgagtttaactgctccaggtactgttaagtaaaatttttaggggataattgatttggaccaggattctgtaccaggcccaacagaagaaacgaatatggagtcattcatgccaagtgaacctagttagcttaggcgtatacccatgtaacaaatagctgagttctggttagctacaacagctaagctttaatcaatcatagatggccacctgattcaaacaaggcaaaccaattaagctccacacctcactttggttttcagcccatcaacactgcctgaccacgttgcaggccagagttctttgaacctattctggttttgtggcctgcctgactctcagttcatcaataaaagccaattaacatctttaaatttgttgcaattttatctttgaccgtaccttatgtaagtggaatcatacagtatttgtctttttgtgactggcttatttctttctttttttttttttttgagatggagtcttgctctatcacccaggctggagtgcagtggcgcgatctcggctcactgcaatttctgcttcccaggttcaagtgattctcctgcctcagcctccggagtagctgggattataggcgtgcaccaccatgcccggctaattttttgtattttagtagagacagggtttcaccatgttggccaggccagtctcaaactcctaacctcgtgatccacccacctcggcctcccaaagtgctgggattacaggggtgagccaccgtgcccggccatgactggcttatttcacttggcatccatgttgtagcgtgtgtcagaatttccttcctttttaaggctgaaaaactccattgtctgttggatacacgttttgcttctccattcatccattgatggatattttagttgtaaattgactgctgtcaatgtcggatgtgcaaatacctgtttgaggcctactctctcttactggtgccttctctagagagaattctgatgggttcagtttgatcatattttgtttaagatttttggccaggcgcagtggctcacgcttgtaatcccagcactttgggaggccgaggtgggcggatcatgaggtcaggagatcaagaccacagtgaaaccccatctctactaaaaatacaaaaaattagccgggcgtggtggcgggcgcctgtagtcccagctactcagagaggctgaggcaggagaatggcgtgaacccgggaggcagatcttgcagtgagccgagattgcgccactgtactacagcctgggcaacagagtgagactccgtctcaaaaaaaagatttttgtgtccacgctcgtgggcgaacttgacccgttttttcctattttgggttttgaggaaatatttcctctttttatttttcttggaagagttagtataatagtttattttgaatttatggtagaacttgatagtaaattcttctaggcctggagtttgcttggtgggaggatttttgatgatggaattaatttctatagtggttgtgagactgaccactcggggtttctaaatacctttttgagttagttttggttaagtgaggtttttctaggaatgtgtccatttcatctaaatctttaagcttattggcttagagttgttcaaaatattctgtttttttttttttttttttttttttgagacggagtttcactcttatcgcccaggctggagtgcaatgacgtgatctcggctcactgcaacctctgcctcctgggttcaagcaattctcttgcttcagcctcccaagtagctgggattacaggcatgcgcaaccacacctaatttttgtattattagtagagacggggtttccccatgttggccaggctggtctcgaactcctgacctcaggtgatccacctgcctcggcctcccaaagtgctgggattacagacatgagccaccatgcccagccgattctcctttttctaacgtctgcagtgtgtgttggtgcggcccccttttctttcctgattttgataacagataacagccatgttttatcagtcttgcaacaggtttttccattggattagcctttcaaaaaaaccaacttttgctgaattgtgcccccaaggttggaccaatctgacactcctccagcactgccggagagagcctgttttgcggggatggtgcggggagaagcccacctatcccgaacagaggttggagtgggcactctgctacccaaggccctggggtgtgaattgtggggaaagggaaaggtggatgggcgggtggctcagccgtcctcctgcctcatttctctccagggtgatgctgacagggacactgtctgaccggcagccggctgaactccacctcttccggaactacgatgctccagaaactgtccgggagcctcgtttcaaccagaacgttaacctcaggcctccagctcagccctcaggtttaaaccatgtttgatgcatccatgggaagcgactggcccgagaggctgtggggtggtgggtgggagtcgtgcacttgccatcaggcaccctcaccgtgccaccagcccacccgctgcactggtctttattggctgaggacagggattgcgggggagctgtcaggcccctggcaggttagaaaagtccctggaaagtcctcagctgtacctgccttccaccaggacgaactagccagagagtgtggcttcgtgggtcctgcttctgaagagttcccagcctcccctcttcccgcacccccagcccccaacacgcacaccctgagatctggagtgcatgggttttatgccagtcccttgtgccactgggccgccctccttccccgcccctagaccagctggtgtggcgggcggcccgaagcagcggggcagctcctacttacttccgacccaatgggcgcttcctggacggtgggctgctggccaacaaccccacgctggatgccatgaccgagatccatgagtacaatcaggacctgatccgcaaggtgagtgccgtaggccagagggcctggacccactgctccctggagccaatcctgtgtcagcaaaccatgctagggaccgacccccaggacagcaggtggcttttacacacgcactcattcatatgtgcacacagggcaaattgatctcactggaacctgttccatgggtgggatctgcctgaagcactgtgctaagggggatctgaggaccactgtgctctaagtgtgcatgagtggggagggcggcatgcataccatgaacgtgccactcgagccagcctggggacaggacacatgcttgcccttgagctcacctctgtggatagacagtcccacaggaatgcctgtccccacgggttgccggtgctgtggtggaggaccgtgaggcctctgctaaaaggcctgggggctcggaaagggctccatggaacaggggacccatcctgaggcccttggggacagagcagtgcagaatcagtgatctggaggaagagcagcagccctctctctgcagaggtacagcagaggctggcaggacccagcatgctaggggaggccctgtggcgtggcgggcggtgggtgaccggggtgggcgagcgcggtggctgagctcagaccctggagccagggcgcctctgggggtccccgttctgcctgcactcactgcagctacctaatggggccatcatagcgcctgcctggggaggctgcgaggccttggcatgctgttgtctgtgaaatgttcacagcactgccgggagcctgagctgcatccttgctgctgtggtttcccgaagccccagggcgtcctgggcagcgcagcagaggctctgggcagacagagaagcgccctctaggggccagatcgggcagggcgggcttcctgcaggcggcagagaccgtcagactgtcagacactagccagtctaactctcctattgcgtgcggatggggagcctgggacccagagtgggaggcatcacccaagatcatccagcaaatcggcagcagagcttgttcggaagcaaataagagaggcagcggccgggcgcagcggctcacgcctgtaatcccagcactttgggaggccgaggcaagtggatcatgaggtcaggagatcgagaccatcctggctaacacggtgaaaccctgtctctactaaaaatacaaaaaaattagccaggcgggcatagtggcaggagcctgtagtcccagctactcgggatgctgaggcaggagaatggtgtgaacccaggaggcggagcttgcagtgagccgagatcgcgccactgcactccagactgggagacagagcgagactccgtctcaaaaaaaaaaaaaaaaaggcagcacccagggctcaggttcaagccttagcccctacttccctaccacgtggcccctgcagctgcttcccggcctgagcttcgctgagagccctcatttgcaaactgggtgatcagtgccctctccacagactggctggagattaaatgaagtaatgatgcaaatacctggcaaatcaccaacaccaaggaacaccgtctgcctttcctcccctggccacgacttgacttgggccagcatcagatggggtgggcgggatccttcttgcagctggtgtatgtgtggtcctgttggtacacagatgctgtcctgagcagatggcatgtgatgcccgcaccagccgttctggggtcacgtgcaagaggctggctggaaatcatgccaggcatgctcttgccaccagagacctcttgccctgttctcatgtgccccagagcccagtcttgggcctccccttgacgctccccttcgtgccccctacctgtggaaggtctcttctgactgcccctgtcctgttcccaacagggtcaggccaacaaggtgaagaaactctccatcgttgtctccctggggacagggaggtccccacaagtgcctgtgacctgtgtggatgtcttccgtcccagcaacccctgggagctggccaagactgtttttggggccaaggaactgggcaagatggtggtggactgtgtgagtgtgggcccctcccccaggccacttccctcagggtctgtagcccaggtcgatggcttcccctcatcctgtggggcctttggtgttggaggagacagcagggctctgtccatcgcctttagccagctggagggagagagagtccacagttcagagtctcagtgcggggcagggaccctcagtgaccaccagcaggggggttttcaaacgctttttagctgcggatccctttctgcaaacatagcgcagtgtagaagcccagaatggacaaaggctccagagcgggctgggcgctcaccctgtaatcccagcactttgggaggccaaggcaggcggaccacttgagcacagcagtttgagaccagcctgagcaatataatgagactttgtctctaccaaaaaattaaaaactagctggacatggtggtgtgtgcctgtggtcccagctactcaggaggctgaggtgggaggattgcttaagcccaagaggcagaggctgcagtgagctgtgatcatgccactgcactccagcctgagcaacagaaggagaccttgtctcaaaaagaaagaaagaaagagagagagagagagagaggagggagggagggaaacttcagggagaggggacatggaggcctgtcgactcagccgctaccctttcccccactcatcatccctgaaagggcactgctgagacctctgcccctctgattgcacagctgggacagtccctgcagtcccaggaaggggttttgcccgagccgctctgctgctgtgtggctcagcctgactcgaaagagcctggggctccccaggctggggctccgagagtgcagggcagggccgggcggggtgcgggccgggcggggtgtgggcccggcactcaccaaggctgcttctcaccagtgcacggatccagacgggcgggctgtggaccgggcacgggcctggtgcgagatggtcggcatccagtacttcaggtgagggctcagccgccccagcccttggccccgtgccctggcgtggtcggactcaccgaccttcccctcccagccctagtgtggactttcccttccccaagggtctgctctgttccccaagcccaccctggtcctagctggcgtcccctgcccagcctgagcatcctagggtgaccccctcctccctggcccgaacagattgaacccccagctggggacggacatcatgctggatgaggtcagtgacacagtgctggtcaacgccctctgggagaccgaggtctacatctatgagcaccgcgaggagttccagaagctcatccagctgctgctctcaccctgagggtccccagcctctcaccggccccagctgacctcgtccattcagcccctgccaggccaagcccagccactgccctcccgggcagatctgggcccaggcacctctgagtccatagaccaggcctgggagaatgccaagctgcctgcccgaggctggtcctgaaggcctgtctcccactaaccccgccttccagcactttctgtcattccaggctgggaaagtctagagccccctttggcccctttccctgactgtcaaggacaactgactcccccatcagctcaaacattaagggtacccgggcacaaccgtacccctgcccccagccccagcctccctgagggcctgccgggctgcctctgccccagcccccagcaagggcactcccaggcttcctggtgggtgcagcccactccctctgccctctgctccgttccctgggggctgggactaaagaaatgggtgtcccccaccccatcagctgggaaagcccaggccgcaggagtgggatgcccgttggactttgcccctcacactggcccagcccctcacactgccccaccccgagaaccctcagctctcaaaggtcactcctgggagtttcttcttcccaatggaagt

SEQ ID NO: 15730 - DNA, 69825 bp, Homo sapiens
cgccggaccctcctttggatattcctcgtgtctccgattctgaggcatgtcctccattaacccttatgtgactccctgagtgcccccaccttccatcttttcatccccctgcgtccccaattcccatcccgagaccgcccgtgtctcatctcgaacttgtggaccccagggaccccagcttcgaccctgagtttctcccctgaaccccagtctcctccgtgtgtctccctcagtatccctaacttcccgagtcaatccatctcttctctttccccgaccctcagtgcctctttaggccccattggccgtcctaattttccttcctgtgctcctctaagtgctcacttgattccccacttcacgtccgtctccacctttcgtggtgcctctactcatttctcactccctgcttctcctgcctttcctccctgctttttttccttgcctttcctctctcgcgtgcctccagacctgcccccgacatgctccctccttcccctcagcctggccaccccagagtctcccacccctaatcctgtgtccacctcctgctcccacagatgacttggaagctggtgacagggagcatgtgaccagggtgatcatgggactgggtcggggcaagcctgtgggtgtgggacagggagggcacagggcaaggggacctgtggccgtatttttaatgggctacccacatgaccccaacgaatacctccccctagcttctgggtctttccctcacctgcctcttacccgcccaacaggatgtcaggcaggttcggtttggcaacgttgaggctgcacccttgggctgaatgcattgtttttgaatgcattgtttttgttagagtttctgcctggagtttggaacctgttttctgtccaagtctcagtttcctcatctgtgacaggggaactgtacctcctgccctcgtaagtctgccatgaggttcaaaatttgaatgagaaaatgtagaaggtaaagctttataaccagtatggccctgtacaaatacatgattttactgttgggtcataggcagaattgaaaggagtggaaagggaaagggctagaatgagaagacaaggagagaaggatgagcaggaggtcccttgtctttcagtgtatcatttggcagtgtttgttcatcacctcttgtgagtcaggctcttctgtatatgttctcttcaccattcattcagtcatcgtttatctaacaaatatttacggactgtctgatgttctaggctacccttggtgtggccaatgatattctcacttcacatgagaaaaagagggcgcatgagttgcttgaggtcacaccgatgaggttgaagctggaatctgacaccagagcctgtgtgattgtcctgatgtgtaaggtttgctactgtttaggacacttcttgttccttccgtggattactttcttgttacatgagagactccccaaaagggagtttccctcttactcagcagaatgacatcactaagagatacagaaaggagaaatttaaatactctgtgtgtgtgtgtgtgtgtgtgtgtgtgtgtgtgtgtgtgtgtctgcagacatctattgggtgtgtgtgctgggggaagtaggtaggcaaggagtaaggggccgtagtgaagagtgtgttacaaacttcactttgtagagggtggctccctgggagaatatgttctgtgtctttcacagtggattttgatagggtcatgtcttaaatgcctcttctcgttttcggatggtgatctcatccagtcttatttctttaagtgccgtctctattctgtcagcccacaaatttatatccccagtccagtccagacctttccctggaatgacatactcaaatctagttgcttactcagcacctcaaacttaggcttttcaaacttgaagtatttatttattgatttatttattttttgagacagagtctcactctgtcacccaggctggaatgcaatggcacgatctcggctcactgcaacctccacctcctgattctcctgcctcagcctcccaagtagctgggattacaagcatgcgccatcatgcccaactaatttttgtatttttgtagaggcggggtttcaccgtgttggccaggctggtctcgaactcctgatctcaagtgatccacctgccttggcctcccaaagtggtgggattacaggtgtgagccaccgcgccaggcctcaaacttaagagtttagaattgagctcctgttagttctgccctccatccctgaccccactcttcaccaaaacatgtccctcccactctctttctcatcttaggacataggagtattgttcattcagttgctcaggtcaaagctgtgagattatctatgatgcctctctgtttcttaccccacacccagccagagtgatcttgttaaaatgttgtttctttgcagtggcctctcctctcatggcacatgcctggccccctgttgcctctctgatgtcactggcttccttgcttttcctggaactcgctaaacatgttccagccccatggcctttgcacacgctctctttgcctagctattcatatgactttcatctctctccatcaggtatttatttaagatcaatttcttggtgaagacttctctcctcacccaatctaaaatttcactctccacctcagcacttcctatccccattctctggtttttctcctcagtagttaattgtcatctaaaacctttgtaaatatttacctgtttatcttctttattattagtagctctgtctaaaatataagttccaggatgtcagggattttgtggggttttttttggttggttggttgttttggttttgagacagggtctcactctgttgcccaggctggagcgcagtggtgcgatctcagctcactgcagcctccgcctcctgggtttgagtgattctcccacctcagtctcccaggaagctggaattacaggtgcacgccaccacacccagctaatttttgtattttttggtagagatggggtttcactatgttggccaggccggtcttgaactcttgacctcaagtgatccacccgcctcggcctcccaaagttctgggattactggtgtgagccaccgcgcccggccttgttttgttttaagacagggtctcactgtcgctcaggctggattgcagtggcacaatcacagctcactgcagcctcgacctgctagacttaagcaatccccccacctcagccaccttagtagctgggacttacaggcatgagagataccatgcctgggtaattgttaagtttttgtagaggtgaggtctcactatattacccaggctggtctcaaagtcctgagcttaagtgatcctccttccttggcctcctaaagtgctgggattacaggagtgaactgccgtgcctgaccagtctgttttgtttacgattgtatcctcagcggttagaacaatgcctgccacaatccatctcagtaaatatttgtggagtgagtcataacatgggccacactgtaccgtgccaccagcccaaagatctcttaaagtcacccctgtctcatgtgcttgggagctccagtgacagtttcggggcagtttgcttccagctgtggtccagccaagcggagtgaatgaaagagatgctttttccttttgtgaaaggacgttttgctctggctcacgtgagcagcagtgcattttgagacgagggccttggcttttggaatctaagagcctgttgagcaagcctcgctcagccaccttctttcagctttctcctgaaggcagtttgaggattaagagcctgatgctctggattccacctaattgggttcagatcctggcaaactgtgtaacctgtgccccagtttcctgtgtaatgtggagagacctggaccttttcttacaggtgtttggagggttaaatgtggcaattcggccgggcgcagtggctcatgcctgtaaccccagcactttgggaggtggaggtgggcggatcaccggaggtcaggagttcaagaccagcctggttaacatggtgaaaccccgtttctactaaaaatacaaaaaattagccgagtgtggtggtgcgcgcctgtaatcccagctagtctggagactgaggcaggagaatcgcttgaacccgggaggcagaggttgcagtgagccaagatcacgccattgcactccagcttgggcaacaagagtgaaactctgtctcaaaaaaaaaaaaaaaaaaaaagtggcaatttacccgaaactgtggtgaagcgtctggcgccctgtgggtgctgggcagcagtgggtgctgatggggtgtgaggggatgggatcaagccctttcccactaacttaggaaagaggttggaatgagctggggtcagagggaacatttgcggggacattttgccgggaggctgccttggaggttcagaggctcagatgacccctgtgttcattcagtgttttctcacccacagattgagcacctgctgtgtggccagccctttgcctagtgctgttcaagagtcagaggacataggcaggcaatcccccaccacaacctgccaccccatttcctctcttggggccttgatttctccacatgccaaacagggagaatgattgcaccttccttgtttctttttttttttttttgagacagtctcactttgtcatccaagctttagtgcagtggcatgatctcggctcactgcagcctctgcctctcgggttcaaagattctcctgcttcagcctcccaagtagctgtgattataggcacccaccatcacgccaggctaattttttttgtagttttagtagagatggggtttttttctcacacgttggccaggctggtcttgaacttctgacctcaggtgatctgcccatctcaccctcccaaagtgctgggattacaggtgtgagccaccgcgcccggctgcgccttccctgtttctttgtgagcttggaggtggatcacaagtgtgaaaccctttgccaaccgtgaggcatggtggccttgtgagaggacggaggccggtgtgtggtggcatgctcccgtgctgtgtggcacagacggagctacaggaaggaagttggggcagcttggcactctgagtggaccctgagtttccagcctgctctgtcttgactgggtgggaggagggtgctcaggagggtgtcactgctgccaggttctgctgccaggaccatccaacagttgttccaatcatgggacatcctgtcgtcagcagctggggctcgtgaggcctgatttccacctcgggcagttctgtgtgtgctcctggaatcccccacgtggccaagcctgtgaggtctgcttcctggcctgctgcctgtgggttcctgtcacgcacctctcgggcagctgtccggctcctctgctctcggcttagtcaagaaggaagcagaaggcttggagtctttcctgcttggactaggagtgagctcagcctaagtgccctgactatatataaagctgaactttccagaccgaagcctggggatggatcagtccgatcacttagggccgctcctgaaggagtgcaggtgctagatacaggttctcccggtggaggagcgaaccccttgtgggccgttagctactggtgggatttgagcatggtatttccctatccgttgtggagaggagcatggcagctcagagtgggtgggaacagtgtgtggtccctgttatcaccttcaagggaataaagtgtgtctgggggcttcagaggtgctggccccatgggcttataggtggttcattcattcattctcattcattcattcaccaaacttattaaacacccactgtgagtcaggaacatcatgccaggtgcttagggaaacaaatcaaagcgggttgggtgagcagcccaagccaacagatgcacccccattctcacatggtgtgtgttcctgtgggctgggccctgggtggtgtggggtgctggggagaagaggaaggcacaccaggctgcagggcggaggtgcgggtatgaattttcagaggagatggcacctgagctgtatcttcatggataagaagagatttgttcatttgtcctttgtggagcacacattcaggttaagaaagtggggaggatgggctacgctgatggagcgtatgtgtggtatccccaagtgcactgagacacgagtttgacgtgttctgggaagatcgatggtgcggcgtggctggagtagaggtgagggatgagttggaggggtgagttgggccagctctcatggatgctggagtctgggctttccctgggaggtcatggggcgccactggccagggtcagcagggagacctgcagctggatttgcatcgtacagtgggcatggaggggtgtcaggctgggttgggaaccgtgcaggctggaagggcactctggtgctctgagcattcagagggggcagctgggccttgaaggatgagcaggggctccagcaggaactggagagcgcattccagggaggacgcaagtgcaggcccctttcactacagaaaagcagttttcacacagaccttccaaaggggaggagaggggactgcctgggcctggcagctgcggcaggtagcagcaatcagagggcagggaccgctcctcccgtgcctgagacctgcccagggtccttcagggaattcgtagctgaggaggaaccagatttttgggactgagttctccctcaccacccgctctgagccaccctcttggtcccttgtcctctactgcacttcttccggggcttggctcctcgtcatgagaggagcttccctgggcatggcgaggggcgtgactgacatagcagccctggacaagtggctccaggtgacctgtgttcacgttgatcacagcactaaccacggcccctcctctcagcaccttcccctctcgagccgtccagtcccagtgaaaatgctcaccgttcatgggtgggctgagcaagcccctgatctctgccttcctccgtgttctgatctgcttcatctgctgtgaaggcctctcgccatttcccccgctggcaaactcctgttcttcctggaaagttcagctaaaaagtcatcccctttaggggtccttccctcaggggaccgtgcacttggcgagacagggactggtcttgggtctctctgttgactgttttatgaacccaggtagtcacttccagggaactcatcagagatgctaccattggctccaatctccctctgttcccactcgaggttttttgtttcttcgtttgtttttctttctttctttttttttgagacagagtctcgctctcgcccaggctggagtgcagtgacatgatctcggctcactgcaagctccgcctcccgggttcacgccattctcctgcctcagcctcccgaatagctgggactacaggcacccgccaccacgcccagctaattttttttgtatttttagtagagacggggtttcaccatgttagccaggatggtctcaatctcctgatttcgtgatccgcccgccttaacctcccaaagtgctgggattacaggcgtgagccactgcgcccagcccgtttgtttttgttttttggtggacatcaactttaatttgccctttgttttgttttgtttttgaggcagggtcttgctctgtctcccaggctggagtgcagtagtgcaatcttggctcactgcagtctcgacctcaagaggatcaagcaatcctcttgccttagcctcccgagtagctgggaccacaggcgcacaccaccatgcccagctaattttattttatattttgtagagacagggttttgccatgttccccaggctggtctcaaattcctgggctcaagcaatccgtctgcctcagcctcccaaaatgctggaattacaggcacgagccactgtgcccggccttaatttgccctttgaacatgtacaattcagggcctctctgggcctcagtttcttgatctctgagatgggaagatgggataataatacttgttcctcccgtccttcagctcctccaggggaccctcacaccagcacactctctgtcagtcttccctcaatgaacccagcaggcaagcttggttttgacagaggatgggtgagcagagataaggaaaacggccagaaatatctggcttccctcagcaggggcaccaaaattggtacctggaaattgcctggcttggacaggcagaattgtcactgtcaacccccaccaccaaaggtcttgggtctttgtctttctgcttgtggtgtttgagagagctgcttgacacagccgaggtgcggtctgtgtcaggtgacctgggcatcctgggggtgcagggagaagcccaggtaaggaggaggaggggccggtcatcagtggggaaaagtgattgtctaccccacgggaaggtcaagggtaggacgctgtgagaagccagggggagagatgaagtgaggcatgatgcggggggccctcatccaccatccccctcttgcagctgtgctgggaagagcctaggctccagggtccaaggtggcagggacagaaggaagcacgtgtgagcactttctccctgctggcccgccttcctggttggcaatgccgtgagtgttccaggatgtggccccgtggctgtcatttcctttcttccacctagtgataacaatggccactgtttgtgtgcccacagtcggcctgtgtcccagacaccttccctccattgcgtcatctcgtcctcctgcctaccctgaaggctggatgccagccaagcctgtcgtttctgtggccatgctgtcgtgggtgtgtggggggcatcccctagccccaggctctggtggggggtacacaggctgggccattgacgaaggggtgtgtggaatctttctttgatttcactgcacccctggtgactttctccctcaatctgaggctcatgggtgctggatgctcttgactctctgcccttcctgggcgcacccctccgcgtccctgtgggcccgtcctcggggtagcctctctgcgctcttccaggccaggcctgagtcccacaggtccccatcttcccggctgcagcccccagaggctcagcctatactgctacttcctttgaaaactataatcgctttacatagcatctggaaaatagggaaaaggaaaaaacaaaagcccataaacccagcaccctcatctactcaatggcatgttttctgtcagtctatcttggtttgttttctatcaggctttgttttttctatgcataatatttactcagttaaatttttgttttgacaaactttctgtgagccaagcttgtggacggagatgaaaagacgagcagctgcctttgagaaactcagactctgggccagcccatctgggtgccagctttcactgctccacccactagctgggtgaccctgggcccgtgactttacccctctgttctttggtgttctcatatgtaaaatgaggataataatagtaaccagttcatagagtggttgtcagacagaatgattaatgtacgtaaagctttcaggatggtgccagcaagatgcacaggagtgtttggtaggaggatgacgaagcttaccgtctggcaggaggggcagttgtaacatgctgggctgtgatagtacagatgtgtttaaagtgagggagagcccagagcaaggagagagaacctggcatctggtgatggtgtatcaagaacattttaggccagacacggtgactcacacctgtaatcccagcactttgagaggctgaggcaggcagatcgcttgaacccgggcgttcgagaccagcctgagcaacgtggtaagaccctgtctttataatttttttttttttttttctgagacggagtcttcactctgtcacctaggctggagtgcggtggtgctatcttggctcactgcaacctccacctcccgggctcaagtgattctcctgcctcagtctcccaagtagctgggattataggtgcccaccaccatgcccagctaatttttttatatttttagtagagacggagtttcaccatgttggtcaggctggtctcaaattcctgacctcaagtgatctgccctcctcagcctcccagagtgctgggattacgggcatgagccaccatgcctggcctctataaaaattgtttggaagaaattacctaggcctggtgatacacacctgtagtcctagctactcaggaggctgaggtggaaggaggtagaggctgcagtgagccatgattgagccactgtactccagcctgggcaacagagccagaccctgtttcaaaacaacaacaacaaaaacatttttaaggaggaggctgagaaccacgagaaccaagcttggatttgaagaaggatcagggctttctcagacagaaaaggagaggaagaacattccagatagacatcattgagagatggcactgagccttgtaatgggacactgcgaacttttcttcagttgttatgatctttttttttttttttttgagacggagtttcgctcttgttgcccaggctggagtgcaatggcgccatctcagctcaccgcaacctccgcctcccaggttcaagcgattcttctgcctcagcctcccaagtagctgggattacaggcatgcgccaccatgcctggctaattttttgtatttttagtagagacggggtttctccatgttggtcaggctggtctcaaactcctgacctcaggtgatccgcccgagtcggcctcccaaagtgctgggattacaggcgtgaaccaccgtgccttgttggtataattattagtattgatcttttttccttttcatgtgcctcttagtgggccccttgcttttgtcttccttctgtccccagggttgatcctgtgctcagcacataggccagggaagaatgtggctgtgacccagtgtccactcagatgtcctctctcccccagggcacccatactctgtccttagtgtcttttgtctggtgacatcttggcacagaggcagagggcggcctccgtctgattggcgcctggctttggtgacagtaccttaggaaggcagtgtattttctgggaacctaggaaataacaaggtatctaattccatcatcaacactggggacaatttccatggcagaaactatgactctgaatatgcagcgtaaagttaccacccagacactgctgctcctgagtctcgaatggcatcttctgcaggggctcccccacctgcccctgcagaaggtgcagttcgttcatttccaaggagcttgcttttgtgtgctgtctctcggagctctttgggaaacctgtggtagcaggaaacaaaggatttagaccaatgccgatgatccccttgctccgatagagtgtgacatgatgctggtcaccttttggtatctaggaggggggacattgattttgtttgcggaagtgaaatgatccatgctggcctctttttttttttttttttttgagacagagtcaccctatcgcccaggctggagtgcagtggcgcgatctcagctcactgcaacctctgcctcccgggttcaagtgattctcctgcctcagcttcccgggcagctgggactacaggcgcctgccaccacatctggctaatttttgtatttttagtagaggcagggtttcgccatgttggccaggctggtctcgaatttctgacctcaaatgatccgcccgcctcagcctctcgaagtgctgggattacatgcctgagccactgtgtctggtccatactagcctctttgagtgctgaaaggttatctctgtaacttatttagtgagaaccctccatttgcccagggcattactgcctataatgtatgttcacatgtgctatctcctttggtcaataccacacactacaggtgaggaaactgagtctctgctgggacactgggtcaggaagcaggcagttaaggtcacctgtgcacagtggcagcacagggggacagccttctaggtagccagcctggcctgagggttctgtcacttttacctcccactcagtgttgtttctctttctttcccctccttttaagatccctccaggcccaggatctggggacaacgctggtggggagtgatctgggtgtctgtgcaggaaaccgctgcactgggtgagatgggcatgggagactgtgcctggctgaccagagacctcgttttcttccagacagagggggaagacggtggggcctccccacctgccccgcagaagatgcagttctttggccgcctggtcaataccttcagtggcgtcaccaacttgttctctaacccattccgggtgaaggaggtggctgtggccgactacacctcgagtgaccgagttcgggaggaagggcagctgattctgttccagaacactcccaaccgcacctgggactgcgtcctggtcaaccccaggaactcacagagtggattccggtgggtgatgctcagcgggaacatacttctctcctttcactcccccacgtctcggattggaggtcttattggccgagaagcagtttctttgagtctctgtctgaggggtctggagaggggtgggagagaggggagactgtactcttggaccagagggaagggcttccgagactccacacttctggcccatcagtgtcccagcacgaggctgaggatggaagcctgggttgtttctggcctggaggctcgacctatatggacaaagggaagaaggaaggacagggagactgagagtgtccacatcagataaggcccatggggagaacctttagccctggctctttatttttggttttggtttttgttttttgagacagtcttgctctgttgcccaggctggagtgcagtggcgcaatctcggctcactgcaacctctgcctcccaggttcaagcgattctcctgcctcagcctcctgagtagctgggattacaggcacccaccaccacgcccagctgatttttgtatttttagcagagacggggtttcatcatattggccaggctggtctcaaactcctgacctcaggtgatctgcccaccttggcctcccaaagtgctgggattgcaggcgtgagccactgcacctggcctagccctggctctttaagggcatggccgttctcataggggctgcccagggtttgcttaggaaggctggacagagctgttgcctcttggggcatgctgggactcccctgggcctgaagagaaggctcaaaagccaggacaggcctgagggaaccgggccaacggcagagctggttgggaaaaggggagaagcagccaaggttccaaatgcaggccccagcagtgcttggcagactggcatctagttgggctcagacagatatccctgtttccgctcacctatccatctggctgtcctgtcagccatccattcaacatgcaccaagcacctccagtgtctccagagtcctgggcttcgggccagtcctggctggcctgtgagatgacaaacatgtcctgtgtctttaaggaacgtacagtctggtgggggaggtccggtgcaaacaggcgtcatagcaccccttgaggagtgctgtgacagagggagagcctaggaaacagtgtggatcacaaggaggtgattgagagctactctgcgtctggaagagtgaggaggagcctgtgtggcagaacaaaatggataaggtcgttccagccgtgcagaagtgtggaggtgtgagcctgcaggcaggtggctctggttggatcccaggtgcatgcagggctttggtgagagtgaggctgaaggaagcagctggggactcattctgactaaagaggcatggcaggaggggtctctgaaagtgtcaggctgggggccaggggctgccaccaacagaagagcaaggcaggtatcagggccccatccaatcaggtgagaattcagagcctggctccacaaggaacctgaggcagaggcacccacagcaggtgcttgggctaaatgcagctcagtggccagtgcaggcaccagttttaatacagtggggccattccagattctgagtgcagatggggctgagcagaccgccttccagctggactcgatcaggactgaccctggacggggcaggcttgcacttgtagcttcagagctccactgcaggcacagctgaccagggcagcgggtccactccttggagagctggacagccccacttttgaggtacacggccctggggataccactaatctccacgtaccaataatcaccaagttctgtcagttgtaaaatcccttgacaggattccagatttgtctcagccagcttaagccccagtgtgggcagacctccatcccaggaggatttagtcctttgtcagcagcttcttagctacacgtaagctattctgtggtactttatagtttacaggattttttgttttcttttttttttttttttgagacagagtctcgctctgtcacccaggctggagtacagtgacgcgatctcggcttactgcaagctccgcctcccaggttcacgccattctcctgcctcagcctcccaagtagctgggactacaggcacccgccaccacgcctggctaatattttgtatttttagtagagatggggtttcaccatgttagccaggatggtctcaatctcctgacctcgtgatccgcctgcctcggcctcccaaagtgctgggattacaattttacaggatgtttttaagtatgttgggttagcacattctctgccaatccgtggaggtgggcaaggaaggcagtattccattttatgcatgagaaaatagccttgggatgataagtgattcatcccacttatacacaggaagcagtgaagaaacagaatcagtgtcttctggttcccaattcatttctctgtgctgctgtgttgtttccatgtatgtatgtatgtatttatttttttgagacgttaagtcttgctctgttgcccaggctggagtgcagtggcatgatcttggcttacagcaacctctgcctcctgggttcaagctattcttctgcctcagcctcccgagtagctgagactacaggtgcgtgccaccatacctggctaatttttgtgttttttagtagagacagggtttcactgtgttagccaggatggtcttgaactcctgacctcgtgatctgcctgccttggcctcccaaagtgctgggattacaggcatgagtcaccatgcccggctttgtttgtcttatttctaaattttattgatttatttattttcacagtcatagctctggagtcttttttatcttctcccctctaacctgctcccacccgaacctttccatttcagcagatagcatcattgcaacgggctgtgccagatccagccatcacatccacctttccagccaaagggagggtggaagggcaggatgcagaaggtcaatctccccctcctcagggacatttcatggaagttgcacgcattggccagaacccggtcacatggccacagctaactgcaaaggatgctgggaagtgttgcctgtgttgcagacagccacgtgccagtcgaaaatcagaggttctttctccctccgtcttgctgctggctcgcttctccagaccacagtcattgtgcacgtgtctcctgctgctccggctgtggcctgcactcctctcatcctcttccaagctgctgtcacagcgctgtttccagagggcaaatctgattggtcactcccctgctttactccccaagggcttcctgttttcttttatttttatttttattttcattttttgagatggagtctcgctctgtcgctcaggctggagtgcagtggcacaatgtcagctcactgcaagatctgcctcctgggttcatgccattctcctgcctcagcctcccaagtagctgggactacaggcgcccgccaccacgcccagttaattttttttgtatttttagtagagacggggtttcaccatctactcttagccaggatggtctcgatctcctgaccttgtgatctgcccgcctcagcctcccaaagtgctgggattacaggagtgagccaccgcgcccggccagcttcctgttttcttaacacatcaggtgcttaatgacttaaaagggcccagtgtgatcaagtttctgcctctgtgttctcagctcatgccgccttgtgctcctggcctttgcccaggctcttgctgtggcctggaatactcccctttctttgcctgccttccttcctcttgccctcccctgacctgcaggctggattaggagtttctgctgggcatcccatggcacccgtccctgcactggggatcctgctttcctggtaggccacagaccttgtgaggggagggactgtgtctgttgggttcatgacagtgtgcccagcccccagcaggtgcctggcgtagatcaggtttgtggaacaaatgaatgtgatatattaatttagctttagagtattcattgagggctgctgtgtgccaggccctctgtgccacctgggtggagggtggaggactgttgcattgagggcagttgaaggagtgagctgggaagtgggaggtggaggatggggactgggatgcagggtttgaggttatcaggggtcccagaagcagtaatgccaaggcctaggctgtgacctggagtgagggctgcgatggggtggggtggggtcgaggctgtggaggagggtcatcagggcactgctggagccctggggttctccagggccgggggtggtcattgcagtgttctcccagctcctctcaacaccctgcggtctgtggagagcaggcctggtgcactggacttgcctctggccagggctgagtttctgccttctaaacgatcttcctcctgtgttgccctagaggcctctggactgtcctgagtacttgacgcgtgttagagtgagcatgggctgctagccttccgctccaggtggaggagtttctgttgttcttttgctgctgttgctgcagtgagctgccaggctgagcttctggatggacctgggggatggaattaggagcttctgaattcttgggttgtataacctaaggccggagagtcccacagcactgctgctgggcggagagactggaccctgctgatacagacagcgacagcagcaggagcatctgcagtttcccagcaggtcctgcatgcctgggcttggcactagtctaagtagtaactcatgttatcctcacgacagtcccacgaggtggggtcattactgacctcctattacagatgaggaaacagaggcttgcagaatttgagatcacacagctggtcagcgtagcgattattcagaccctgtcacctggctccagaacccactcgtttacctttcttacatcagggctgctttgtagtgtggcgagctgagtggagctccacccgcctgggctgatcctggcccttcctgcctgacctatggtgcgggggccctggctctccccgtgtgagcccccaggggtcacttgtaatatgcctgtgtacactatgatagcatagatacttctgttcctggtacagattaatcatttacggctggcattgacttgtaacagatgacatttgatgaaatcaaccagcctctcactggtatctcagcagaaacagggctgtacctcccaggcatcctgggaaggatgatagaagtgtgtgatctgtgcttccctaccgggagctgacttttgaggctctctggactgggactttgccataaaactgcttatcagaaacctcagataagtggagtgccctgtgtcctggccacgtactctggggccagctcctccatccattcagtcctcccacatcccatcttcaccaagcagagtggaaagcggcaggtctctgcgagaaaaggaggctctgtacccagccttcagtgagataactttagagtggggccttgtattccctacacaggccttgtccccgacacggcctctttgcccttgcttctccttctgctaagaatgctccttcccaactccttggctggacacacggctcctgctctgtgggcctgtcctgttcccactcagagcctcagcaccccccatgtggccaagacacagcccctcttgccttaggttgccgtgggtctgtttccacatctgtttcccctccagactgcagggctcctgagggacagggcctggggccaagtctcctctgcgttcctgatgcctggtggtgtgccacgctctccgtgggtgcacggtaaatatctgccgagtggctagatgtatccatggttgctgaaggccaagtgtgttgaccagagggcgtgggaaaggctccactggggtggctggggtagagatagaccttaaggggtccagaagactccaccagctggagggaaaggccctacagagacaaggtactaggaaaggcccagaggacagaggaggggccctgtggggagcctgtgggcaggaagggcctgtgctgggctttgaaactggggactcaggtactgctctagcgtgagggtccttggcattttttttggtccaggaccccctgaggtccctggggaatgagaacaggctcacacagccactttcaagaggtttgcaggtcccctgaggcttagccacagacccctcccaccccagcagagacacagcagaggcttctgagtggaggccaggtggcttcagcctggggttctagaagggagggaagagacacacccccgtgtgtcctccagagcctcagccttctccctgaatctcccctttgcctcctcactgtaacccacacctggctctccttgaaggacccgcttgccccgcagcctcctgagagttttctctcccagtccctctcccactgggcctggaggtggggtagggtcctccttgcccccagccttgaatcttctgtcaccctacaataccacttgctgtcaccccggtgataggtatctacgagcctggggtgctcccccacatcctcaaagatgtgagcccctgactcagcgttgcctctggttcctgaccctccacattcacatgaccacgcgctggcctttatcatcgccagtgacagcagctctcccgtaaatacaagtttcaagcaccccactttccagtctctgccttctgtctttccagttcattccctctagtcctccacccacacagtgcttttccccattgacagggaattgctcctggccgcttttcccagccccatcccgttcatgtgccttgctttgtacccagcatggactccatggcctgtcattgtcactccttcacctatacttcctgcctccttgcttctctctctcttcgtcatcctggcatcaccaccccagaactgcttggtttcagttctccaccatggctaggggaacatacctttttgctgactgctctcactttctttttttttttttttcttttttttttttttgacacagagtctcgctctgttgcccaggctggagtgcagtggcacactctcagctcactgcaacctccacctccggggttcaagcagttctctctgcctcagcctcctgagtagctggtattataggcacccgccaccacacccggctaatttttgtattttttttagtacagacagggttttgccatggtggccaggctggtcttgaactcctgacctcaggtgatatgcctgccttggcctcccaaagtgctgggattacaggcatgaaccaccctgcccggccctattgctctcactttgaaatcacgacatgagccacagtgagcctatgatgtggtttgacgtctttctgcatttctctgttcacccctctcccagaaggcatgcctccttccctcccctcagcctgcagccccttcccctccacgcttactctcagctgatagccctgctgctgtctcgctgagaaaatagaaatagccagaggagaattccctctaccccatgcacacacctctgtccccgcctactccacattccctgttgtcagcaccgatgtgtttagctgagggtggtccccccattcaaggccatcatctcctgtcatctacttcttgacaccatttgaacaattatctcccctctttcctacataacactttccccttttctactatatattttttgctatggattgaaagtatccccccgaaatcatatgttgaagccccaatccctcgtgtgatggtattaggaggtagagcactatgggggtgattaggtcatgaggatggagccctcatgaatgggattagtgcccttagacgaagaggcaagaaagagatgatctgtctctgccatgtgagggcacaacgagaagatagccatctgcaaaccaggaagtgaaccctcatcaggaactctatcagccagcaccttgatcatagacttcctagcctctagaactgtgagaaataaaggttgtttaagcctcccagtctgtagttttctgttataatgtcctgacctaagttattttccatcgctatacaatgggttatttttttctttaaaaaaaaattatttcttgactctactttttcctccagagactgcttatattccactgtcttcattcttctcctcctgttttctctctttaaacttttcaaaaatagcaaaatataacacatatagagaaaatgatatacagctcagtgatttatcacaaacacctgtgtaaccaccactcgaatctagagataggacattacagcaccccagaagccctccttttgtcccctcttcccaaagaagggtaaccaataacttgccttttatgataaaggctttttttttttgagatggagtctcactgtgttgcccaggttggagtgcggtggcgcaatctctgcttactgcaagctctgcctcctgggttcacgccattctcctgcctcagcctcctgagtagctgggactacaggtgcccgccaccacgcccggctaattttttgtattttagtagagacgaggtttcaccgtgttagccaggatggtcttgatctcctgacctcgtgatccacctgcctcagcctcccaaagtgctgggattacaggcgtgagccaccgcccccggccaagataaaggcttttctatctggcttctttgttagcattttgttggcgagattgatacgttttgtgtgcagctgtctgtcattttcattgcaatagaattccattgtctactatatcacagttactcattctactactgatgaaaatttgggttatttctagtttttttggtgcatacatgcatacatttctggtagacatacctagaagtgaactggctgcattatgggccataacttgtcttcaacgttagtaaataataccgcccgtctgttttccaagcagcagtaaatggcactttctgttacttcatatcttctgttacttggtactgtcaggttttaaaattttagtcattctgtcgggtgtctagtagtatgttattgtggttttattttgcatttgcctgattgcaaatgaagttgagcactttttgatacagtgattaaccatttggatatcctcttcagtgaagtatcagctcaattctcttgactatttaaaaaataaagttgtttatctttttcttacagagttttaggaggagttttttggtacatgtgcagtccaaatacacaccttttgtcagtgatacgtgttcagctgcacacacggtgttttgcctttttattcttttaatggtatctattgataaacatgagttcttagttttaatgaagtcaaatttgttcatcttctttacggtgtactttttgtgtcttgtttaaggaagtccttctctatcttaaagctttgagaagcattccttctttctcctattttctaaaaattgttgaagatctccttccttccttccttccttccttccttccttcctttcatctatctctctctcacccaggccaaacttcagtggcatgatcatggctcactgcagcctcaacttcccaggctcaagtgatcctcctgcctcagcctcctgagtagccaggactacaggcacgcaccaccatacctggctaattttaaaaattttttgtagagacacggtctcatcaagttacccaggctggtcttgaactcctgggctcaaacaatcctcccacctcagcctcccaaagtgctgggattacaggcatgagtcacatgtctagcctgtattctttctttcttaaatgtttggaagaattcatgggtaaaaccatgtgaccctggagtttatttgtgggaagcttttaaaacatggattcgatttctttaacaaatataggactatgagattttcatctcatgtcggtttgggtatgttgtgttttcaaggaatttttctattttatcgaagttgtcaaatttgtctgcaggtccccttatttcctttttaatgtatggaggatctgaagggatggtactttgtgttgtctctatttcttgtttggttttgctagtgatttgccaatttaaaaaatctttccaaagaaccaacttttggctttgtttattttttgaaaacctgagtagctgggattacaggcgcccaccaccacacccggctaatttttttatttttagtagaggtggggtttcaccatattggccaggctggtctcgaactcctgacctcagatgatccacccgcctcggcctcccaaagtgctgggattacaagtgtgagccagtgtgcctggcaagccgctttttaaatggcaccaatcccattcatgagggcagagccctgatgatcgaattacctcctaatggccccatttcttaatactatcacactgagaattaagttttaacataagaattttaggaagacacaaacattcagaccatggaacatatataaaacagttgtcctaccaactaacagaatacacattcttttcaagaacacctatataaaaattatagacactgacctatgctggccataaagcaaatatgaacaaatttcagatacctgaagagatttagactatgttctccaactacagtgcaattaagctagaaatcaatagcaaaaatgtaactataaatgagcccgtatgtttgaattttaagcaagatatatgtaaattatctatggttcaaaaaagaagtcacagtgaaatttagaaaatatcttgacgtggcgggttgcagtggctcacgcctgtaatcccagcactgtgggaggccaaggcgggtggatcacctgaggtaaggagtttgagaccagcctggccaacatggtgaaaccctgtctctactaaaaatacaaaacattagccaggcgtggtggtgggcacctgtggtcacagctacttgggaggctgaagcgggagaatcacttgaacccgggaggcagaggttgcagtgagccgagattgcaccactgcactccagcctgggcaacatgagtgaaacttcatctcaaaaaaaaaaaaaaaagaaaagaaaaagaaaatatcttgacccaatgatgatgcaaatactacgtatcaaacttgtaggatgaacttccacttctggccatgacagaggagcctgtatcagactagccttcctatttatatatttatttttgagatggggtgtcgctctgttgcccaggctggagtgcggtggtgcaatctcagctcactgcaacctccacctcctgagttcaagtaattctcctgtcccagccttccaagtagctggaattacaggcgcccaccaccacacccagctagttttttatatttttagtagagacggggtttcaccatgttggccaggctggtctcgacacctgacctcaggtgatccacctgcccctgcctcccaaagtgccgggattacaggtgtgagccactgcgcctggccgtgagtgacctttttaatgtgttgttgaatttgatttgctggtattttgttgagaagttttgcatcaatatccatcagggatactggcctgtagttttctttttttatatgtctttgtctggttttggtgtcagggcaatactggcctcatagaatgagtttggaagttttctctcctctgtttttcataatagtttgagtagggttggtattagtttttgtttaaatgtttggtaaaattaagcagtgaagccactgggtcccaggcttttctttgctgggagacttttcattacagctttgatctcattacttgttattggtctatttaggttttggatttcttcacggttccatcttggtaggttgtgtatgcctaggaatttatccatttcttctagggttttcaatttattggcatataattgttcacagtaacctctaataatcctttgagtttctgtgatattggttgtaatatctcttttgtcatttctgatttttttgtttgggttttctctctttttttgttagtctagttaaagatttattgattttgtttatcttttcaaaaaactttattttgttgatcttttgtattgttttgtttcaatttcatttatttctgctatgatctttattatttcttttcttctactaattttgggtttggtttgctcttttctagttctttaagagacatcattagattattttgaagtttttctacttacttgatgtaggtgcttataggtacaactttcctcttagtacttctttccctgtatctcacaggttttgatatgttgtgtttccattatcatttgtttcaggatgtttttaaatttccttcttaatttcttcattgaccattcaagagcatattatttcatttccatgtgttcgtatggtgtgcaaaataccttgtttttgatttgtagttttatttcattgtgatcacagaagatacttgatatgatttcaaatttaaaaagtaatttggctgggagaagtggctcatgcttgtaatcccagcgctttgggaggccgaggcaggcagatcacgaggtcaggagatcgagaccatcctggctaacacagtgaaaccccgtctctactaaaaatacaaaaaattagccaggcatggtggcaggtgcctgtagtcccagctactcaggaggctgaggcaggagaatggtgtgaacccgggaggcagagctggtagtgagccgagatcgcgccgctgcactccagcctgggtgacagagcaagactctgtctcaaaaaaaaaataataacaataataataatttaagacttgttttgtggcctaccatatggtctatccttgagaatgatccatatgctgaggagaagaatgtgtattctgcagccgttggatgaaatgttctgtaaatatctaataggttcatctgatctatactgcagactaaggctggtgtttctttgttgattttctgtctggatgaactgtctaatgctgaaagtggagtattgaagtctccagctattattgtattgaggtctatctctctctttagctctaagaatacttcctttatatatctgggtgttccagtgttgagtgcatatgtatttaaaattgttacattatcttgctgaattgacccttttatataatgaccttctttgtctctttttatagtttttgtcttgaagtctgttttgcctcatagaatagcatagctattcctgctcttatttggtttccatttgcatggaatatctttctccatccctttagtttcagtctatgtgtgtctttacaggtaaagtgtgtttcatgtaggcaacagatcactgggtcttgtttttctatccgttctgccactctgtgtcttttgattggagagtttagtccatttatgttcaatgttattactgacaagtaaggacttactcctgccactttattaattattttcttgttgctttgtgatcttctttctttccttcctgttctccttttagtgaaggtgattttctctggtggtatgttttaatttcttgctttttatttttttgtgtgtatctgctgtatgttttttgatttgaggttaacatgaggcttgcaaataatatcttataacctaatattttaaactgatgacaccttaacactgattgcataaacagacaaacaagcaaagagaaaactaataaaaactctacattttaactttgtccccccactttttaacttattgtactgtttatgtctgaaaagttgtagttattatttttgattggttcctcttttagtctttctactcaagatatgagtggtctacatatgacagtgttataatattctatatgtttctgtgtacttgctattaccattaagttctgtactttcaagtgatttcttattgctcattaatgtccttttctttcagattgaaaaactccctttagcatttagcagtatgtgaactgcatttttcaagtccagaatttctgcttgattcttttttttttttttgagatggagtcttgctctgtcgcccaggctggagtgcagtggcgcgatttccgctcactgcaagctctgcctcccgggttcacaccattcttctgcctcagcctcccgagtagctgggattacaggcgcccgccaccacgcctggctaattttttgtatttttagtagagatgggatttcaccatgttagccaggatagtctcgatctcctgaccttgtgatccgcctgccttggccttccgaagtgctgggattacaggcgtgagccactgtgcccagcctgcttgattcttttaaattatttcaatctctttgctaagtttatctgttaggattctgaattccttctctgtgttagcttgaatttcactgagttccctcaaaacagctattttgaattctctgtctgaaaggtcacatatctctgtctctccagaattggccactggtaccttaattagttcatttggtgaggtcatgttttcctgtatggtcttgatgcttgtgatgttcgtcagtgtctgggcattgaagttaggtatttattgtagtctttgcagtctgggcttgtttgtatctgttcttcttaggaagactttccaggtaataaaagggacttgggtattgtgatctaagtttttggtcactgcagccatatctgcattagggggcaccccaagcctactaatactatggctcttgcagactcgtaaaggtaccacttgggtggtcttggataagatctggaagaattctctggattaccaggcagaggctcttgttctcttcccttactttctcccctaaaagtggagtctctctctctgtgctgggccgcctggagctaggagaggggtgacacaggcacctctgtggccactatcactaggactatgctggctcagacctgaagccagcacagcactgggtctcacccaaggcctacagtctccactgcctggctactgcctacgtttgcttaaggcactagggctctacagtcagcaggtggtgaagccagtgagattatgtccttcccttcaaggcagcaagttccccctacccccatcctgggaaggtccttagatgccatctgggaggcagggcctgcagtcagaaaccttagtaatctccccagtgctctattctattacagcctggctgatacccaagccataaggcaaagtccttcctgctcttccctcccctttccacaagcagagaagtctctctccatggccaccactgccccagccctgtggcagtgctgccaggccactgccaacgttcattcagggcctaagggctcttgaagcaactgaacactgccaggcctgggactctccctttagggtagtgggctcccctctgacccagggcaggtccagaactgccaccccacagccaacacttagaatctgggaccccaagagccctcttggtgctctgccacactgtagctgagctggtacctaggctgatttttgctttttatgaaggtacttttttgtgtgtatagttcaatttggttttcctccagggaggacaattggtggaggtttctatttgggcatcttttttttttttttttgagacggagttttgctctttcacccaggctggagtgcagtggcgcgatctcggctcactgcaacctctgcctcctgggttcaagcgattctccagcctcagcctccccagtagctgggattacaggtgcctgccaccatgcttggctactttttttttcaattaaaaagtaaactttaatgtcgaaaatgcaaacttggggaaggcagaaagatcacacacaaggctgtcgcttcacacttggaaggttgcacggcggccaggagaggcactcctcacttcccagacagggcgggggccgggcagaggcgctcctcacttgccagacggggcggcggccacatgcctggctaatttttgtatttttagtagggacggggattctccgtgttggccaggctggtctcaaactcctgacttcaggtgatccacgcacctcggcctcccaaagtgctgggattacaggcatgagccaccgcgcccagccctatttggccatcttgctttgcctccaccttcatttgataacagaacacccccatgtaaccaccaccacaatcaagatataagacatttctgttattctccaaatttccttcaccctcctttatagtccatggcacccaccccatccctgggcaacacctatgtgcttcctttttttttttccccgcaggaggacgtcttcctatacctatgtgcattccatcactgctgcttttaatcatatagcgtgtagtcttatgagtctgactttttcacttagcataatgcttttgcaatttgtgattgagcgttttcatatgattctgttttttctgtctcttagcttggaagttatacactttttagtagtaactgttgggagatcgttctccaagagtctctctcatatttccatacatcctgctagcagagacattgactacctgtttttgtctgtttagtgttgctataaaggaatacctaagtctgagtattatacatagaaaagaggttttatttgtctcatggctcctcaggccatacaagaaacatggtgccagcatcttaccagtgtcacatggcaagaaaggaagtgaggaagagaaaataagttgttaactggttgttaaaaagtgccaggcacgggccaggcacagtggctcgtgcctgtaatcccagcactttgggtggccaaggcgagtggatcacctgaggtcgggagttttgagaccagcctgaccaacatggagaaaccctgtctctactaaaaaaaatacaaaaaaattagctgggcatggtggtgcatgcctgtaatcctagctactcgggaggctgaggcaggagaatttcttgaatccaggaggtggaggttgcagtgagccaagatcacctgggcgacaagagcgaaactctgtctcaaagaaaaaaaaagtgccaggctctttttaacaaccagttcttacaggaactaatagagtgaaaactcactcacccccaccccacagggagggcattcattcatgagggatccacccctatgacccaaacacctcccattagccccccacctccaacattggaatcaaaatttaacatgaggtttggggggcagaaatccaaattatagcactacctttgttccaggctaccttcaaaggatgtttatacagcaaacagccttggaaaatagagttagggtctccttgtagagcacagggtaagtttgcttacttttcagcataatcaagattgtgtcttcttctggagcaaaactttgacaacaacaagcggggcaaagtctgaaaccttttgcacatcttgacagaaccttagagattacgagatttatctctgccttactcaaggtccattagtatcttccagaacaataagttggtcttagaatcctttagctatgtattcccttccaggcttcgatgctgtgtgctgttgttttatttagtttttattttaaacccaacaagacgctataccatcaatacttatttagatccccccacatatttaacttgccatggtgcttcattctttcatgcctctttaagcatccatctaggatcgtgttcattccacatgaagagaaagcttttggcccagcacgatggctcacacctgtaatcccagcactttgggaagcctaggcgggaggatcgcttgagcccaggatttccagaccagcctgggctacgtggcaaaaccctgtctctactgaaaatacaaaaaattagccaggtgtggtggttcacgtccctgctactcgggaggctgaggtgggaggattacttaaacctgggaggttgaggctgcagtgagcgttgattgcaccactgcactccagcgtgggtgacaggagtgagaccatgtctccaaaaaaaaaaaagaaggaaagaaaaagcttttgtatttcctttcgtgtaggtctgctaatgacaaagtctctgggttttttgtttgactagagaaatgttttaattttaaccttattcttgaaggttttgtttttgttttcattttgttttgtgtgctaagtacagaattctcattggcatttatttatttagagacagagtcttgctctgtggcccaggctagagtacagtggcacgatctccgcctcccaggttcaagcgattctcctccctcaacctcctgagtagctggggctacaggcatgcaccactacacctgactaatttttgtatttttagtagagacggggtttcaccgtgttgcccaggctgatctcaaactcctgagctcaagtgatttgcctgccttggcctcccaaagtgctgggattataggcatgagccgccgtgcctggccagcatttattttcttttcagctctttaaggaagtcattccattatctctgggttccattgttgagaagccagctgtcattctaatggttgccctttgaagataacttttttccctctgctattttaaatatttcctccttgtattttattttcaacaggtgtaatgtggcacatatatcagcaattgttatgttacatacaatacatattgtgcaacatatgtatcattatcagttattgctgtgtaacaaactactccagaacacagtggcttataaaaggaatcatttatttagtccttaaatctgcaatttgagcagagctcagtgggaaagcctcagctttactttatatggcaccatataaggtaactcgcaactggcaagttggtgctggctgttggctggtagttcattcagggctcagggcccaggaccaagagtcgtcaccatggcttgcttcagcctccttgaggcatgatggctgggtcccaagagaagagaaatagaaacttccagtctcttaaggcattggtctggaagctgggacggcatcacttttgccatattctgttggtaacgcagttacatcgccagattaaagggtaaagagatacaaattcccactgctcagtgcaaggaatatcagtgattttagggggccctgttttaaaacccctacaaggtgctaagcgtggatttctggggctttcttgttttttgtttttttctatgtgtttttttttttttttttggtggtggggtcagggagggcttatagggtatgttaaatcagcagaataattttatttatttatttggagatggagtttcactcttttgcctaagctggagtgaagtagcgtgatcagagatggagtttcactcttttgcctaagctggagtgaagtagcgtgatctcggctcactgcaacctccgccccgctggttcaagcaattcccctgccttagcctcccaagtagctgggattataggcacccaccgccacgcccggctaatttttatatttttagtagacatggggtttcgccatggctagtctggaattcctgacctcaggtgatccacccaccttggcctcccaaagtggtgggattacaggtatgagccactgtgcctgacctataatgttttttaaaaatcagttttggaaagtttgcagacattaacttttcaaatgtagcttccatttgattctttttctactctgcctctgatcctccacttatgtatgtatgctagatcttttattagatagtctgtgtctcttatgtactctactatattttgtattcttctgtctctccatgctttattctgtttactctttcctgattatattttttaattttgtaatttccatttgatgcttttttgatcattcaaaactcttcaccaaaattctaaatttccttttttaacctctcgaatgttatcacagttactttaaagtctattttggataacttaaatatttacagtcccctcacagatatgtttcttttgtatattgtttctgttggttttctttcatgtcttatctccacatatgcctggtgagttttgattatgtgttggtcattgtatttgcaagtatgctcgtagaaataatctggaatggccgggcgcagtggctcatgcctgtaatcccagcactttgggaggctgaggcaggtggatcacgagatcaggagatcaagaccatcctggctaacatggtgaaaccccatctctactaaaaatacaaaaaattagctgagcatggtggcacgttcctgtaatccctgctactcgggaggctgaggcaggagaatcacttgaaccaggaggcagaggttgcagtgagccgagatcacgccactgcactccagcctgggtgacagagcgagactccgtctcaaaaaaaaaaaaaaaaaaaaaaaaagaaataatctagagcctagtttgatgtttccttacaaagaatgaatttatttttgcttctcccattgcaactaggataacctcagtctagtttctggaactgaaatcacttgaggctgaactgtggtctctgtgagagcgtgtctgtgtatggctcacccttattcctaggctacgtagttctttaggaccctaacccaaagtaagagatgttcatcagggctctcctcttggcagacgcctgggctccagtccctgtgtcctgagccccatgaggctgttactggtgctgctcgtctgcccatcctctccagtaacagccacctgaacactgcaattcctgggtttccatcattccttccagcctggtgagtcatcagtgtcttttgaggtatccagtgcctgccagcagatgttttttaataatttgtccagcatttctggctgtcctcagtaggtggtctgtttcacattccctagtctgctgttaatggaaagtggaagttctgagagagaatcatcgttcccgtcagcattcaaatgcctgattacactttccccattcgctatcctttcctttatttgctcctcaccacagcaaaactcctcaaaaatatctatctttgcaatcttcagattctcacattgtgtccttaaacccactttaatcaggccttggttccctccattccactaaaagtaatgttgtcaaggtcgtgcatgcctccgtgatgctaattccagtgatgagttttcagttgtcattctctgacatatcggcaacacttgatgtggagtaccctgatgttgagaggctggtgagatgaaggaaaaacccagccaagggcaatgaggaatggcttccttccgcctcctccttccctatctttgttgtggtttttgttgtttctgtaacactgattacgttatagtttatttaatgtacttccttattctatgtttttactttagtcattttgttgatctcctccataataacataggctcgggccaagcacagtggctcacgcctgtaatcccagcactttgggagaccaagatgggtggatcacttgaggtgaggagttcgagaccagcctggccaacatggcgaaaccctgtgcctactaaaaatacaaaaattagctgggcgtggtagcaagcgcctgtaatcccagctactagggaggctgaagcaggagaattgcaggagaatcacttgaacccagggggcagaggttgcagtgagctgagatcgcgccactgcactccagcctgggtaacagagtgagactctgtctcaaaaaaaaaaaaaaaaaaaaggcttcaggagggcagagcattttatgcaattgttcattaattgacccctccatttggcacagatcacatgcccagtagttaactgttaatcaacgcactctctgtggaacaacaggctggtcccgttgagccaacactctctgggcactgccttcactagactctggctggctgctgcgcttgtagaggtatgcaagacaaaaccttttggtatgttaaaagccctggtcagaactttaagtaaccatcactgacatataatggttatggttttgaaagtgcttttatagtggtttttcatctgtcctcacagcacctctgggaggtaggtaggacaggtacagttagtctcatgtttcaaatggggctcagagagggaaaaggatttcccaagatcacacagcaccttagtagcaaaacttggactcaacctcaacacttaaaaatgaacaaagctggccgggcgcagtggctcatgcctgtaatcctagcactttgggaggcccaggcaggcaggtcacctgaggccaggagtttaagatcagcctggccaacatgacaaaactctgtctcttctaaaaatacaaaaaattagccgggcatggtggcgggtgcctgtaatcccagctactcaggaggctgaggcaggagaatcacttgaacctgggagatggaggctgcagtgagccgagatcgtgccattgtactccagcctgggcaacaagaatgaaactccatctcaaaaaaaaaaaaaagaaaagaaaagaaaaagaaaagtttccctttttttaaatatctcattttaatgactgcataatagtttattacatagttataccataatttatataatattttgttgctgtacatttaggttaaacaatacttacttagttcctactatgaagaggggccaagtactcgaggctggagctctcacatgtggcaatgaaattagaaagtggatatggcagggctgtggtaaaataaaatataaaaataataaatgatattaccaaagaaaaggaaagtttttcaaaataaaggaaaatctagacaagcatagtggctcacacctgtaatcccagtacttttggaggctgaggcaggaggaacacttgaggccaggagttcaagaccagcctgggcaacatagcaagaccccctgtcaacaaaaataaaaaaaaattaggccaggcacagtggctcacggtggctagtgcctgaaatcctagcactttgagaggctgaggggggtggattgcctgagctcaggagttcgagaccagcctgggcaacatggccaaaccccatctctactaaaaacacaaaaaattagccaggtgtggcagcacacgcctttaatcccagctactctggagactgaggtaggagaattgcttgaacccgggaggtgaaggtcgcagtgaggtgagattacaacactgcactccagcctgggtgacaaaatgagactctatctcaaaaaaaaaaaaaattagctgggcatggtggtgcatgcctgtaatcccagctactcaggaactaaggtaggaggatcccttcagcccaggaattcgaagatgcagtgagtcatgatcacaccaccgcaccccagcctgggttacagagcaagaccttgtctctaaaaaacaaagaaagtctaacctaaacgccattatgtcatttacatgtgtataggggtgtgtgtgtgtgtgtgtgtgtgtgtgtgtgtgtgtgtgtgtgtgtgtgtttgcttgggaggggagtcgggctggagctggccaggccgcagcctggggaccttctgattccagcagggatgtgggccgagggtcccgccttactcatttcgggtcttgctcctctgtcctggctctacagactcttccagctggagttggaggctgacgccctagtgaatttccatcagtattcttcccagctgctacccttctatgagagctcccctcaggtcctgcacactgaggtcctgcagcacctgaccgacctcatccgtaaccaccccagctggtcagtggcccacctggctgtggagctagggatccgcgagtgcttccatcacagccgtatcatcaggtgagcaagggaacaagaccatttggacaacgtgtgtgtacctgcttgtgtgggcagtgggggccgcaggcctcggttcccctccatagtttgacttaaaaaggagcagggcctggcatggtcgctcactaacgcagtcccagcactttgggaggctgaggagggaggatcacttgagactaggagttcaagaccagcctggcaaaatagcaagaccttgtctctacgaaaaaattaaaaaattagcatgtgtctatactcctagctacttgggatgctgaggcaggaggattgcttgagcccaggagttagagtttacagtgagctatgattgcaccactgcacttcagcctgggtgacagaatgagaccttgtctctaggaaaaaaaaaaaaaaaaaaaaaaaggtgctgcgttgctaccagattaaaatgtaagaaggacaatgtaatgtttccagagtccggagtgctcaccaggtgccaggtctgtgggagctgatttctacccaccatgaaattgaattttcccaacccccacaaggtatcgtcattttattttactttattttattttattttattttattttattttattttattttatgttacgttatgttattttattttgagacggagtcttattctgtcacccaggctggagtgcagtggcgcgatcttggctcactgcaccctctgcctcctgggttcaggtgattctcctgcctcagcctccggaatagctgggattacagtaatgtgccatcatgcccgggtaattttttttttttttttttttttttttgagacggagtctcgctctgtcgcccaggctggagtgcagtggcgcgatctcggctcactgcaagctccgcctcccgggttcacgccattctcctgcctcagcctcccgcgtagctgggactacaggcgcccgccaccacgcccggctaatttttttgtgttttttagtagagacggggtttcaccatgttggccaggttggtctcgaactcctaacctcaggtgatctgccctccttggcctcccaaagtgccgggattacaggcgtgagccaccatgcccggcccaggtatcatcattctagagagagctaacaggacttgtgcaggtcactcagccagagagggtgaaagaggggcttggatccttggtgtctgcccaggctgctcttctggaagctgaaggcctccttttgtgaatccattcagccagcagatggagcagctgttgcccctggtgagggcactgtccccacccttgcacagggcaccagttggccatcttgtgcagaggtagccacacctcctctgagtctctatcctagatagctcagttaagctcccaggcccagaactcaaaacctcactgctggccgggcgtggtggctcacacctgtaatcccagcactttgtgaggccgaggcgggtgtatcacttgaggtcaggagtttgagaccagcctggccaacgtggtgaaaccccgtctctactaaaaatacaaaaaattagcaaggcgtggtggcgcacgcctgtaatcccagctactcgggaggctgaggcaggagaattgcttgaacccagaggcggaggttgcagtgagccgagattgtgtcactgcattacagcctgggcaacaagagtgaaactccacctcaaaaaaacaaaacaaaacaaaaaccctcactgcactttagtttccaggcgtgcttttggacagcactgtctcatctcaccatcactctgtccatttcctggggcaggcacagcagcttgtgtcgataaggatattgacgcccagaaaggttaagtgaattgcctgaggctagtgagatatccgtgttctgtgaccctttcctgtgccaccaccctgcccacttcctgctggtgtggccctggggcccatctcttgtacgagtgagcaaactgaacagaaacctgatacaggtcacatcagatataattacattcaaatcagcccaactagctgagtggcgggaatgctcttgagctcaaataaaccagaaagtccgagtttccgagtgcacttccctgcatgtgcacttaggtccccctgccaccttgtaccacacctgctcacctctgctcaccctggccctctcctgcagctgtgccaattgcgcggagaacgaggagggctgcacacccctgcacctggcctgccgcaagggtgatggggagatcctggtggagctggtgcagtactgccacactcagatggatgtcaccgactacaagggagagaccgtcttccattatgctgtccagggtgacaattctcaggtgctgcaggtgagcagggggaggggcagggtgactggtactgatacctcccggtgtccacggttccctttgggcccctaggctcaggtgtcactctcaggcctctcactgtcccccattggtccttgaggcctgagctccttcatggagggtgcagacccctccctggctcttccctcccagcccttttccaggagccacgtcctcagtctctttgcttgataaacctggggacggcctccaacccagcaaaataaaccccaaaaaaggcccagctccagtcagttagttcagttccacttttcctgagcacaaactgtgagccagatgcctgcctggaggggctcgtgggccagcgggacctgggcttaaccttttgcaagcttgtccaatctgtggccctgcaggctgcatgcagcccaggacggctttgaatgtggcccaacacaaattcacaaactttcttaaaacattatgagatccatgcatggaccttttttttagatcagctgttgttagcgttcatgtattttatgtgtgacccaagacaattcttctgatgtggcccagggaggccaaaatattggacaaccctattttacaggaattcaaaccaagcaaaccaaactgtctccagttcctgtaggcatttgtgccagaggccctcctgttaacgtttttgattacctgggcaaaagatgtgattttttaattgtgggcaagcagatggggtgatactattaaatagctatttcatatattagattgaacagaaaaggcaggatgttggattatgttttattgtctagaattagaaaattcttctaaagatcatgttctctctgccttggcatcagaatgcaactacgttataccagaaaatgtggattcctttttttttttttttttttttttttttgagacagagtttccctatgtctcccaggctagagtgcagtggtgcgatctcggctcactgcaacctccacctcctgggttgaagtgatgctcgtgcctcagcttcctgagtagctgggattacaggcatgtgccaccatgcctgggtagtttccgtatttttagtagggatggggttttgccatgttgcccaggctggtctccaactcctggccttaagtgatccacctgcctcagcctcccaaaatgccgggattacaggtgtgagccactgtgcccggcccagaaaatgtggattcatatcttatgcttcttgctctcagggaagggaattctccacccactgttgaactccactttcaccgagaatcctctgcgcacccagcatggtgccgcgcagaccctgcctccatgcgggggtgtgcacacccgcttctcgatagtcatgcacgactgcagctgtcctttatccggtgctgattggtgcctgaccttgaactgagtgttgtatgtgttccagttaattcttagaatacactcatggggtggaggtcattattcccctttcctctccgaagaaactgaggttcagtgttgttaattaagaagcgtgcccagggagggccacaaagctgagagagtggggcttgaccttacattggcctcgatgccagccctttgctcttcctgctgtgtctctggcctgccttcaggtccagtgggactgctgtgaggtgaccctggtgtcacatgggtacactgtggttgtaatgaacctcatggggacagcactgagccaaaagtgagacagtaaaaccctcctagcactttcttttttttgagacagcatctagctctgtcgcccaggctggagtgcagtggtgtgattgtggctcactgcagcctcaacctcctggactcaggtgatcctcccacctcagcctcctgagcagctgggactacaggctcgtgccaccacatgggctaattttttttttttttgagacggagtcttgctctgtcgcccaggctggagtgcagtggcgcgatcttggctcactgcaagctctgcctcccgggttcatgccatcctcctgcctcagcctccagagtagctgggactacaggcgcccgccaccacacccggctaattttttttgtatttttagtagagacagggtttcaccgtgttcgccaggatggtcttggtctcctgaccttgtgatccgcctgcctcggcctcccaaagtgctgggattacaggcgtgagccaccacacccaggccacgccagctaatttttaaaatttttttggtaaagatggggtctccctatgttgccgaggctggtatcacactcttggtctcaagtgatcctctcacctcccagtgtgttggaattacaagcatgagccactgcgcctggcccctggctctctttttaatactgctgttctttcattgaaaacatagtacctgcatgtagaaaaaaatcagtcaggacagaatgaaaagcaagaatcattcccacctggacccccagtgcccatcctgagatacagctaccttttaagttccttgactcagaaatgtttcatgtgagccacagtcatgccaggtcgaccccttccctcccatccacactggcacttggctttcctggtgcttctctttacgttctttttttttagacagagtttttgctctattgcccaggctagagtgcaatgatgcaatctcagctcactgcaacctctgcctcctgggttcaagcgattctctttcctcaggttcctgagtagctgggattacaggtgcctgccaccatgcccggctaatttttgtatcgttagaagagacgacatttcaccatgttggccaggctggtctcaaactcttgacctcaggtgatccacccaccttggcctcccaaagtgctaggattacaggcatgagccactgcgcccggcctctttacgttcttatcagcatcctatggagtcaaacttcccttcctctttcatcagctccttggaaggaacgcagtggctggcctgaaccaggtgaataaccaagggctgaccccgctgcacctggcctgccagctggggaagcaggagatggtccgcgtgctgctgctgtgcaatgctcggtgcaacatcatgggccccaacggctaccccatccactcggccatgaagttctctcagaaggggtaagacctcctcccctccccatctgctggcctgctgggctccagctctcctgtcacctgtcccgtgcctgaggcaagcagtatccaccatagatcttagcatctccagcctcagagcagaggccccgggttcacaagcctcattaggccccgcctggcccaaagaaggtgctccatcattgtatcatgggtaggaatctcggttcacaagttcagctgtgcaaggaggagactttaaaatttttctggctgggcgcggtgtctcacgcctgtaatcccaacactttgggaggctgaggtgggcagatcacctgaggtcgggagttcgagaccagcctgaccaacatgaagaaaccccatctctactaaaaaatacaaaattagctgggcgtggtgacacatgcctgtaatcccagctacttggaaggctgaggcaggagaatcggttgaacccgggaggcggaggttgcagtgagccgagatcgcaccgttgcactccagcctgggcaataagagcgaaactgtctcaaaaaataaataaataaataaataaataaataaataaaaataaatttatttaatgtaccttaattcctaggagtgaatctccctctataaaactggagacaaccaatcttagccctctttggggtctcctctttccagctcccctccaggtggtgctccagttctggagtctgatgcaaccccaaggcccacctggcccctcctctaacccagcccagcctgatctgaacagccccccgatggcttcagtgctccttggtttcttgtgtgcccagctcaaagcctgggaaatgcttggtaaggtggccgagtgcccgtccacctagatgcctctttcctttctggctggtggcacgttgggaggcaggtacaggctcatgttttgggagcctgggaacccctggtgtcaggaaaattgtcttcaaaggggtaggggatgagataaaaagataaatgaatatctcaaatctcaaaatactatctaggccaggcgcggtggctcacacctgtaatcccagcagtttgggaggccaaggtgggtggatcacctgaagtcaggagttcgagaccagcctgaccaatatggtgaaaccctgtctctactaaaaatacaaaaattagccaggtgtggtggtgtgtgcctgtagtcccagctactcaggaggctgagacaggagaattgtttgaaactgggaggcagaggttgcagtgatttgagattgtgccacagcactccagccagggcgacagaacaagactccatctcaagaaaaaaaatactatctaacaggaacaacatctagaatgaatgaatgagccaatgagtccttcgatcctggcactgtgctaaagcaccagcctcaccgaaatgaataagccactccaggacaggagacaccccagccacccagaatctcatagcgcagtgccagacaagcagtgagaaggcatggacgggcagcactcaggcagggaggctggcacttgtgcctgtcctcaggttgttccttcctctgggagctgcatccaccttgctagccccatggggcattgctagcccttctaagggctggaccaagcctggacaaaccctcctttccttgaatctcccaagcacagccagaatgagctagagctttcagaaatacttgaccaaacagagaagataccaacacccccagccccgcagtcaggttccccatttgcaggttgtgacctgagtggacaccaggtgatgctcttctctacccagagggctggcacatggccccactcttgcttgtctccagccaccctgagctgtactgggcaggagctgtaattgaccagttttctctctcttcaaacaacctcagccctcaccggtccctctgtccccacacaggccatcctgggtgggtccagcgtcccatcacataagaggatctttgcacagaagacaaaggaagaggctcctaccttgagtggagcagggagatcccttatcgacttggcagccagcacagccctactccaagaatcccacggcctcagtgttactgacaagtggttccctcacagctcagactaggagctccctcgctgtttttctttttcttttcttttctttgttttgtttttgagacagagtttcactctgtcacccaggctggagtgcaatggcatgatcttggctcactgcaacctctgcctcccaggttcaactgattctcctgcctcagcctcccaaggagctgggattacaggtgtgcgccactatgcccagctaatttttgtatttttagtagagatggggtttcatcatgttgaccaggctagtcttgaactcctgacctcaggtgatctacttgcctcgccctcccaacatgctgggattacaggcgtgagccaccgcgcctggccacctctgctgtttttcaatgcagctgacctttcccacaaagctcggtttgtgcctgcggttctcagatggttaagcccctgctgaggaagggaaacagataatcccagacagtgagatggaggctgagactgaggatgcctgggggctgcactaggagctcagagacggcatcaggcagctggagttcagggaaggtttgggggcagcagagcccgagccaagccatggacactagccggagctggccactcgggtgaagacttggggggctccagagggcccagggaaagaagctgggcctgactccatgtgcctagtgctgagcaccaagcgctggcataagggctgtagggagctgggcagcataaatcctgggcctgtgctgggcacccctaataatagagaacagcagctgaacactaacgctgtcccagccaccggcttagccttcatgtgggctatttcactatagcccagagagctgatgtattttattccccctctaaagctgagggccaagtgtggtggctcatgcctctaatcccagcactttgggaggctgaggcaggaggatcgcttgagcctaggagtttgaggctacagtgagctatgatcatgccattgccctccagcctgggtgacaaagggaaatcctgtctcaaacaaacaaacaaaaaacagatgaggaaaccagggcttagagagattaagtaatttgctcaaagtcaggcagtcagtaagtgccagacctgggaattaaacccatgtgggctgtcctagtaattgcactaaaaaaaaaaaaaaaaaaaagctttattgagatatagttcctattccatacaatccacctattgaaagtatacaatgattctgatatattatgtttattttttccaactgtgatagattatatataacataaaatttgccattttaaccacttttgttttttgtttttgagacagagtttcgctctcgttgctcaggctggagtgcaatggtgtgatctcggcttaccgttacctccacctcccgggttcaagtgattctcctgcctcagcctcccgagtagtagctgggattacaggcatgcaccaccatgcccagttaattttgtattttttagtagagacagggtttctccatgttggtcaggctggtctcgaactcccgacctcaggtgatccacccaccttggcctcccaaagtgctgggattacaggcgtgagccaccacacccggcccattttaaccacttttaagtgtacaattcggtggttttaatcacatttacaatgttgtccaaccattacccctttctaaaacttttcttatcacctcaaacagaaactgtaaccattaataactcccgattctcccctccccacagcccccgataagtcccatatcctctctgtctctcagaacttgcctgttctagaacctcgtatcagtgaaatcatacagcgtttgtccttttgtgcctggcttatttcacttagcatgatgtcttcaaggctcatccatgttgcagcacgtatcagaatttcctttctttttaaggcagaatactattttgtttatccattcagtccttcactgatagacgcctgggttgtttccaccttttgtctgttgtgaagaatgctgctgtgtacatgggtctgcaaatgtccattcaagtccctgcattccgtcctttgatacttccgacctcaggtgatccgcctgcctcagcctcccaaagtgttgggattacaggcgtgagacaccgcgcccagccagaaaaattttaaagtcttctccttgcacagctgaacttgtgaaccgagattcctacccatgatacaatgatggagcactttctttgggccaggcggggcctaatgaggcttgtgaacccggggcctctgctctgaggctggagatgctaagatctctggtggacactgcttgcctcaggcaccgagtagaaagcaattgtgctctttcccactctgtcatactgcttcctatagcatgcaggtcactgtgtgactcactgacagtgtggtaaggaggtggagggtggctgtgtgccaggcacagaactgggctctgaaatgcctggtcttccttacaccccagccactcctctcagcactctctccatgttgctcagcttctggaggccaccagtgaggaagctggggcttgacttcaagcccatctgactctaaagccagtaccagggagggtgatcattgctggtggcagcatcaggaaggcttcctggaggagggggttagttgtgccttgaggggctcagtacagccttaaccatggtgagtgtgctggttgggtttgctgaactttgtttgcagtgatgctctctgtaagcagtagatgaagctccaagtcctggcttcatcccacgccacgcagaccctagcttctgctcaccaaccggggcccctctctcaccaggtgtgcggagatgatcatcagcatggacagcagccagatccacagcaaagacccccgttacggagccagccccctccactgggccaagaacgcagaggtgagtggatcctgaggtgggtgggtggggcagggggccgggccccgcaggtcctcagggccctcaggaagcaggttcccgagaggaccctgaggctagcacttgggggctgaccttgcagtgggtgtgcaggcagagaagtccatgaagagctgggatcctggcagggctctgctgctctctggctgggcggggggatccgccctgtgcctcagtttcctcatccatgaattctgctttggcgatgtgatgaagtcagcaaggcagtgtgtgacaaaactcggcacaaattgtaaagtgcttcccaaatagaaggtggcgtgatgatgattgtattattagtcaggattctctagagggccagaactaacaggagatatatatatagagagagaggggggtttatttttttattttattttttttgagacggagtctcgctctgtcgcccaggctggagtgcagtggcacaatcttggctcactgcaagctctgcctcccaggttcatgccattctcctgcctcagcctcctgagtagctgggactacaggcgcccgccaccacacccggctaatttttttgtatttttagtagagacgaggtttcaccgtgttagccaggatggtctcgatctcctgacctcgtgatctgcctgccttggcctcccaaagtgctgggattataggcgtgagccaccgtgcctggcctaaagggggatttattaaggagcattaactcacacgatcacaaggtcccacaataggccatcgcaagctgaggagcaaggaagccagtccaagtcccagagctgaaggacttggagtctgatgtttgagggcaggaagcatccagcacgggagaaagatgtaggctgggaggctaagccagtctagccttttcacatttttttctgcctgctttatattctggccgtgctggcagctgattagatggtgcccacccagattaagggtaggtctgccttcccctactgactcaaatgttaatctccgttagcagcaccctctcagacacacccagggtcaatactttacatccttcaatccaatcaagttgacactcattattaaccatcaagatgatgatgatgatgatggatgatgatggtggtggtggtggtgctgggcctagctgcacacacagggagcctggctgggcatctcctctgagttcttcccctaagctaagctctgtcctcctgggaggatggaggcctctggtctcatcaccaggaagcacagcttgacagagaatgggatgccccagagttcatggcctacttctcaatgtgatgggccaggagggagggcactgccagcctcagggtacctctgcattccaggagccggacaccgagtcaggcccttccgtgtaggtttggtcactcattgtcatcacatgctgtgaggtggggacttgcattcccatcttcacagaagccctgaagtgcacatggctacagtgacccatccaagcgcaggcagctgggatgagtgaagctgggctttgggctcaggtctgtgactccaaagccaggctcccctccctgttcccaaggctctgccagggatgtgcattgccaaggcccagtgagaggtgatacctttgcagggttccagggagggatgcagggagcggggtgcttcaggacaggccccagaggagcctttgcaaggagagtgggttctgttggcactaggaaaggaccagaagcctcttaaaacagtcagcacatctttggctttttgtccctagtcttgggatgctgatgggatgggaggcagtctaggcccccctagaactggggcctgcccctggaatcctcttgctagcgctttccaacatcccagtacctgtaggcctctcagagcagaagtggcagtgcccacgtgtcccggggtgcggcagctccccgagtgcctgtgctaactcagcctgaccgtctcccgcagatggcccgcatgctgctgaaacggggctgcaacgtgaacagcaccagctccgcggggaacacggccctgcacgtggcggtgatgcgcaaccgcttcgactgtgccatagtgctgctgacccacggggccaacgcggatgcccgcggagagcacggcaacaccccgctgcacctggccatgtcggtgagcccaggaccgcgtgtcctgccctgtggggccccggtgggaatgcaggagggctgtccggactggagccctcctccccactgtctccctcctatcgtcagctgctccaaatcatcttcccacccaaagctcagttcagaccctgactcctccctcaggaagccttccaagtccccctctcagcccaaaataacaccacctcctgtgtgctgtggtaccttttccacctgtgcccccatttggcacttgcatggcacgagagggaaaaatgacagctctggccatagactggccctgagcaagccatgtcacctgtcagcctcgatttcctcatctggaaaatggtggtgtcaatacttatctggaagagttgtggaaaagttatggtggacacttggtcaccctctacagaatgtctaagtgacacacgcagtacctggcccgagtgagcatcctgcttcccttcactggtccgcgtgttgctctcatcttccctgggaggctgtaagatcctggcaggcaaagcctgagtgtgcagcccagcagcctgtggcaggtgccaggcatattcgttggtttattatagaacacagttcctgccctcaaagcccttactgtctggttacacatctagagtatgaacatattaaacctagcagaggaggacgttactgtgttacagacatatgtgtgtgcatgtattcttttttttcgagatggagtctcgcactgtcgcccaggctggagtgcagtggcgcgatctcggctcaccacaacctccgcctcccaggttcaagcgattctcctgcctcagcctcccaagtagctgggactgcaggcacgtgccaccatgcccagctaatttttgtatttttagtagagacggggtttcaccacgttggccaggctggtctcgaactcctgtgttggccaggctggtctcaaactcctgacctcatgatccacccgccttggcaccccaaagtgctgggattacaggcgtgagccaccgcgccccaccgtgtgcacgttttctatagcaataccgtatgtacagaagtctgtttactgagtctcagtgacagaacatgagagacccccgggactctaaaagctgattcaggacacattcagagacatcctgttttataccaaaggtcaaaacttggaagagatgttgttgcccaaaaggctgaaactataaatagtttcatttttgaaactgtggacatttttagcactgggtgggcccttggaatgatctaactcagcagttctcaagttttttggcctatttgatccctttatactctgaaaaattattgaggatcacaaagattttttaatcatctggattttctttatctatatttaccattttagaaatttaaagtgtgaaaatttcaaaatattaattcatttaaaaataacaataataaatatatatgcctactatgtacccacaaaaattaaaattaaaaattttttaaaaaacttaaaaaataactggccagctgcagtggctcgtgtacaccagcactttgggaggccaagatggtcagatcacctgaggccaggagttcgagaccagcctggccaacatggcgaaagcccatctctactaaaaatgcaaaattagctgggtgtgagacctctgaaagggtatcacgtgttcacaggggtccccaggtcttactttaagaactgctgatagactttggtcatcttcatcccatcttcacagtttttggcatattcatcaaccacctttacaattatgtacttaatcacctcttcaaattggcttacttttatttatttattttgagacagagtttcgcttttgttgcccaggctggagtgcaatggcacgatcttggctcaccgcaacctctgcctcctgggttcaagcgattctcctgcctcagcttcccgagtagctgggattacgttcatgcgccaccacacctggctaattttgtatttttagtagagacggggtttctccatgttggtcaggctggtcttgaactcctgacctcaggtgttccacctgcctcagcctcccaaactgctgggattacaagcgtgagccaccgtgcccggcctggcttacttttaaactgacttaaatttattttgagagaaatgttgcatcactaccataaatggccatccatccatccagtgccaaccataaaaggtaaccaatgcagggcgcggtggctcacgcctgtaatcccagcattttgggaggccgaggtgggcgaatcacgaggtcaggagttcaagaccagcctggccaacatggtgaaaccctgtctctactaaaaatacaaaaaattagctgggcgtagtggtgggcacctgtaataccagctactctggaggctgaggcaggagaattgcttgaactcggtaggtagaggttgcagtgagctgagatcacgccactgcactccagcctgggtgacagagtgagactccgtctcaaaaaaaacaaaacaaaacagtaacaacaacaaaaaatcacagttaatgctgaaaacacacacatatctgtagccatagaagtcctaatagaatgtgaagaactgtttggaaaaccccattctagacccacagcttcattctctaggcagggaaatcgggtcccaagaagaggaaggtgacaaggccagagcccacagttccaggtggccagtgtgtcctctgaaaccatgccatgctctgcgcccctgcccggcctccaggtgtggaaatgtgtgacgttcttcgtggggacactcccccgaaggctgccattaggggcacgtgtgttcggttacccctcagggatgacaccctggactgggtgggcaagatggccttccctgccctcacccaccctctccttgctactcctgaaagccatcagcagctgacctactgtgtccccatggctcctgggtcggggtcacagatgcactgcatctttggaggcggagctggcagagcaggggcgagtcacttctagtttctgcctgggttcttacaccctcccctgtgggtgcttttaagcctgtttgtcaggtccccagccatcaaatggcagactttggactaccagattgacttgggtgggggtgaggagggttccagtgtctccccgtgctgaggagaggcccgctgggtgagttgacaggttggggctggcagccaggggcccctttgttcttcacttccccggcagttgcacgtcttatcctctctccatctccaacagaaagacaacgtggagatgatcaaggccctcatcgtgttcggagcagaagtggacaccccgaatgactttggggagactcctacattcctagcctccaaaatcggcagacgtatgtgctctgcactctggggctggagtggggtgagggttgggtggatacagggaccgaggaggagggaagtcccaggcatcaggtgccagcatcctgtgctgacccgccctgctcagagctgccaggagcacctcgtactcagagagggggcttccttacccaagcacaagggccctgagcagtagatgcaggcccaccacggggcttgctataccagcatcctctcccgtgcagcgccccccacctcagggagctaagattcccagcaggggtggggacaggagagccagcagcagccttctttccccaccgttggggaattcactgatggaaccactggctagaatgaccaagggtgcatgcactacactgcacgagctctgggcatgcctgtgtgggcagagtgcatggccatgtgctgcacgctcgcacagtgagccttagcttcagagctggacagagcagatcctcctcaccagaggcctggagcccgctctggagggtttcagcagctgtgggggtcactgtgggcaggtacctgatggcagcagtgtgtgtgtgccagtgcacacgtgtgtgtctgcatgcaccgcatctatgacctccttttcagcaatcccatccatcaaatggagtaggtgccccctggctggctcattagtccctttggaaccctgaactatcacttagcatttttgagaatcactgaatgtggccatgggattcctgctttcttggctggagtagaaggaaagaaggggttcccacaggcatcgggcagggtgacactgacctcctcctcccatatcctccttccctggccttaggaagctgcttgggatgtaccagcctgggggcagcactccctgtcagggtgggctgaggcctctggagcagcccacgtgcccagggcctgggagctgggacaggggacggagtgtggaaaggaggggcctctcctttgcatgttgacatcatttctgatcctgtgccatctccccttccccaaaccatgacaagttgtcaccaggaaggcgatcttgactctgctgagaaccgtgggggccgaatactgcttcccacccatccacggggtccccgcggagcagggctctgcagcgccacatcatcccttctccctggaaagagctcagcccccaccgatcagcctaaacaacctaggtaggcctcgcctcccgactccctcttctccagctggttcccaggcccctggatcacagcaggccccaccaaagcaacaggatccctaggacggaagtcactaaaggaagccggggaggatggggccggagttgtcagcctctaggcagccagcaacccacagatcccagaggcctagggtgtccctggctgatgtcccatgctccgttgcccctgagaggatgtgtcctgcacacagtctcaggcctgggcatttccagtggcacccatgaggtggctgctgttactgccctcctgtccccagggcgttcagggtgggcagtgaggagtgctgtcgggggactgggggcccgggccctctggcttcacctgtccctctggcttcacctctatcacactgtttgaatctcggttgggcctgagacctgtgtgcccccttcctggccccgtggtgactttcagacgttgaatgtggccaggcagccagcatctgccccggtgcattccttggtgcccagggagacatccccagactagacaggacccttctctggactttctgtgggctggcccactcagggacctccattgtttgggagcggggtcccctgaacagagggcagccaggagccagtccttggtgagccagacttcactgtggaggcggcagcaccttcagccagggtagcccgaccaagcctggaactctggagaggcaccgtgactgtggcttctagtcctggctccacctctctctcccctcccaggaactccccctccacctcccatctttatctctcaattttgcaggcagtcacccaagccaggccggatggtgggcctggggtgcggcgtcagatgggtaacgccctgggcctggagaggccaccgagcctagccatgcggcattagctctagctctcactccctaatccgtccttcttagctgcgcacacaccacacgccccctcccctgcaccctgtccccggcctctctcagccactcttctgcttcccttgttcactgtggagccgtgtgccctggggagggggagacaccgcttcgcagccctcggttctgctttgctgcttctagactctgcacagtggtggggggctgtcagagttggggtcacgcgggctgctgcaccaggcacctggggactgggctgcttgtcaggaggggcagctagtcagttgggtggacgtcaggcaggccttggacacaaaggaagacatggacagagtggatggtgggcctgatcccggaggccactgggatttccagacctgggatcaggacgagggatgtctcctttcatccatggacttaaaccccgaggaacgtcctgactcagccttttgactaaatgaccttgggtgaattatggaccctcttagagcctcacctgtcaatagggaataagaattcttaggccccaggtggttattgcagcatcggctccgatgcaagaagaagcactttgtctgaagaggacacgcaagggtattcatgccttggggtttcaagaggaagagattgaggggaacctgggagctggctgggcagggtggggagcccttcccagagcagtgggcccccctttccactccagcccatttctctcctgtggcctgtggctcagctttctcctgggacagagtccttcctgtggggaagggacagatgacagggggagtggggggatgagggcgtggccgtgggcgaggcacagcccaggtttgatctagggacctctggggtagcagggcttggggacccacctgaccacagcatgccctgctctgtgcctcacagaactacaggatctcatgcacatctcacgggcccggaagccagcgttcatcctgggctccatgagggacgagaagcggacgtaagtggatcgagatcgggggcagagcggggaacgtgtgcgctttcctgcccctcacccaccccctgttgtgggctcagggctttactctctgcaccctcacagccggcgaagtggctctgctcctagtcttatagttctcagcagagacagaacatggagagcctgtgtcgctcgttcattaatgctgggcggtgcaggctctggagaccagcccagggtgccaggcttcttggacttggtggggctggcgcagtgttctggcctccctccctgatctccttatggctagaagagggggagatgcctgggtcccccctggggagatctcagcagctgcttcccactgctcctactggcttccttaaccacctcccactgcagaatagtggcgtgggctgccttccccagcacctgctgtatacctagtcccattgtaagaggcgggcctgggtgacaggatgcaaagagaagacgcccaggccttgcccttcaggcataatcccgggtgcttgaactcagtgccagctggcacggcaaggtaccaggacaaatgcgtttccagccactgtgctgtcgccacctcccttgattgctgcagttgattcatttattctttattagtctctcatgttcctaatagccttcccagggaggaatttgtaaccttgttttacagatgcagaacctgagcccctgagaggtgaagtgacttgctcaaggtcacacggagtgagtgtcagggtggcaactcacagccgggtcttccgaacccacgtcctttgtgctaccgcaggctctctctgggttctctgtggactctatacctagtgccagccctctgcagggaaagctctcttctcagaatcagaggcagctccactcccagggccaggcagtgatcgtgcagctctgtgggtcctctcacttcgcactcacttccatgctaccctgttgtgtgccctggaggttcccctgccccatcagcattccctcccctgtgccccctgcatgctcttgcacgcgggcacacgcacacacacacgcacacatgcacgcacacacacccacatgcacatgcctgcgggttgcccacatgcatgtgttgcccacatgcaaacacatggacacgcacacacatgcacacatgcaaacacacgtgcatgcacacacatacacatgcgcacacatacacatgcatgcatgcacatggacacccacacacatgcacacacatgtacacacatgcatgtacatacacacacctgtgcaggggctgaggtgaggcagctgcacctgaaggggggacccacatttcccaagggaggaaaagcagattccccagattctggagcctcagaaccctgcctggagcggggctgaggcaagagtcaggagacccctcggtagctccccacttgggccttccaagctacagagccctgcgccctctgggttgatctctgtcgccagccccgcatcttcgggagtttgctttggcctccagcaacagtgtagtctctcccctgccacctctaggcttgctgtggggctgggtacctggtccaggaaaagacccctagaggtgggacccgggcctcctccatttatcagccctcttgggcacctcctgcatccccttgacacacagcgctgcccagagcagaggcggcttctgccctggtggagcttccaggtcagcgcaggagagagtaaaagaaagattgcgaatggaatggaagcagcctccaccaggaagcaggtggagcagcaggcgggctgtgagggagggtctcgatggcatcagggcaggcttctctcagcttcatcaagctgagatgggaagatgagaagatcagaggaaggttccagactgaaccaaccacaaaggcattcccccagggcatggccaatgaggacaggcaggatgtggggagacgtgtcagggcgcgctggagagcatgtgactcaggaggcggcagacctgggtccaggtccagtccgcatccatatgacttggttcccgtcacctaacctctgagctacactccctccgtcactcaaaaatatgcacagagagtaggcgcagtggctcctgcctgtagtcccagctactcgggaggatcacttgagctcagaaggttgaggctgccgtgaactgtgattgcaccaccacacaccagcctgggtgacagagtgagaccctgtctctataaataaataaataaataaataaggctgggcacggtggctcgtgcctgtaatcccagcactttgggaggccgagacaggcggatcacatgaggtcgggagttcaagaccagcctggccaacatggagaaaccccgtctctattaaaaatacaaaattagctgggtgtggtggcgggcacctgtgatcccagctactcgggaggttgaggcaggagaatcgtttgaacccgggaggcagaggttgcggtgagccgagatcgcgttattgcactccagcctgggcaacaagagtgaaactccgtctctaaataaataagcacagggatgtcagggagggtctgcctcagaggcgtttgggacaatgacatgagctaatgctggtagcacccctcccatagcccctggcatgaacctctcccttcctccctgccccctcctcccctgcttcttccaccttgtgtggaggccctgatactctgtcactgcccattcctggcctggctgtagggtccccgcccctccttccccagccttatttaattccaacagactttatcaggcacctgctttggatcaggcctgatactgaccaaaatcaggtgtcccaagttggggagactggccgagatcctgctgggatggcgcctggtcagtgatgctatcccccgaccttcctttccctttctctgttgcactctccagcccctgaaatactagacatttgttcctttactgccctcacccccaccctcgctgtcctgcataggacagaagttcctcgggtccgtctgggtctgtctgccaggacacagctgcaggggacaagggctatgagggtggatgtaaagtactgggctgtggcaggaccctcctctctcccactgctgttcccactgcagccacgaccacctgctgtgcctggatggaggaggagtgaaaggcctcatcatcatccagctcctcatcgccatcgagaaggcctcgggtgtggccaccaaggacctgtttgactgggtggcgggcaccagcactggaggcatcctggccctggccattctgcacagtgagggcggcccctggggatggggccaggcggggctgagacctgtgtcctcaaggggccgagtttgtcttcagggctttgcaaaaagagagtggaggagtagaggagggctataagcactttgaggaggcaggggcggggctgcaggtgctgaggtcccaggctggaaggagaagggctgggcccatgggcttgggtttggggatcccccgccctctggccacagagggtagagctggctgtgtgaaattttggcataggaagcgtttcctatcgactgccttaacccctcctcccctcacccctgcaaagcaggcaccaggggccacacagcctgctgcacataaggaatcccattcccagggtgcacgcagcaggcagtctcaggaatgaggagccactgagcctcaggatgccagagccctcgcctgcacacttcattttactgggaaattttactgggaaattaagttcccaggtggggagggatgacgtgaagtcacatagctcatccatggggtcgctgggctggagcacagtcccctagactcccagcctggcacctcctaggccacagggcactgtgtagtctcctttcactgccgctttgcgaaggcgcctggcttgctggacagatagccgggtggtcagtgttgtgacggctcctctgtggagctgtctgagcttctaggtgctgacaggtggggaggggcactgccagatcagggtcctcagctccccccaaccccctggacattgtcctgggactcaacatgtctgactggtgcccctgcccctgtgctggtcagattccattttctccagagcgcccccacatctggatcctggtcatgcaaagtcttggaggtgcccggggaggactccccaccctagggtgggtatcagggcctgtgggccaggcctgtgttggatgctggggatgcagagctgagccaggcataccccagcctcaggagcagggggctcagccagtccaggaggtgctggggacagagtcccatgggcggaggaggagagtcatctgtcaagttgccgggacgttagtgtccacggcggtttattgactggtatttcatttccttttgatgattctcaccatagccctgcggggtgagcagatggggaaactgagaaccagagaggatcagccagtgaattgggcagtcaggactgggtctccagcagtgtgcccagctctctaccccagcctcagggtcccagcatcccctctctggtcttccacagggtccaagggcgggcacgaggtctgagcaggcagactgggcagagtcctagcttcttctccaaaagggccacgtccttcttcagggaccatttcttccccatccggggtcttgagactcccaggggccatggaggggatttgagaggtctcctggctgatcctccggtgtgggcagatggcctcctttcagctaccctctgcttgtacatccctggccctggggaactcactgcctcacgggggaagtggggcagcttctccttcctggaggtgcagccggccccttggccctgtctgttctgaaggctcaaaggacagggctattccttgttttctgtgacaaacaacgtgggtctagcttttataagcttttactcttgaggggctcttctttaaggaaaataatacaaaatcatgaatacaagatgaagtgcagagccgtggggcttcagtggtttttgagtctctccgttgcccaggctggagtgcagtggtgcatcttggctcactgcaacctccgctcccgggttcaagcgattctcctgcctctcagcctcccgagtagctgggactacaggcgcccgccaccacacctggcgaatttttgtatttttaatagacggggtttcaccatgttgggcaggctggtctcaaactcctgacctcaagtgatccacctgcctcagcctcccaaagtgctgggattacaggcgcgagccaccatgtccagccggaaggaggtttctctctgtctgtctgggaggttgcaaaggaagggcccagaatttgggtttgcttaggcctcggtaaacccgcttcctcctgccacctcctgcgttcaggcgctctgcaggctgttctacgggagccctgcgtgtggccgctgcatctccccgcctctgacccctttgttcctaggtaagtccatggcctacatgcgcggcatgtactttcgcatgaaggatgaggtgttccggggctccaggccctacgagtcggggcccctggaggagttcctgaagcgggagtttggggagcacaccaagatgacggacgtcaggaaacccaagtaagccctggcgcactggggccgtggccgcagctgtgcccactgtggctgttccctggggacagagggctccctgtcctgctgagggagggggaagagcgccccacgcttgaggggagcagagggaacccccttcccagggaggcagagggctggggtgtggctctcacttgggcatgcagacacctgctgagcgcaggaggggcgtggcctggtgggcctggctctgccctgcctggctctgccctgcccggctctgccctgccggctctgccctgcctggctctgccctgcccggccaggggtctggggcttgcctggagagagcctgggccacccttctctgagaccacctgggcagaggctgggtttttgctgcccaggcaaaaggaacccactggcctttcaaatgacacggctaaacattttctcacatttcagacagcactcgctcccaggatcggactactaggttataatcagagggcttcagtcttacctttaatttaaggcctacaagacttgaactaatttaagtcagactgaaggagaaagtcacatttccaggaaacatttgtttgggaagcccaaatcctaggactaagcaatgcatcccgttcggggctggatgaatggtgtgttccaagaggagtgttttgagcatttctgagtgattttttcatattttgaaagtgagtgtcccccagtcttaggggcccggcatcccctctgcggtcttccctagggtccaaggccagggaccttcaatcttttttcccactctgtggcttgtctttctgctctgtggtgtttctaggtttttgttttttgttttttgttttggttttggttttggtggcccatgttcttaatgaggtagataatatttataaatatttttcttcttgtagtttgtgattttttcctttctttctttcttttttttgaaacagggtcttgctgtggggcccatgctggagtatattgctgtgaacacggcttactgcagcctcgacctcctgggttcaagcagtcctcccatctcagccgcctgagtgcctgggactactagcatgtgccaacacatgtattttttgtagagatggggtttcaccatgttgtccaggctagtcttgaactcctgagctgaggcgatcctcccgccttggtttcccattacaggcatcagccaccatgcccagcctagtttgtgctttttatttctcgttcataaacccctttgctgcccccaagcagcacacgattctcctgtgtcgagctggaaagctctctagatctgccttttacattgaggtcttttatcaacctggaattgatttttgtatgagggtgaaatccaagatccaatttaatgttttccacgtgattggccaatttttcccagccccatctgtgaagtctgtccttccctccgcttcctcagcagtgggtcaagcatccctctgctcttggatctgctccaggctgtgttttgttccactggttggaaagctgtctctgtgcccggaccacagagcataaaaaactaccgctgtgtggtgagtcctggtgtctgggtggcagatcctccaccttggccttcttcaaaaacatcatggctattcttgggggcagtagagagaagtggatacaagcatagaccctgaagtttctacctcttctcaaaaataggaatatgccaggcatggtggctcaagcctgtaatcccagctctttgggaggctgaggcaggaggatcacttgaggccaggaggtcgagaccagcctgggcaacatagtgagaccctcatctctacaaaaaatttaaaactaacaattagctgggcatggtggcactatggctgtagtcccagctaattgagaggctgaggtgggaggatcacttgagccccggaggctgaggctacagtgggctgtgatcccatcactgcactccagcctgggcaatagagtgagaccctgtcttaagacaaaaaaaaaaaaacaaaaacaaacaaactcacaaactataaaaagaaaaaatatttataaattctactccattaagaacatgggtccatccaaataaataaataaaacaaaaacaccataaagggagtaaaaagacaagccacagagtgggagaaaagatttcgaatccatacatccatcaaaggactcattttcaaaatatgaaaagatcattcagaaatgctcaaaatagtaaccaccattttactttctcttcctatgagtttaactgctccaggtactgttaagtaaaatttttaggggataattgatttggaccaggattctgtaccaggcccaacagaagaaacgaatatggagtcattcatgccaagtgaacctagttagcttaggcgtatacccatgtaacaaatagctgagttctggttagctacaacagctaagctttaatcaatcatagatggccacctgattcaaacaaggcaaaccaattaagctccacacctcactttggttttcagcccatcaacactgcctgaccacgttgcaggccagagttctttgaacctattctggttttgtggcctgcctgactctcagttcatcaataaaagccaattaacatctttaaatttgttgcaattttatctttgaccgtaccttatgtaagtggaatcatacagtatttgtctttttgtgactggcttatttctttctttttttttttttttgagatggagtcttgctctatcacccaggctggagtgcagtggcgcgatctcggctcactgcaatttctgcttcccaggttcaagtgattctcctgcctcagcctccggagtagctgggattataggcgtgcaccaccatgcccggctaattttttgtattttagtagagacagggtttcaccatgttggccaggccagtctcaaactcctaacctcgtgatccacccacctcggcctcccaaagtgctgggattacaggggtgagccaccgtgcccggccatgactggcttatttcacttggcatccatgttgtagcgtgtgtcagaatttccttcctttttaaggctgaaaaactccattgtctgttggatacacgttttgcttctccattcatccattgatggatattttagttgtaaattgactgctgtcaatgtcggatgtgcaaatacctgtttgaggcctactctctcttactggtgccttctctagagagaattctgatgggttcagtttgatcatattttgtttaagatttttggccaggcgcagtggctcacgcttgtaatcccagcactttgggaggccgaggtgggcggatcatgaggtcaggagatcaagaccacagtgaaaccccatctctactaaaaatacaaaaaattagccgggcgtggtggcgggcgcctgtagtcccagctactcagagaggctgaggcaggagaatggcgtgaacccgggaggcagatcttgcagtgagccgagattgcgccactgtactacagcctgggcaacagagtgagactccgtctcaaaaaaaagatttttgtgtccacgctcgtgggcgaacttgacccgttttttcctattttgggttttgaggaaatatttcctctttttatttttcttggaagagttagtataatagtttattttgaatttatggtagaacttgatagtaaattcttctaggcctggagtttgcttggtgggaggatttttgatgatggaattaatttctatagtggttgtgagactgaccactcggggtttctaaatacctttttgagttagttttggttaagtgaggtttttctaggaatgtgtccatttcatctaaatctttaagcttattggcttagagttgttcaaaatattctgtttttttttttttttttttttttttgagacggagtttcactcttatcgcccaggctggagtgcaatgacgtgatctcggctcactgcaacctctgcctcctgggttcaagcaattctcttgcttcagcctcccaagtagctgggattacaggcatgcgcaaccacacctaatttttgtattattagtagagacggggtttccccatgttggccaggctggtctcgaactcctgacctcaggtgatccacctgcctcggcctcccaaagtgctgggattacagacatgagccaccatgcccagccgattctcctttttctaacgtctgcagtgtgtgttggtgcggcccccttttctttcctgattttgataacagataacagccatgttttatcagtcttgcaacaggtttttccattggattagcctttcaaaaaaaccaacttttgctgaattgtgcccccaaggttggaccaatctgacactcctccagcactgccggagagagcctgttttgcggggatggtgcggggagaagcccacctatcccgaacagaggttggagtgggcactctgctacccaaggccctggggtgtgaattgtggggaaagggaaaggtggatgggcgggtggctcagccgtcctcctgcctcatttctctccagggtgatgctgacagggacactgtctgaccggcagccggctgaactccacctcttccggaactacgatgctccagaaactgtccgggagcctcgtttcaaccagaacgttaacctcaggcctccagctcagccctcaggtttaaaccatgtttgatgcatccatgggaagcgactggcccgagaggctgtggggtggtgggtgggagtcgtgcacttgccatcaggcaccctcaccgtgccaccagcccacccgctgcactggtctttattggctgaggacagggattgcgggggagctgtcaggcccctggcaggttagaaaagtccctggaaagtcctcagctgtacctgccttccaccaggacgaactagccagagagtgtggcttcgtgggtcctgcttctgaagagttcccagcctcccctcttcccgcacccccagcccccaacacgcacaccctgagatctggagtgcatgggttttatgccagtcccttgtgccactgggccgccctccttccccgcccctagaccagctggtgtggcgggcggcccgaagcagcggggcagctcctacttacttccgacccaatgggcgcttcctggacggtgggctgctggccaacaaccccacgctggatgccatgaccgagatccatgagtacaatcaggacctgatccgcaaggtgagtgccgtaggccagagggcctggacccactgctccctggagccaatcctgtgtcagcaaaccatgctagggaccgacccccaggacagcaggtggcttttacacacgcactcattcatatgtgcacacagggcaaattgatctcactggaacctgttccatgggtgggatctgcctgaagcactgtgctaagggggatctgaggaccactgtgctctaagtgtgcatgagtggggagggcggcatgcataccatgaacgtgccactcgagccagcctggggacaggacacatgcttgcccttgagctcacctctgtggatagacagtcccacaggaatgcctgtccccacgggttgccggtgctgtggtggaggaccgtgaggcctctgctaaaaggcctgggggctcggaaagggctccatggaacaggggacccatcctgaggcccttggggacagagcagtgcagaatcagtgatctggaggaagagcagcagccctctctctgcagaggtacagcagaggctggcaggacccagcatgctaggggaggccctgtggcgtggcgggcggtgggtgaccggggtgggcgagcgcggtggctgagctcagaccctggagccagggcgcctctgggggtccccgttctgcctgcactcactgcagctacctaatggggccatcatagcgcctgcctggggaggctgcgaggccttggcatgctgttgtctgtgaaatgttcacagcactgccgggagcctgagctgcatccttgctgctgtggtttcccgaagccccagggcgtcctgggcagcgcagcagaggctctgggcagacagagaagcgccctctaggggccagatcgggcagggcgggcttcctgcaggcggcagagaccgtcagactgtcagacactagccagtctaactctcctattgcgtgcggatggggagcctgggacccagagtgggaggcatcacccaagatcatccagcaaatcggcagcagagcttgttcggaagcaaataagagaggcagcggccgggcgcagcggctcacgcctgtaatcccagcactttgggaggccgaggcaagtggatcatgaggtcaggagatcgagaccatcctggctaacacggtgaaaccctgtctctactaaaaatacaaaaaaattagccaggcgggcatagtggcaggagcctgtagtcccagctactcgggatgctgaggcaggagaatggtgtgaacccaggaggcggagcttgcagtgagccgagatcgcgccactgcactccagactgggagacagagcgagactccgtctcaaaaaaaaaaaaaaaaaggcagcacccagggctcaggttcaagccttagcccctacttccctaccacgtggcccctgcagctgcttcccggcctgagcttcgctgagagccctcatttgcaaactgggtgatcagtgccctctccacagactggctggagattaaatgaagtaatgatgcaaatacctggcaaatcaccaacaccaaggaacaccgtctgcctttcctcccctggccacgacttgacttgggccagcatcagatggggtgggcgggatccttcttgcagctggtgtatgtgtggtcctgttggtacacagatgctgtcctgagcagatggcatgtgatgcccgcaccagccgttctggggtcacgtgcaagaggctggctggaaatcatgccaggcatgctcttgccaccagagacctcttgccctgttctcatgtgccccagagcccagtcttgggcctccccttgacgctccccttcgtgccccctacctgtggaaggtctcttctgactgcccctgtcctgttcccaacagggtcaggccaacaaggtgaagaaactctccatcgttgtctccctggggacagggaggtccccacaagtgcctgtgacctgtgtggatgtcttccgtcccagcaacccctgggagctggccaagactgtttttggggccaaggaactgggcaagatggtggtggactgtgtgagtgtgggcccctcccccaggccacttccctcagggtctgtagcccaggtcgatggcttcccctcatcctgtggggcctttggtgttggaggagacagcagggctctgtccatcgcctttagccagctggagggagagagagtccacagttcagagtctcagtgcggggcagggaccctcagtgaccaccagcaggggggttttcaaacgctttttagctgcggatccctttctgcaaacatagcgcagtgtagaagcccagaatggacaaaggctccagagcgggctgggcgctcaccctgtaatcccagcactttgggaggccaaggcaggcggaccacttgagcacagcagtttgagaccagcctgagcaatataatgagactttgtctctaccaaaaaattaaaaactagctggacatggtggtgtgtgcctgtggtcccagctactcaggaggctgaggtgggaggattgcttaagcccaagaggcagaggctgcagtgagctgtgatcatgccactgcactccagcctgagcaacagaaggagaccttgtctcaaaaagaaagaaagaaagagagagagagagagagaggagggagggagggaaacttcagggagaggggacatggaggcctgtcgactcagccgctaccctttcccccactcatcatccctgaaagggcactgctgagacctctgcccctctgattgcacagctgggacagtccctgcagtcccaggaaggggttttgcccgagccgctctgctgctgtgtggctcagcctgactcgaaagagcctggggctccccaggctggggctccgagagtgcagggcagggccgggcggggtgcgggccgggcggggtgtgggcccggcactcaccaaggctgcttctcaccagtgcacggatccagacgggcgggctgtggaccgggcacgggcctggtgcgagatggtcggcatccagtacttcaggtgagggctcagccgccccagcccttggccccgtgccctggcgtggtcggactcaccgaccttcccctcccagccctagtgtggactttcccttccccaagggtctgctctgttccccaagcccaccctggtcctagctggcgtcccctgcccagcctgagcatcctagggtgaccccctcctccctggcccgaacagattgaacccccagctggggacggacatcatgctggatgaggtcagtgacacagtgctggtcaacgccctctgggagaccgaggtctacatctatgagcaccgcgaggagttccagaagctcatccagctgctgctctcaccctgagggtccccagcctctcaccggccccagctgacctcgtccattcagcccctgccaggccaagcccagccactgccctcccgggcagatctgggcccaggcacctctgagtccatagaccaggcctgggagaatgccaagctgcctgcccgaggctggtcctgaaggcctgtctcccactaaccccgccttccagcactttctgtcattccaggctgggaaagtctagagccccctttggcccctttccctgactgtcaaggacaactgactcccccatc

SEQ ID NO: 15731 - DNA, 56202 bp, Homo sapiens
aggaaacagtgtggatcacaaggaggtgattgagagctactctgcgtctggaagagtgaggaggagcctgtgtggcagaacaaaatggataaggtcgttccagccgtgcagaagtgtggaggtgtgagcctgcaggcaggtggctctggttggatcccaggtgcatgcagggctttggtgagagtgaggctgaaggaagcagctggggactcattctgactaaagaggcatggcaggaggggtctctgaaagtgtcaggctgggggccaggggctgccaccaacagaagagcaaggcaggtatcagggccccatccaatcaggtgagaattcagagcctggctccacaaggaacctgaggcagaggcacccacagcaggtgcttgggctaaatgcagctcagtggccagtgcaggcaccagttttaatacagtggggccattccagattctgagtgcagatggggctgagcagaccgccttccagctggactcgatcaggactgaccctggacggggcaggcttgcacttgtagcttcagagctccactgcaggcacagctgaccagggcagcgggtccactccttggagagctggacagccccacttttgaggtacacggccctggggataccactaatctccacgtaccaataatcaccaagttctgtcagttgtaaaatcccttgacaggattccagatttgtctcagccagcttaagccccagtgtgggcagacctccatcccaggaggatttagtcctttgtcagcagcttcttagctacacgtaagctattctgtggtactttatagtttacaggattttttgttttcttttttttttttttttgagacagagtctcgctctgtcacccaggctggagtacagtgacgcgatctcggcttactgcaagctccgcctcccaggttcacgccattctcctgcctcagcctcccaagtagctgggactacaggcacccgccaccacgcctggctaatattttgtatttttagtagagatggggtttcaccatgttagccaggatggtctcaatctcctgacctcgtgatccgcctgcctcggcctcccaaagtgctgggattacaattttacaggatgtttttaagtatgttgggttagcacattctctgccaatccgtggaggtgggcaaggaaggcagtattccattttatgcatgagaaaatagccttgggatgataagtgattcatcccacttatacacaggaagcagtgaagaaacagaatcagtgtcttctggttcccaattcatttctctgtgctgctgtgttgtttccatgtatgtatgtatgtatttatttttttgagacgttaagtcttgctctgttgcccaggctggagtgcagtggcatgatcttggcttacagcaacctctgcctcctgggttcaagctattcttctgcctcagcctcccgagtagctgagactacaggtgcgtgccaccatacctggctaatttttgtgttttttagtagagacagggtttcactgtgttagccaggatggtcttgaactcctgacctcgtgatctgcctgccttggcctcccaaagtgctgggattacaggcatgagtcaccatgcccggctttgtttgtcttatttctaaattttattgatttatttattttcacagtcatagctctggagtcttttttatcttctcccctctaacctgctcccacccgaacctttccatttcagcagatagcatcattgcaacgggctgtgccagatccagccatcacatccacctttccagccaaagggagggtggaagggcaggatgcagaaggtcaatctccccctcctcagggacatttcatggaagttgcacgcattggccagaacccggtcacatggccacagctaactgcaaaggatgctgggaagtgttgcctgtgttgcagacagccacgtgccagtcgaaaatcagaggttctttctccctccgtcttgctgctggctcgcttctccagaccacagtcattgtgcacgtgtctcctgctgctccggctgtggcctgcactcctctcatcctcttccaagctgctgtcacagcgctgtttccagagggcaaatctgattggtcactcccctgctttactccccaagggcttcctgttttcttttatttttatttttattttcattttttgagatggagtctcgctctgtcgctcaggctggagtgcagtggcacaatgtcagctcactgcaagatctgcctcctgggttcatgccattctcctgcctcagcctcccaagtagctgggactacaggcgcccgccaccacgcccagttaattttttttgtatttttagtagagacggggtttcaccatctactcttagccaggatggtctcgatctcctgaccttgtgatctgcccgcctcagcctcccaaagtgctgggattacaggagtgagccaccgcgcccggccagcttcctgttttcttaacacatcaggtgcttaatgacttaaaagggcccagtgtgatcaagtttctgcctctgtgttctcagctcatgccgccttgtgctcctggcctttgcccaggctcttgctgtggcctggaatactcccctttctttgcctgccttccttcctcttgccctcccctgacctgcaggctggattaggagtttctgctgggcatcccatggcacccgtccctgcactggggatcctgctttcctggtaggccacagaccttgtgaggggagggactgtgtctgttgggttcatgacagtgtgcccagcccccagcaggtgcctggcgtagatcaggtttgtggaacaaatgaatgtgatatattaatttagctttagagtattcattgagggctgctgtgtgccaggccctctgtgccacctgggtggagggtggaggactgttgcattgagggcagttgaaggagtgagctgggaagtgggaggtggaggatggggactgggatgcagggtttgaggttatcaggggtcccagaagcagtaatgccaaggcctaggctgtgacctggagtgagggctgcgatggggtggggtggggtcgaggctgtggaggagggtcatcagggcactgctggagccctggggttctccagggccgggggtggtcattgcagtgttctcccagctcctctcaacaccctgcggtctgtggagagcaggcctggtgcactggacttgcctctggccagggctgagtttctgccttctaaacgatcttcctcctgtgttgccctagaggcctctggactgtcctgagtacttgacgcgtgttagagtgagcatgggctgctagccttccgctccaggtggaggagtttctgttgttcttttgctgctgttgctgcagtgagctgccaggctgagcttctggatggacctgggggatggaattaggagcttctgaattcttgggttgtataacctaaggccggagagtcccacagcactgctgctgggcggagagactggaccctgctgatacagacagcgacagcagcaggagcatctgcagtttcccagcaggtcctgcatgcctgggcttggcactagtctaagtagtaactcatgttatcctcacgacagtcccacgaggtggggtcattactgacctcctattacagatgaggaaacagaggcttgcagaatttgagatcacacagctggtcagcgtagcgattattcagaccctgtcacctggctccagaacccactcgtttacctttcttacatcagggctgctttgtagtgtggcgagctgagtggagctccacccgcctgggctgatcctggcccttcctgcctgacctatggtgcgggggccctggctctccccgtgtgagcccccaggggtcacttgtaatatgcctgtgtacactatgatagcatagatacttctgttcctggtacagattaatcatttacggctggcattgacttgtaacagatgacatttgatgaaatcaaccagcctctcactggtatctcagcagaaacagggctgtacctcccaggcatcctgggaaggatgatagaagtgtgtgatctgtgcttccctaccgggagctgacttttgaggctctctggactgggactttgccataaaactgcttatcagaaacctcagataagtggagtgccctgtgtcctggccacgtactctggggccagctcctccatccattcagtcctcccacatcccatcttcaccaagcagagtggaaagcggcaggtctctgcgagaaaaggaggctctgtacccagccttcagtgagataactttagagtggggccttgtattccctacacaggccttgtccccgacacggcctctttgcccttgcttctccttctgctaagaatgctccttcccaactccttggctggacacacggctcctgctctgtgggcctgtcctgttcccactcagagcctcagcaccccccatgtggccaagacacagcccctcttgccttaggttgccgtgggtctgtttccacatctgtttcccctccagactgcagggctcctgagggacagggcctggggccaagtctcctctgcgttcctgatgcctggtggtgtgccacgctctccgtgggtgcacggtaaatatctgccgagtggctagatgtatccatggttgctgaaggccaagtgtgttgaccagagggcgtgggaaaggctccactggggtggctggggtagagatagaccttaaggggtccagaagactccaccagctggagggaaaggccctacagagacaaggtactaggaaaggcccagaggacagaggaggggccctgtggggagcctgtgggcaggaagggcctgtgctgggctttgaaactggggactcaggtactgctctagcgtgagggtccttggcattttttttggtccaggaccccctgaggtccctggggaatgagaacaggctcacacagccactttcaagaggtttgcaggtcccctgaggcttagccacagacccctcccaccccagcagagacacagcagaggcttctgagtggaggccaggtggcttcagcctggggttctagaagggagggaagagacacacccccgtgtgtcctccagagcctcagccttctccctgaatctcccctttgcctcctcactgtaacccacacctggctctccttgaaggacccgcttgccccgcagcctcctgagagttttctctcccagtccctctcccactgggcctggaggtggggtagggtcctccttgcccccagccttgaatcttctgtcaccctacaataccacttgctgtcaccccggtgataggtatctacgagcctggggtgctcccccacatcctcaaagatgtgagcccctgactcagcgttgcctctggttcctgaccctccacattcacatgaccacgcgctggcctttatcatcgccagtgacagcagctctcccgtaaatacaagtttcaagcaccccactttccagtctctgccttctgtctttccagttcattccctctagtcctccacccacacagtgcttttccccattgacagggaattgctcctggccgcttttcccagccccatcccgttcatgtgccttgctttgtacccagcatggactccatggcctgtcattgtcactccttcacctatacttcctgcctccttgcttctctctctcttcgtcatcctggcatcaccaccccagaactgcttggtttcagttctccaccatggctaggggaacatacctttttgctgactgctctcactttctttttttttttttttcttttttttttttttgacacagagtctcgctctgttgcccaggctggagtgcagtggcacactctcagctcactgcaacctccacctccggggttcaagcagttctctctgcctcagcctcctgagtagctggtattataggcacccgccaccacacccggctaatttttgtattttttttagtacagacagggttttgccatggtggccaggctggtcttgaactcctgacctcaggtgatatgcctgccttggcctcccaaagtgctgggattacaggcatgaaccaccctgcccggccctattgctctcactttgaaatcacgacatgagccacagtgagcctatgatgtggtttgacgtctttctgcatttctctgttcacccctctcccagaaggcatgcctccttccctcccctcagcctgcagccccttcccctccacgcttactctcagctgatagccctgctgctgtctcgctgagaaaatagaaatagccagaggagaattccctctaccccatgcacacacctctgtccccgcctactccacattccctgttgtcagcaccgatgtgtttagctgagggtggtccccccattcaaggccatcatctcctgtcatctacttcttgacaccatttgaacaattatctcccctctttcctacataacactttccccttttctactatatattttttgctatggattgaaagtatccccccgaaatcatatgttgaagccccaatccctcgtgtgatggtattaggaggtagagcactatgggggtgattaggtcatgaggatggagccctcatgaatgggattagtgcccttagacgaagaggcaagaaagagatgatctgtctctgccatgtgagggcacaacgagaagatagccatctgcaaaccaggaagtgaaccctcatcaggaactctatcagccagcaccttgatcatagacttcctagcctctagaactgtgagaaataaaggttgtttaagcctcccagtctgtagttttctgttataatgtcctgacctaagttattttccatcgctatacaatgggttatttttttctttaaaaaaaaattatttcttgactctactttttcctccagagactgcttatattccactgtcttcattcttctcctcctgttttctctctttaaacttttcaaaaatagcaaaatataacacatatagagaaaatgatatacagctcagtgatttatcacaaacacctgtgtaaccaccactcgaatctagagataggacattacagcaccccagaagccctccttttgtcccctcttcccaaagaagggtaaccaataacttgccttttatgataaaggctttttttttttgagatggagtctcactgtgttgcccaggttggagtgcggtggcgcaatctctgcttactgcaagctctgcctcctgggttcacgccattctcctgcctcagcctcctgagtagctgggactacaggtgcccgccaccacgcccggctaattttttgtattttagtagagacgaggtttcaccgtgttagccaggatggtcttgatctcctgacctcgtgatccacctgcctcagcctcccaaagtgctgggattacaggcgtgagccaccgcccccggccaagataaaggcttttctatctggcttctttgttagcattttgttggcgagattgatacgttttgtgtgcagctgtctgtcattttcattgcaatagaattccattgtctactatatcacagttactcattctactactgatgaaaatttgggttatttctagtttttttggtgcatacatgcatacatttctggtagacatacctagaagtgaactggctgcattatgggccataacttgtcttcaacgttagtaaataataccgcccgtctgttttccaagcagcagtaaatggcactttctgttacttcatatcttctgttacttggtactgtcaggttttaaaattttagtcattctgtcgggtgtctagtagtatgttattgtggttttattttgcatttgcctgattgcaaatgaagttgagcactttttgatacagtgattaaccatttggatatcctcttcagtgaagtatcagctcaattctcttgactatttaaaaaataaagttgtttatctttttcttacagagttttaggaggagttttttggtacatgtgcagtccaaatacacaccttttgtcagtgatacgtgttcagctgcacacacggtgttttgcctttttattcttttaatggtatctattgataaacatgagttcttagttttaatgaagtcaaatttgttcatcttctttacggtgtactttttgtgtcttgtttaaggaagtccttctctatcttaaagctttgagaagcattccttctttctcctattttctaaaaattgttgaagatctccttccttccttccttccttccttccttccttcctttcatctatctctctctcacccaggccaaacttcagtggcatgatcatggctcactgcagcctcaacttcccaggctcaagtgatcctcctgcctcagcctcctgagtagccaggactacaggcacgcaccaccatacctggctaattttaaaaattttttgtagagacacggtctcatcaagttacccaggctggtcttgaactcctgggctcaaacaatcctcccacctcagcctcccaaagtgctgggattacaggcatgagtcacatgtctagcctgtattctttctttcttaaatgtttggaagaattcatgggtaaaaccatgtgaccctggagtttatttgtgggaagcttttaaaacatggattcgatttctttaacaaatataggactatgagattttcatctcatgtcggtttgggtatgttgtgttttcaaggaatttttctattttatcgaagttgtcaaatttgtctgcaggtccccttatttcctttttaatgtatggaggatctgaagggatggtactttgtgttgtctctatttcttgtttggttttgctagtgatttgccaatttaaaaaatctttccaaagaaccaacttttggctttgtttattttttgaaaacctgagtagctgggattacaggcgcccaccaccacacccggctaatttttttatttttagtagaggtggggtttcaccatattggccaggctggtctcgaactcctgacctcagatgatccacccgcctcggcctcccaaagtgctgggattacaagtgtgagccagtgtgcctggcaagccgctttttaaatggcaccaatcccattcatgagggcagagccctgatgatcgaattacctcctaatggccccatttcttaatactatcacactgagaattaagttttaacataagaattttaggaagacacaaacattcagaccatggaacatatataaaacagttgtcctaccaactaacagaatacacattcttttcaagaacacctatataaaaattatagacactgacctatgctggccataaagcaaatatgaacaaatttcagatacctgaagagatttagactatgttctccaactacagtgcaattaagctagaaatcaatagcaaaaatgtaactataaatgagcccgtatgtttgaattttaagcaagatatatgtaaattatctatggttcaaaaaagaagtcacagtgaaatttagaaaatatcttgacgtggcgggttgcagtggctcacgcctgtaatcccagcactgtgggaggccaaggcgggtggatcacctgaggtaaggagtttgagaccagcctggccaacatggtgaaaccctgtctctactaaaaatacaaaacattagccaggcgtggtggtgggcacctgtggtcacagctacttgggaggctgaagcgggagaatcacttgaacccgggaggcagaggttgcagtgagccgagattgcaccactgcactccagcctgggcaacatgagtgaaacttcatctcaaaaaaaaaaaaaaaagaaaagaaaaagaaaatatcttgacccaatgatgatgcaaatactacgtatcaaacttgtaggatgaacttccacttctggccatgacagaggagcctgtatcagactagccttcctatttatatatttatttttgagatggggtgtcgctctgttgcccaggctggagtgcggtggtgcaatctcagctcactgcaacctccacctcctgagttcaagtaattctcctgtcccagccttccaagtagctggaattacaggcgcccaccaccacacccagctagttttttatatttttagtagagacggggtttcaccatgttggccaggctggtctcgacacctgacctcaggtgatccacctgcccctgcctcccaaagtgccgggattacaggtgtgagccactgcgcctggccgtgagtgacctttttaatgtgttgttgaatttgatttgctggtattttgttgagaagttttgcatcaatatccatcagggatactggcctgtagttttctttttttatatgtctttgtctggttttggtgtcagggcaatactggcctcatagaatgagtttggaagttttctctcctctgtttttcataatagtttgagtagggttggtattagtttttgtttaaatgtttggtaaaattaagcagtgaagccactgggtcccaggcttttctttgctgggagacttttcattacagctttgatctcattacttgttattggtctatttaggttttggatttcttcacggttccatcttggtaggttgtgtatgcctaggaatttatccatttcttctagggttttcaatttattggcatataattgttcacagtaacctctaataatcctttgagtttctgtgatattggttgtaatatctcttttgtcatttctgatttttttgtttgggttttctctctttttttgttagtctagttaaagatttattgattttgtttatcttttcaaaaaactttattttgttgatcttttgtattgttttgtttcaatttcatttatttctgctatgatctttattatttcttttcttctactaattttgggtttggtttgctcttttctagttctttaagagacatcattagattattttgaagtttttctacttacttgatgtaggtgcttataggtacaactttcctcttagtacttctttccctgtatctcacaggttttgatatgttgtgtttccattatcatttgtttcaggatgtttttaaatttccttcttaatttcttcattgaccattcaagagcatattatttcatttccatgtgttcgtatggtgtgcaaaataccttgtttttgatttgtagttttatttcattgtgatcacagaagatacttgatatgatttcaaatttaaaaagtaatttggctgggagaagtggctcatgcttgtaatcccagcgctttgggaggccgaggcaggcagatcacgaggtcaggagatcgagaccatcctggctaacacagtgaaaccccgtctctactaaaaatacaaaaaattagccaggcatggtggcaggtgcctgtagtcccagctactcaggaggctgaggcaggagaatggtgtgaacccgggaggcagagctggtagtgagccgagatcgcgccgctgcactccagcctgggtgacagagcaagactctgtctcaaaaaaaaaataataacaataataataatttaagacttgttttgtggcctaccatatggtctatccttgagaatgatccatatgctgaggagaagaatgtgtattctgcagccgttggatgaaatgttctgtaaatatctaataggttcatctgatctatactgcagactaaggctggtgtttctttgttgattttctgtctggatgaactgtctaatgctgaaagtggagtattgaagtctccagctattattgtattgaggtctatctctctctttagctctaagaatacttcctttatatatctgggtgttccagtgttgagtgcatatgtatttaaaattgttacattatcttgctgaattgacccttttatataatgaccttctttgtctctttttatagtttttgtcttgaagtctgttttgcctcatagaatagcatagctattcctgctcttatttggtttccatttgcatggaatatctttctccatccctttagtttcagtctatgtgtgtctttacaggtaaagtgtgtttcatgtaggcaacagatcactgggtcttgtttttctatccgttctgccactctgtgtcttttgattggagagtttagtccatttatgttcaatgttattactgacaagtaaggacttactcctgccactttattaattattttcttgttgctttgtgatcttctttctttccttcctgttctccttttagtgaaggtgattttctctggtggtatgttttaatttcttgctttttatttttttgtgtgtatctgctgtatgttttttgatttgaggttaacatgaggcttgcaaataatatcttataacctaatattttaaactgatgacaccttaacactgattgcataaacagacaaacaagcaaagagaaaactaataaaaactctacattttaactttgtccccccactttttaacttattgtactgtttatgtctgaaaagttgtagttattatttttgattggttcctcttttagtctttctactcaagatatgagtggtctacatatgacagtgttataatattctatatgtttctgtgtacttgctattaccattaagttctgtactttcaagtgatttcttattgctcattaatgtccttttctttcagattgaaaaactccctttagcatttagcagtatgtgaactgcatttttcaagtccagaatttctgcttgattcttttttttttttttgagatggagtcttgctctgtcgcccaggctggagtgcagtggcgcgatttccgctcactgcaagctctgcctcccgggttcacaccattcttctgcctcagcctcccgagtagctgggattacaggcgcccgccaccacgcctggctaattttttgtatttttagtagagatgggatttcaccatgttagccaggatagtctcgatctcctgaccttgtgatccgcctgccttggccttccgaagtgctgggattacaggcgtgagccactgtgcccagcctgcttgattcttttaaattatttcaatctctttgctaagtttatctgttaggattctgaattccttctctgtgttagcttgaatttcactgagttccctcaaaacagctattttgaattctctgtctgaaaggtcacatatctctgtctctccagaattggccactggtaccttaattagttcatttggtgaggtcatgttttcctgtatggtcttgatgcttgtgatgttcgtcagtgtctgggcattgaagttaggtatttattgtagtctttgcagtctgggcttgtttgtatctgttcttcttaggaagactttccaggtaataaaagggacttgggtattgtgatctaagtttttggtcactgcagccatatctgcattagggggcaccccaagcctactaatactatggctcttgcagactcgtaaaggtaccacttgggtggtcttggataagatctggaagaattctctggattaccaggcagaggctcttgttctcttcccttactttctcccctaaaagtggagtctctctctctgtgctgggccgcctggagctaggagaggggtgacacaggcacctctgtggccactatcactaggactatgctggctcagacctgaagccagcacagcactgggtctcacccaaggcctacagtctccactgcctggctactgcctacgtttgcttaaggcactagggctctacagtcagcaggtggtgaagccagtgagattatgtccttcccttcaaggcagcaagttccccctacccccatcctgggaaggtccttagatgccatctgggaggcagggcctgcagtcagaaaccttagtaatctccccagtgctctattctattacagcctggctgatacccaagccataaggcaaagtccttcctgctcttccctcccctttccacaagcagagaagtctctctccatggccaccactgccccagccctgtggcagtgctgccaggccactgccaacgttcattcagggcctaagggctcttgaagcaactgaacactgccaggcctgggactctccctttagggtagtgggctcccctctgacccagggcaggtccagaactgccaccccacagccaacacttagaatctgggaccccaagagccctcttggtgctctgccacactgtagctgagctggtacctaggctgatttttgctttttatgaaggtacttttttgtgtgtatagttcaatttggttttcctccagggaggacaattggtggaggtttctatttgggcatcttttttttttttttttgagacggagttttgctctttcacccaggctggagtgcagtggcgcgatctcggctcactgcaacctctgcctcctgggttcaagcgattctccagcctcagcctccccagtagctgggattacaggtgcctgccaccatgcttggctactttttttttcaattaaaaagtaaactttaatgtcgaaaatgcaaacttggggaaggcagaaagatcacacacaaggctgtcgcttcacacttggaaggttgcacggcggccaggagaggcactcctcacttcccagacagggcgggggccgggcagaggcgctcctcacttgccagacggggcggcggccacatgcctggctaatttttgtatttttagtagggacggggattctccgtgttggccaggctggtctcaaactcctgacttcaggtgatccacgcacctcggcctcccaaagtgctgggattacaggcatgagccaccgcgcccagccctatttggccatcttgctttgcctccaccttcatttgataacagaacacccccatgtaaccaccaccacaatcaagatataagacatttctgttattctccaaatttccttcaccctcctttatagtccatggcacccaccccatccctgggcaacacctatgtgcttcctttttttttttccccgcaggaggacgtcttcctatacctatgtgcattccatcactgctgcttttaatcatatagcgtgtagtcttatgagtctgactttttcacttagcataatgcttttgcaatttgtgattgagcgttttcatatgattctgttttttctgtctcttagcttggaagttatacactttttagtagtaactgttgggagatcgttctccaagagtctctctcatatttccatacatcctgctagcagagacattgactacctgtttttgtctgtttagtgttgctataaaggaatacctaagtctgagtattatacatagaaaagaggttttatttgtctcatggctcctcaggccatacaagaaacatggtgccagcatcttaccagtgtcacatggcaagaaaggaagtgaggaagagaaaataagttgttaactggttgttaaaaagtgccaggcacgggccaggcacagtggctcgtgcctgtaatcccagcactttgggtggccaaggcgagtggatcacctgaggtcgggagttttgagaccagcctgaccaacatggagaaaccctgtctctactaaaaaaaatacaaaaaaattagctgggcatggtggtgcatgcctgtaatcctagctactcgggaggctgaggcaggagaatttcttgaatccaggaggtggaggttgcagtgagccaagatcacctgggcgacaagagcgaaactctgtctcaaagaaaaaaaaagtgccaggctctttttaacaaccagttcttacaggaactaatagagtgaaaactcactcacccccaccccacagggagggcattcattcatgagggatccacccctatgacccaaacacctcccattagccccccacctccaacattggaatcaaaatttaacatgaggtttggggggcagaaatccaaattatagcactacctttgttccaggctaccttcaaaggatgtttatacagcaaacagccttggaaaatagagttagggtctccttgtagagcacagggtaagtttgcttacttttcagcataatcaagattgtgtcttcttctggagcaaaactttgacaacaacaagcggggcaaagtctgaaaccttttgcacatcttgacagaaccttagagattacgagatttatctctgccttactcaaggtccattagtatcttccagaacaataagttggtcttagaatcctttagctatgtattcccttccaggcttcgatgctgtgtgctgttgttttatttagtttttattttaaacccaacaagacgctataccatcaatacttatttagatccccccacatatttaacttgccatggtgcttcattctttcatgcctctttaagcatccatctaggatcgtgttcattccacatgaagagaaagcttttggcccagcacgatggctcacacctgtaatcccagcactttgggaagcctaggcgggaggatcgcttgagcccaggatttccagaccagcctgggctacgtggcaaaaccctgtctctactgaaaatacaaaaaattagccaggtgtggtggttcacgtccctgctactcgggaggctgaggtgggaggattacttaaacctgggaggttgaggctgcagtgagcgttgattgcaccactgcactccagcgtgggtgacaggagtgagaccatgtctccaaaaaaaaaaaagaaggaaagaaaaagcttttgtatttcctttcgtgtaggtctgctaatgacaaagtctctgggttttttgtttgactagagaaatgttttaattttaaccttattcttgaaggttttgtttttgttttcattttgttttgtgtgctaagtacagaattctcattggcatttatttatttagagacagagtcttgctctgtggcccaggctagagtacagtggcacgatctccgcctcccaggttcaagcgattctcctccctcaacctcctgagtagctggggctacaggcatgcaccactacacctgactaatttttgtatttttagtagagacggggtttcaccgtgttgcccaggctgatctcaaactcctgagctcaagtgatttgcctgccttggcctcccaaagtgctgggattataggcatgagccgccgtgcctggccagcatttattttcttttcagctctttaaggaagtcattccattatctctgggttccattgttgagaagccagctgtcattctaatggttgccctttgaagataacttttttccctctgctattttaaatatttcctccttgtattttattttcaacaggtgtaatgtggcacatatatcagcaattgttatgttacatacaatacatattgtgcaacatatgtatcattatcagttattgctgtgtaacaaactactccagaacacagtggcttataaaaggaatcatttatttagtccttaaatctgcaatttgagcagagctcagtgggaaagcctcagctttactttatatggcaccatataaggtaactcgcaactggcaagttggtgctggctgttggctggtagttcattcagggctcagggcccaggaccaagagtcgtcaccatggcttgcttcagcctccttgaggcatgatggctgggtcccaagagaagagaaatagaaacttccagtctcttaaggcattggtctggaagctgggacggcatcacttttgccatattctgttggtaacgcagttacatcgccagattaaagggtaaagagatacaaattcccactgctcagtgcaaggaatatcagtgattttagggggccctgttttaaaacccctacaaggtgctaagcgtggatttctggggctttcttgttttttgtttttttctatgtgtttttttttttttttttggtggtggggtcagggagggcttatagggtatgttaaatcagcagaataattttatttatttatttggagatggagtttcactcttttgcctaagctggagtgaagtagcgtgatcagagatggagtttcactcttttgcctaagctggagtgaagtagcgtgatctcggctcactgcaacctccgccccgctggttcaagcaattcccctgccttagcctcccaagtagctgggattataggcacccaccgccacgcccggctaatttttatatttttagtagacatggggtttcgccatggctagtctggaattcctgacctcaggtgatccacccaccttggcctcccaaagtggtgggattacaggtatgagccactgtgcctgacctataatgttttttaaaaatcagttttggaaagtttgcagacattaacttttcaaatgtagcttccatttgattctttttctactctgcctctgatcctccacttatgtatgtatgctagatcttttattagatagtctgtgtctcttatgtactctactatattttgtattcttctgtctctccatgctttattctgtttactctttcctgattatattttttaattttgtaatttccatttgatgcttttttgatcattcaaaactcttcaccaaaattctaaatttccttttttaacctctcgaatgttatcacagttactttaaagtctattttggataacttaaatatttacagtcccctcacagatatgtttcttttgtatattgtttctgttggttttctttcatgtcttatctccacatatgcctggtgagttttgattatgtgttggtcattgtatttgcaagtatgctcgtagaaataatctggaatggccgggcgcagtggctcatgcctgtaatcccagcactttgggaggctgaggcaggtggatcacgagatcaggagatcaagaccatcctggctaacatggtgaaaccccatctctactaaaaatacaaaaaattagctgagcatggtggcacgttcctgtaatccctgctactcgggaggctgaggcaggagaatcacttgaaccaggaggcagaggttgcagtgagccgagatcacgccactgcactccagcctgggtgacagagcgagactccgtctcaaaaaaaaaaaaaaaaaaaaaaaaagaaataatctagagcctagtttgatgtttccttacaaagaatgaatttatttttgcttctcccattgcaactaggataacctcagtctagtttctggaactgaaatcacttgaggctgaactgtggtctctgtgagagcgtgtctgtgtatggctcacccttattcctaggctacgtagttctttaggaccctaacccaaagtaagagatgttcatcagggctctcctcttggcagacgcctgggctccagtccctgtgtcctgagccccatgaggctgttactggtgctgctcgtctgcccatcctctccagtaacagccacctgaacactgcaattcctgggtttccatcattccttccagcctggtgagtcatcagtgtcttttgaggtatccagtgcctgccagcagatgttttttaataatttgtccagcatttctggctgtcctcagtaggtggtctgtttcacattccctagtctgctgttaatggaaagtggaagttctgagagagaatcatcgttcccgtcagcattcaaatgcctgattacactttccccattcgctatcctttcctttatttgctcctcaccacagcaaaactcctcaaaaatatctatctttgcaatcttcagattctcacattgtgtccttaaacccactttaatcaggccttggttccctccattccactaaaagtaatgttgtcaaggtcgtgcatgcctccgtgatgctaattccagtgatgagttttcagttgtcattctctgacatatcggcaacacttgatgtggagtaccctgatgttgagaggctggtgagatgaaggaaaaacccagccaagggcaatgaggaatggcttccttccgcctcctccttccctatctttgttgtggtttttgttgtttctgtaacactgattacgttatagtttatttaatgtacttccttattctatgtttttactttagtcattttgttgatctcctccataataacataggctcgggccaagcacagtggctcacgcctgtaatcccagcactttgggagaccaagatgggtggatcacttgaggtgaggagttcgagaccagcctggccaacatggcgaaaccctgtgcctactaaaaatacaaaaattagctgggcgtggtagcaagcgcctgtaatcccagctactagggaggctgaagcaggagaattgcaggagaatcacttgaacccagggggcagaggttgcagtgagctgagatcgcgccactgcactccagcctgggtaacagagtgagactctgtctcaaaaaaaaaaaaaaaaaaaaggcttcaggagggcagagcattttatgcaattgttcattaattgacccctccatttggcacagatcacatgcccagtagttaactgttaatcaacgcactctctgtggaacaacaggctggtcccgttgagccaacactctctgggcactgccttcactagactctggctggctgctgcgcttgtagaggtatgcaagacaaaaccttttggtatgttaaaagccctggtcagaactttaagtaaccatcactgacatataatggttatggttttgaaagtgcttttatagtggtttttcatctgtcctcacagcacctctgggaggtaggtaggacaggtacagttagtctcatgtttcaaatggggctcagagagggaaaaggatttcccaagatcacacagcaccttagtagcaaaacttggactcaacctcaacacttaaaaatgaacaaagctggccgggcgcagtggctcatgcctgtaatcctagcactttgggaggcccaggcaggcaggtcacctgaggccaggagtttaagatcagcctggccaacatgacaaaactctgtctcttctaaaaatacaaaaaattagccgggcatggtggcgggtgcctgtaatcccagctactcaggaggctgaggcaggagaatcacttgaacctgggagatggaggctgcagtgagccgagatcgtgccattgtactccagcctgggcaacaagaatgaaactccatctcaaaaaaaaaaaaaagaaaagaaaagaaaaagaaaagtttccctttttttaaatatctcattttaatgactgcataatagtttattacatagttataccataatttatataatattttgttgctgtacatttaggttaaacaatacttacttagttcctactatgaagaggggccaagtactcgaggctggagctctcacatgtggcaatgaaattagaaagtggatatggcagggctgtggtaaaataaaatataaaaataataaatgatattaccaaagaaaaggaaagtttttcaaaataaaggaaaatctagacaagcatagtggctcacacctgtaatcccagtacttttggaggctgaggcaggaggaacacttgaggccaggagttcaagaccagcctgggcaacatagcaagaccccctgtcaacaaaaataaaaaaaaattaggccaggcacagtggctcacggtggctagtgcctgaaatcctagcactttgagaggctgaggggggtggattgcctgagctcaggagttcgagaccagcctgggcaacatggccaaaccccatctctactaaaaacacaaaaaattagccaggtgtggcagcacacgcctttaatcccagctactctggagactgaggtaggagaattgcttgaacccgggaggtgaaggtcgcagtgaggtgagattacaacactgcactccagcctgggtgacaaaatgagactctatctcaaaaaaaaaaaaaattagctgggcatggtggtgcatgcctgtaatcccagctactcaggaactaaggtaggaggatcccttcagcccaggaattcgaagatgcagtgagtcatgatcacaccaccgcaccccagcctgggttacagagcaagaccttgtctctaaaaaacaaagaaagtctaacctaaacgccattatgtcatttacatgtgtataggggtgtgtgtgtgtgtgtgtgtgtgtgtgtgtgtgtgtgtgtgtgtgtgtgtttgcttgggaggggagtcgggctggagctggccaggccgcagcctggggaccttctgattccagcagggatgtgggccgagggtcccgccttactcatttcgggtcttgctcctctgtcctggctctacagactcttccagctggagttggaggctgacgccctagtgaatttccatcagtattcttcccagctgctacccttctatgagagctcccctcaggtcctgcacactgaggtcctgcagcacctgaccgacctcatccgtaaccaccccagctggtcagtggcccacctggctgtggagctagggatccgcgagtgcttccatcacagccgtatcatcaggtgagcaagggaacaagaccatttggacaacgtgtgtgtacctgcttgtgtgggcagtgggggccgcaggcctcggttcccctccatagtttgacttaaaaaggagcagggcctggcatggtcgctcactaacgcagtcccagcactttgggaggctgaggagggaggatcacttgagactaggagttcaagaccagcctggcaaaatagcaagaccttgtctctacgaaaaaattaaaaaattagcatgtgtctatactcctagctacttgggatgctgaggcaggaggattgcttgagcccaggagttagagtttacagtgagctatgattgcaccactgcacttcagcctgggtgacagaatgagaccttgtctctaggaaaaaaaaaaaaaaaaaaaaaaaggtgctgcgttgctaccagattaaaatgtaagaaggacaatgtaatgtttccagagtccggagtgctcaccaggtgccaggtctgtgggagctgatttctacccaccatgaaattgaattttcccaacccccacaaggtatcgtcattttattttactttattttattttattttattttattttattttattttattttatgttacgttatgttattttattttgagacggagtcttattctgtcacccaggctggagtgcagtggcgcgatcttggctcactgcaccctctgcctcctgggttcaggtgattctcctgcctcagcctccggaatagctgggattacagtaatgtgccatcatgcccgggtaattttttttttttttttttttttttttgagacggagtctcgctctgtcgcccaggctggagtgcagtggcgcgatctcggctcactgcaagctccgcctcccgggttcacgccattctcctgcctcagcctcccgcgtagctgggactacaggcgcccgccaccacgcccggctaatttttttgtgttttttagtagagacggggtttcaccatgttggccaggttggtctcgaactcctaacctcaggtgatctgccctccttggcctcccaaagtgccgggattacaggcgtgagccaccatgcccggcccaggtatcatcattctagagagagctaacaggacttgtgcaggtcactcagccagagagggtgaaagaggggcttggatccttggtgtctgcccaggctgctcttctggaagctgaaggcctccttttgtgaatccattcagccagcagatggagcagctgttgcccctggtgagggcactgtccccacccttgcacagggcaccagttggccatcttgtgcagaggtagccacacctcctctgagtctctatcctagatagctcagttaagctcccaggcccagaactcaaaacctcactgctggccgggcgtggtggctcacacctgtaatcccagcactttgtgaggccgaggcgggtgtatcacttgaggtcaggagtttgagaccagcctggccaacgtggtgaaaccccgtctctactaaaaatacaaaaaattagcaaggcgtggtggcgcacgcctgtaatcccagctactcgggaggctgaggcaggagaattgcttgaacccagaggcggaggttgcagtgagccgagattgtgtcactgcattacagcctgggcaacaagagtgaaactccacctcaaaaaaacaaaacaaaacaaaaaccctcactgcactttagtttccaggcgtgcttttggacagcactgtctcatctcaccatcactctgtccatttcctggggcaggcacagcagcttgtgtcgataaggatattgacgcccagaaaggttaagtgaattgcctgaggctagtgagatatccgtgttctgtgaccctttcctgtgccaccaccctgcccacttcctgctggtgtggccctggggcccatctcttgtacgagtgagcaaactgaacagaaacctgatacaggtcacatcagatataattacattcaaatcagcccaactagctgagtggcgggaatgctcttgagctcaaataaaccagaaagtccgagtttccgagtgcacttccctgcatgtgcacttaggtccccctgccaccttgtaccacacctgctcacctctgctcaccctggccctctcctgcagctgtgccaattgcgcggagaacgaggagggctgcacacccctgcacctggcctgccgcaagggtgatggggagatcctggtggagctggtgcagtactgccacactcagatggatgtcaccgactacaagggagagaccgtcttccattatgctgtccagggtgacaattctcaggtgctgcaggtgagcagggggaggggcagggtgactggtactgatacctcccggtgtccacggttccctttgggcccctaggctcaggtgtcactctcaggcctctcactgtcccccattggtccttgaggcctgagctccttcatggagggtgcagacccctccctggctcttccctcccagcccttttccaggagccacgtcctcagtctctttgcttgataaacctggggacggcctccaacccagcaaaataaaccccaaaaaaggcccagctccagtcagttagttcagttccacttttcctgagcacaaactgtgagccagatgcctgcctggaggggctcgtgggccagcgggacctgggcttaaccttttgcaagcttgtccaatctgtggccctgcaggctgcatgcagcccaggacggctttgaatgtggcccaacacaaattcacaaactttcttaaaacattatgagatccatgcatggaccttttttttagatcagctgttgttagcgttcatgtattttatgtgtgacccaagacaattcttctgatgtggcccagggaggccaaaatattggacaaccctattttacaggaattcaaaccaagcaaaccaaactgtctccagttcctgtaggcatttgtgccagaggccctcctgttaacgtttttgattacctgggcaaaagatgtgattttttaattgtgggcaagcagatggggtgatactattaaatagctatttcatatattagattgaacagaaaaggcaggatgttggattatgttttattgtctagaattagaaaattcttctaaagatcatgttctctctgccttggcatcagaatgcaactacgttataccagaaaatgtggattcctttttttttttttttttttttttttttgagacagagtttccctatgtctcccaggctagagtgcagtggtgcgatctcggctcactgcaacctccacctcctgggttgaagtgatgctcgtgcctcagcttcctgagtagctgggattacaggcatgtgccaccatgcctgggtagtttccgtatttttagtagggatggggttttgccatgttgcccaggctggtctccaactcctggccttaagtgatccacctgcctcagcctcccaaaatgccgggattacaggtgtgagccactgtgcccggcccagaaaatgtggattcatatcttatgcttcttgctctcagggaagggaattctccacccactgttgaactccactttcaccgagaatcctctgcgcacccagcatggtgccgcgcagaccctgcctccatgcgggggtgtgcacacccgcttctcgatagtcatgcacgactgcagctgtcctttatccggtgctgattggtgcctgaccttgaactgagtgttgtatgtgttccagttaattcttagaatacactcatggggtggaggtcattattcccctttcctctccgaagaaactgaggttcagtgttgttaattaagaagcgtgcccagggagggccacaaagctgagagagtggggcttgaccttacattggcctcgatgccagccctttgctcttcctgctgtgtctctggcctgccttcaggtccagtgggactgctgtgaggtgaccctggtgtcacatgggtacactgtggttgtaatgaacctcatggggacagcactgagccaaaagtgagacagtaaaaccctcctagcactttcttttttttgagacagcatctagctctgtcgcccaggctggagtgcagtggtgtgattgtggctcactgcagcctcaacctcctggactcaggtgatcctcccacctcagcctcctgagcagctgggactacaggctcgtgccaccacatgggctaattttttttttttttgagacggagtcttgctctgtcgcccaggctggagtgcagtggcgcgatcttggctcactgcaagctctgcctcccgggttcatgccatcctcctgcctcagcctccagagtagctgggactacaggcgcccgccaccacacccggctaattttttttgtatttttagtagagacagggtttcaccgtgttcgccaggatggtcttggtctcctgaccttgtgatccgcctgcctcggcctcccaaagtgctgggattacaggcgtgagccaccacacccaggccacgccagctaatttttaaaatttttttggtaaagatggggtctccctatgttgccgaggctggtatcacactcttggtctcaagtgatcctctcacctcccagtgtgttggaattacaagcatgagccactgcgcctggcccctggctctctttttaatactgctgttctttcattgaaaacatagtacctgcatgtagaaaaaaatcagtcaggacagaatgaaaagcaagaatcattcccacctggacccccagtgcccatcctgagatacagctaccttttaagttccttgactcagaaatgtttcatgtgagccacagtcatgccaggtcgaccccttccctcccatccacactggcacttggctttcctggtgcttctctttacgttctttttttttagacagagtttttgctctattgcccaggctagagtgcaatgatgcaatctcagctcactgcaacctctgcctcctgggttcaagcgattctctttcctcaggttcctgagtagctgggattacaggtgcctgccaccatgcccggctaatttttgtatcgttagaagagacgacatttcaccatgttggccaggctggtctcaaactcttgacctcaggtgatccacccaccttggcctcccaaagtgctaggattacaggcatgagccactgcgcccggcctctttacgttcttatcagcatcctatggagtcaaacttcccttcctctttcatcagctccttggaaggaacgcagtggctggcctgaaccaggtgaataaccaagggctgaccccgctgcacctggcctgccagctggggaagcaggagatggtccgcgtgctgctgctgtgcaatgctcggtgcaacatcatgggccccaacggctaccccatccactcggccatgaagttctctcagaaggggtaagacctcctcccctccccatctgctggcctgctgggctccagctctcctgtcacctgtcccgtgcctgaggcaagcagtatccaccatagatcttagcatctccagcctcagagcagaggccccgggttcacaagcctcattaggccccgcctggcccaaagaaggtgctccatcattgtatcatgggtaggaatctcggttcacaagttcagctgtgcaaggaggagactttaaaatttttctggctgggcgcggtgtctcacgcctgtaatcccaacactttgggaggctgaggtgggcagatcacctgaggtcgggagttcgagaccagcctgaccaacatgaagaaaccccatctctactaaaaaatacaaaattagctgggcgtggtgacacatgcctgtaatcccagctacttggaaggctgaggcaggagaatcggttgaacccgggaggcggaggttgcagtgagccgagatcgcaccgttgcactccagcctgggcaataagagcgaaactgtctcaaaaaataaataaataaataaataaataaataaataaaaataaatttatttaatgtaccttaattcctaggagtgaatctccctctataaaactggagacaaccaatcttagccctctttggggtctcctctttccagctcccctccaggtggtgctccagttctggagtctgatgcaaccccaaggcccacctggcccctcctctaacccagcccagcctgatctgaacagccccccgatggcttcagtgctccttggtttcttgtgtgcccagctcaaagcctgggaaatgcttggtaaggtggccgagtgcccgtccacctagatgcctctttcctttctggctggtggcacgttgggaggcaggtacaggctcatgttttgggagcctgggaacccctggtgtcaggaaaattgtcttcaaaggggtaggggatgagataaaaagataaatgaatatctcaaatctcaaaatactatctaggccaggcgcggtggctcacacctgtaatcccagcagtttgggaggccaaggtgggtggatcacctgaagtcaggagttcgagaccagcctgaccaatatggtgaaaccctgtctctactaaaaatacaaaaattagccaggtgtggtggtgtgtgcctgtagtcccagctactcaggaggctgagacaggagaattgtttgaaactgggaggcagaggttgcagtgatttgagattgtgccacagcactccagccagggcgacagaacaagactccatctcaagaaaaaaaatactatctaacaggaacaacatctagaatgaatgaatgagccaatgagtccttcgatcctggcactgtgctaaagcaccagcctcaccgaaatgaataagccactccaggacaggagacaccccagccacccagaatctcatagcgcagtgccagacaagcagtgagaaggcatggacgggcagcactcaggcagggaggctggcacttgtgcctgtcctcaggttgttccttcctctgggagctgcatccaccttgctagccccatggggcattgctagcccttctaagggctggaccaagcctggacaaaccctcctttccttgaatctcccaagcacagccagaatgagctagagctttcagaaatacttgaccaaacagagaagataccaacacccccagccccgcagtcaggttccccatttgcaggttgtgacctgagtggacaccaggtgatgctcttctctacccagagggctggcacatggccccactcttgcttgtctccagccaccctgagctgtactgggcaggagctgtaattgaccagttttctctctcttcaaacaacctcagccctcaccggtccctctgtccccacacaggccatcctgggtgggtccagcgtcccatcacataagaggatctttgcacagaagacaaaggaagaggctcctaccttgagtggagcagggagatcccttatcgacttggcagccagcacagccctactccaagaatcccacggcctcagtgttactgacaagtggttccctcacagctcagactaggagctccctcgctgtttttctttttcttttcttttctttgttttgtttttgagacagagtttcactctgtcacccaggctggagtgcaatggcatgatcttggctcactgcaacctctgcctcccaggttcaactgattctcctgcctcagcctcccaaggagctgggattacaggtgtgcgccactatgcccagctaatttttgtatttttagtagagatggggtttcatcatgttgaccaggctagtcttgaactcctgacctcaggtgatctacttgcctcgccctcccaacatgctgggattacaggcgtgagccaccgcgcctggccacctctgctgtttttcaatgcagctgacctttcccacaaagctcggtttgtgcctgcggttctcagatggttaagcccctgctgaggaagggaaacagataatcccagacagtgagatggaggctgagactgaggatgcctgggggctgcactaggagctcagagacggcatcaggcagctggagttcagggaaggtttgggggcagcagagcccgagccaagccatggacactagccggagctggccactcgggtgaagacttggggggctccagagggcccagggaaagaagctgggcctgactccatgtgcctagtgctgagcaccaagcgctggcataagggctgtagggagctgggcagcataaatcctgggcctgtgctgggcacccctaataatagagaacagcagctgaacactaacgctgtcccagccaccggcttagccttcatgtgggctatttcactatagcccagagagctgatgtattttattccccctctaaagctgagggccaagtgtggtggctcatgcctctaatcccagcactttgggaggctgaggcaggaggatcgcttgagcctaggagtttgaggctacagtgagctatgatcatgccattgccctccagcctgggtgacaaagggaaatcctgtctcaaacaaacaaacaaaaaacagatgaggaaaccagggcttagagagattaagtaatttgctcaaagtcaggcagtcagtaagtgccagacctgggaattaaacccatgtgggctgtcctagtaattgcactaaaaaaaaaaaaaaaaaaaagctttattgagatatagttcctattccatacaatccacctattgaaagtatacaatgattctgatatattatgtttattttttccaactgtgatagattatatataacataaaatttgccattttaaccacttttgttttttgtttttgagacagagtttcgctctcgttgctcaggctggagtgcaatggtgtgatctcggcttaccgttacctccacctcccgggttcaagtgattctcctgcctcagcctcccgagtagtagctgggattacaggcatgcaccaccatgcccagttaattttgtattttttagtagagacagggtttctccatgttggtcaggctggtctcgaactcccgacctcaggtgatccacccaccttggcctcccaaagtgctgggattacaggcgtgagccaccacacccggcccattttaaccacttttaagtgtacaattcggtggttttaatcacatttacaatgttgtccaaccattacccctttctaaaacttttcttatcacctcaaacagaaactgtaaccattaataactcccgattctcccctccccacagcccccgataagtcccatatcctctctgtctctcagaacttgcctgttctagaacctcgtatcagtgaaatcatacagcgtttgtccttttgtgcctggcttatttcacttagcatgatgtcttcaaggctcatccatgttgcagcacgtatcagaatttcctttctttttaaggcagaatactattttgtttatccattcagtccttcactgatagacgcctgggttgtttccaccttttgtctgttgtgaagaatgctgctgtgtacatgggtctgcaaatgtccattcaagtccctgcattccgtcctttgatacttccgacctcaggtgatccgcctgcctcagcctcccaaagtgttgggattacaggcgtgagacaccgcgcccagccagaaaaattttaaagtcttctccttgcacagctgaacttgtgaaccgagattcctacccatgatacaatgatggagcactttctttgggccaggcggggcctaatgaggcttgtgaacccggggcctctgctctgaggctggagatgctaagatctctggtggacactgcttgcctcaggcaccgagtagaaagcaattgtgctctttcccactctgtcatactgcttcctatagcatgcaggtcactgtgtgactcactgacagtgtggtaaggaggtggagggtggctgtgtgccaggcacagaactgggctctgaaatgcctggtcttccttacaccccagccactcctctcagcactctctccatgttgctcagcttctggaggccaccagtgaggaagctggggcttgacttcaagcccatctgactctaaagccagtaccagggagggtgatcattgctggtggcagcatcaggaaggcttcctggaggagggggttagttgtgccttgaggggctcagtacagccttaaccatggtgagtgtgctggttgggtttgctgaactttgtttgcagtgatgctctctgtaagcagtagatgaagctccaagtcctggcttcatcccacgccacgcagaccctagcttctgctcaccaaccggggcccctctctcaccaggtgtgcggagatgatcatcagcatggacagcagccagatccacagcaaagacccccgttacggagccagccccctccactgggccaagaacgcagaggtgagtggatcctgaggtgggtgggtggggcagggggccgggccccgcaggtcctcagggccctcaggaagcaggttcccgagaggaccctgaggctagcacttgggggctgaccttgcagtgggtgtgcaggcagagaagtccatgaagagctgggatcctggcagggctctgctgctctctggctgggcggggggatccgccctgtgcctcagtttcctcatccatgaattctgctttggcgatgtgatgaagtcagcaaggcagtgtgtgacaaaactcggcacaaattgtaaagtgcttcccaaatagaaggtggcgtgatgatgattgtattattagtcaggattctctagagggccagaactaacaggagatatatatatagagagagaggggggtttatttttttattttattttttttgagacggagtctcgctctgtcgcccaggctggagtgcagtggcacaatcttggctcactgcaagctctgcctcccaggttcatgccattctcctgcctcagcctcctgagtagctgggactacaggcgcccgccaccacacccggctaatttttttgtatttttagtagagacgaggtttcaccgtgttagccaggatggtctcgatctcctgacctcgtgatctgcctgccttggcctcccaaagtgctgggattataggcgtgagccaccgtgcctggcctaaagggggatttattaaggagcattaactcacacgatcacaaggtcccacaataggccatcgcaagctgaggagcaaggaagccagtccaagtcccagagctgaaggacttggagtctgatgtttgagggcaggaagcatccagcacgggagaaagatgtaggctgggaggctaagccagtctagccttttcacatttttttctgcctgctttatattctggccgtgctggcagctgattagatggtgcccacccagattaagggtaggtctgccttcccctactgactcaaatgttaatctccgttagcagcaccctctcagacacacccagggtcaatactttacatccttcaatccaatcaagttgacactcattattaaccatcaagatgatgatgatgatgatggatgatgatggtggtggtggtggtgctgggcctagctgcacacacagggagcctggctgggcatctcctctgagttcttcccctaagctaagctctgtcctcctgggaggatggaggcctctggtctcatcaccaggaagcacagcttgacagagaatgggatgccccagagttcatggcctacttctcaatgtgatgggccaggagggagggcactgccagcctcagggtacctctgcattccaggagccggacaccgagtcaggcccttccgtgtaggtttggtcactcattgtcatcacatgctgtgaggtggggacttgcattcccatcttcacagaagccctgaagtgcacatggctacagtgacccatccaagcgcaggcagctgggatgagtgaagctgggctttgggctcaggtctgtgactccaaagccaggctcccctccctgttcccaaggctctgccagggatgtgcattgccaaggcccagtgagaggtgatacctttgcagggttccagggagggatgcagggagcggggtgcttcaggacaggccccagaggagcctttgcaaggagagtgggttctgttggcactaggaaaggaccagaagcctcttaaaacagtcagcacatctttggctttttgtccctagtcttgggatgctgatgggatgggaggcagtctaggcccccctagaactggggcctgcccctggaatcctcttgctagcgctttccaacatcccagtacctgtaggcctctcagagcagaagtggcagtgcccacgtgtcccggggtgcggcagctccccgagtgcctgtgctaactcagcctgaccgtctcccgcagatggcccgcatgctgctgaaacggggctgcaacgtgaacagcaccagctccgcggggaacacggccctgcacgtggcggtgatgcgcaaccgcttcgactgtgccatagtgctgctgacccacggggccaacgcggatgcccgcggagagcacggcaacaccccgctgcacctggccatgtcggtgagcccaggaccgcgtgtcctgccctgtggggccccggtgggaatgcaggagggctgtccggactggagccctcctccccactgtctccctcctatcgtcagctgctccaaatcatcttcccacccaaagctcagttcagaccctgactcctccctcaggaagccttccaagtccccctctcagcccaaaataacaccacctcctgtgtgctgtggtaccttttccacctgtgcccccatttggcacttgcatggcacgagagggaaaaatgacagctctggccatagactggccctgagcaagccatgtcacctgtcagcctcgatttcctcatctggaaaatggtggtgtcaatacttatctggaagagttgtggaaaagttatggtggacacttggtcaccctctacagaatgtctaagtgacacacgcagtacctggcccgagtgagcatcctgcttcccttcactggtccgcgtgttgctctcatcttccctgggaggctgtaagatcctggcaggcaaagcctgagtgtgcagcccagcagcctgtggcaggtgccaggcatattcgttggtttattatagaacacagttcctgccctcaaagcccttactgtctggttacacatctagagtatgaacatattaaacctagcagaggaggacgttactgtgttacagacatatgtgtgtgcatgtattcttttttttcgagatggagtctcgcactgtcgcccaggctggagtgcagtggcgcgatctcggctcaccacaacctccgcctcccaggttcaagcgattctcctgcctcagcctcccaagtagctgggactgcaggcacgtgccaccatgcccagctaatttttgtatttttagtagagacggggtttcaccacgttggccaggctggtctcgaactcctgtgttggccaggctggtctcaaactcctgacctcatgatccacccgccttggcaccccaaagtgctgggattacaggcgtgagccaccgcgccccaccgtgtgcacgttttctatagcaataccgtatgtacagaagtctgtttactgagtctcagtgacagaacatgagagacccccgggactctaaaagctgattcaggacacattcagagacatcctgttttataccaaaggtcaaaacttggaagagatgttgttgcccaaaaggctgaaactataaatagtttcatttttgaaactgtggacatttttagcactgggtgggcccttggaatgatctaactcagcagttctcaagttttttggcctatttgatccctttatactctgaaaaattattgaggatcacaaagattttttaatcatctggattttctttatctatatttaccattttagaaatttaaagtgtgaaaatttcaaaatattaattcatttaaaaataacaataataaatatatatgcctactatgtacccacaaaaattaaaattaaaaattttttaaaaaacttaaaaaataactggccagctgcagtggctcgtgtacaccagcactttgggaggccaagatggtcagatcacctgaggccaggagttcgagaccagcctggccaacatggcgaaagcccatctctactaaaaatgcaaaattagctgggtgtgagacctctgaaagggtatcacgtgttcacaggggtccccaggtcttactttaagaactgctgatagactttggtcatcttcatcccatcttcacagtttttggcatattcatcaaccacctttacaattatgtacttaatcacctcttcaaattggcttacttttatttatttattttgagacagagtttcgcttttgttgcccaggctggagtgcaatggcacgatcttggctcaccgcaacctctgcctcctgggttcaagcgattctcctgcctcagcttcccgagtagctgggattacgttcatgcgccaccacacctggctaattttgtatttttagtagagacggggtttctccatgttggtcaggctggtcttgaactcctgacctcaggtgttccacctgcctcagcctcccaaactgctgggattacaagcgtgagccaccgtgcccggcctggcttacttttaaactgacttaaatttattttgagagaaatgttgcatcactaccataaatggccatccatccatccagtgccaaccataaaaggtaaccaatgcagggcgcggtggctcacgcctgtaatcccagcattttgggaggccgaggtgggcgaatcacgaggtcaggagttcaagaccagcctggccaacatggtgaaaccctgtctctactaaaaatacaaaaaattagctgggcgtagtggtgggcacctgtaataccagctactctggaggctgaggcaggagaattgcttgaactcggtaggtagaggttgcagtgagctgagatcacgccactgcactccagcctgggtgacagagtgagactccgtctcaaaaaaaacaaaacaaaacagtaacaacaacaaaaaatcacagttaatgctgaaaacacacacatatctgtagccatagaagtcctaatagaatgtgaagaactgtttggaaaaccccattctagacccacagcttcattctctaggcagggaaatcgggtcccaagaagaggaaggtgacaaggccagagcccacagttccaggtggccagtgtgtcctctgaaaccatgccatgctctgcgcccctgcccggcctccaggtgtggaaatgtgtgacgttcttcgtggggacactcccccgaaggctgccattaggggcacgtgtgttcggttacccctcagggatgacaccctggactgggtgggcaagatggccttccctgccctcacccaccctctccttgctactcctgaaagccatcagcagctgacctactgtgtccccatggctcctgggtcggggtcacagatgcactgcatctttggaggcggagctggcagagcaggggcgagtcacttctagtttctgcctgggttcttacaccctcccctgtgggtgcttttaagcctgtttgtcaggtccccagccatcaaatggcagactttggactaccagattgacttgggtgggggtgaggagggttccagtgtctccccgtgctgaggagaggcccgctgggtgagttgacaggttggggctggcagccaggggcccctttgttcttcacttccccggcagttgcacgtcttatcctctctccatctccaacagaaagacaacgtggagatgatcaaggccctcatcgtgttcggagcagaagtggacaccccgaatgactttggggagactcctacattcctagcctccaaaatcggcagacgtatgtgctctgcactctggggctggagtggggtgagggttgggtggatacagggaccgaggaggagggaagtcccaggcatcaggtgccagcatcctgtgctgacccgccctgctcagagctgccaggagcacctcgtactcagagagggggcttccttacccaagcacaagggccctgagcagtagatgcaggcccaccacggggcttgctataccagcatcctctcccgtgcagcgccccccacctcagggagctaagattcccagcaggggtggggacaggagagccagcagcagccttctttccccaccgttggggaattcactgatggaaccactggctagaatgaccaagggtgcatgcactacactgcacgagctctgggcatgcctgtgtgggcagagtgcatggccatgtgctgcacgctcgcacagtgagccttagcttcagagctggacagagcagatcctcctcaccagaggcctggagcccgctctggagggtttcagcagctgtgggggtcactgtgggcaggtacctgatggcagcagtgtgtgtgtgccagtgcacacgtgtgtgtctgcatgcaccgcatctatgacctccttttcagcaatcccatccatcaaatggagtaggtgccccctggctggctcattagtccctttggaaccctgaactatcacttagcatttttgagaatcactgaatgtggccatgggattcctgctttcttggctggagtagaaggaaagaaggggttcccacaggcatcgggcagggtgacactgacctcctcctcccatatcctccttccctggccttaggaagctgcttgggatgtaccagcctgggggcagcactccctgtcagggtgggctgaggcctctggagcagcccacgtgcccagggcctgggagctgggacaggggacggagtgtggaaaggaggggcctctcctttgcatgttgacatcatttctgatcctgtgccatctccccttccccaaaccatgacaagttgtcaccaggaaggcgatcttgactctgctgagaaccgtgggggccgaatactgcttcccacccatccacggggtccccgcggagcagggctctgcagcgccacatcatcccttctccctggaaagagctcagcccccaccgatcagcctaaacaacctaggtaggcctcgcctcccgactccctcttctccagctggttcccaggcccctggatcacagcaggccccaccaaagcaacaggatccctaggacggaagtcactaaaggaagccggggaggatggggccggagttgtcagcctctaggcagccagcaacccacagatcccagaggcctagggtgtccctggctgatgtcccatgctccgttgcccctgagaggatgtgtcctgcacacagtctcaggcctgggcatttccagtggcacccatgaggtggctgctgttactgccctcctgtccccagggcgttcagggtgggcagtgaggagtgctgtcgggggactgggggcccgggccctctggcttcacctgtccctctggcttcacctctatcacactgtttgaatctcggttgggcctgagacctgtgtgcccccttcctggccccgtggtgactttcagacgttgaatgtggccaggcagccagcatctgccccggtgcattccttggtgcccagggagacatccccagactagacaggacccttctctggactttctgtgggctggcccactcagggacctccattgtttgggagcggggtcccctgaacagagggcagccaggagccagtccttggtgagccagacttcactgtggaggcggcagcaccttcagccagggtagcccgaccaagcctggaactctggagaggcaccgtgactgtggcttctagtcctggctccacctctctctcccctcccaggaactccccctccacctcccatctttatctctcaattttgcaggcagtcacccaagccaggccggatggtgggcctggggtgcggcgtcagatgggtaacgccctgggcctggagaggccaccgagcctagccatgcggcattagctctagctctcactccctaatccgtccttcttagctgcgcacacaccacacgccccctcccctgcaccctgtccccggcctctctcagccactcttctgcttcccttgttcactgtggagccgtgtgccctggggagggggagacaccgcttcgcagccctcggttctgctttgctgcttctagactctgcacagtggtggggggctgtcagagttggggtcacgcgggctgctgcaccaggcacctggggactgggctgcttgtcaggaggggcagctagtcagttgggtggacgtcaggcaggccttggacacaaaggaagacatggacagagtggatggtgggcctgatcccggaggccactgggatttccagacctgggatcaggacgagggatgtctcctttcatccatggacttaaaccccgaggaacgtcctgactcagccttttgactaaatgaccttgggtgaattatggaccctcttagagcctcacctgtcaatagggaataagaattcttaggccccaggtggttattgcagcatcggctccgatgcaagaagaagcactttgtctgaagaggacacgcaagggtattcatgccttggggtttcaagaggaagagattgaggggaacctgggagctggctgggcagggtggggagcccttcccagagcagtgggcccccctttccactccagcccatttctctcctgtggcctgtggctcagctttctcctgggacagagtccttcctgtggggaagggacagatgacagggggagtggggggatgagggcgtggccgtgggcgaggcacagcccaggtttgatctagggacctctggggtagcagggcttggggacccacctgaccacagcatgccctgctctgtgcctcacagaactacaggatctcatgcacatctcacgggcccggaagccagcgttcatcctgggctccatgagggacgagaagcggacgtaagtggatcgagatcgggggcagagcggggaacgtgtgcgctttcctgcccctcacccaccccctgttgtgggctcagggctttactctctgcaccctcacagccggcgaagtggctctgctcctagtcttatagttctcagcagagacagaacatggagagcctgtgtcgctcgttcattaatgctgggcggtgcaggctctggagaccagcccagggtgccaggcttcttggacttggtggggctggcgcagtgttctggcctccctccctgatctccttatggctagaagagggggagatgcctgggtcccccctggggagatctcagcagctgcttcccactgctcctactggcttccttaaccacctcccactgcagaatagtggcgtgggctgccttccccagcacctgctgtatacctagtcccattgtaagaggcgggcctgggtgacaggatgcaaagagaagacgcccaggccttgcccttcaggcataatcccgggtgcttgaactcagtgccagctggcacggcaaggtaccaggacaaatgcgtttccagccactgtgctgtcgccacctcccttgattgctgcagttgattcatttattctttattagtctctcatgttcctaatagccttcccagggaggaatttgtaaccttgttttacagatgcagaacctgagcccctgagaggtgaagtgacttgctcaaggtcacacggagtgagtgtcagggtggcaactcacagccgggtcttccgaacccacgtcctttgtgctaccgcaggctctctctgggttctctgtggactctatacctagtgccagccctctgcagggaaagctctcttctcagaatcagaggcagctccactcccagggccaggcagtgatcgtgcagctctgtgggtcctctcacttcgcactcacttccatgctaccctgttgtgtgccctggaggttcccctgccccatcagcattccctcccctgtgccccctgcatgctcttgcacgcgggcacacgcacacacacacgcacacatgcacgcacacacacccacatgcacatgcctgcgggttgcccacatgcatgtgttgcccacatgcaaacacatggacacgcacacacatgcacacatgcaaacacacgtgcatgcacacacatacacatgcgcacacatacacatgcatgcatgcacatggacacccacacacatgcacacacatgtacacacatgcatgtacatacacacacctgtgcaggggctgaggtgaggcagctgcacctgaaggggggacccacatttcccaagggaggaaaagcagattccccagattctggagcctcagaaccctgcctggagcggggctgaggcaagagtcaggagacccctcggtagctccccacttgggccttccaagctacagagccctgcgccctctgggttgatctctgtcgccagccccgcatcttcgggagtttgctttggcctccagcaacagtgtagtctctcccctgccacctctaggcttgctgtggggctgggtacctggtccaggaaaagacccctagaggtgggacccgggcctcctccatttatcagccctcttgggcacctcctgcatccccttgacacacagcgctgcccagagcagaggcggcttctgccctggtggagcttccaggtcagcgcaggagagagtaaaagaaagattgcgaatggaatggaagcagcctccaccaggaagcaggtggagcagcaggcgggctgtgagggagggtctcgatggcatcagggcaggcttctctcagcttcatcaagctgagatgggaagatgagaagatcagaggaaggttccagactgaaccaaccacaaaggcattcccccagggcatggccaatgaggacaggcaggatgtggggagacgtgtcagggcgcgctggagagcatgtgactcaggaggcggcagacctgggtccaggtccagtccgcatccatatgacttggttcccgtcacctaacctctgagctacactccctccgtcactcaaaaatatgcacagagagtaggcgcagtggctcctgcctgtagtcccagctactcgggaggatcacttgagctcagaaggttgaggctgccgtgaactgtgattgcaccaccacacaccagcctgggtgacagagtgagaccctgtctctataaataaataaataaataaataaggctgggcacggtggctcgtgcctgtaatcccagcactttgggaggccgagacaggcggatcacatgaggtcgggagttcaagaccagcctggccaacatggagaaaccccgtctctattaaaaatacaaaattagctgggtgtggtggcgggcacctgtgatcccagctactcgggaggttgaggcaggagaatcgtttgaacccgggaggcagaggttgcggtgagccgagatcgcgttattgcactccagcctgggcaacaagagtgaaactccgtctctaaataaataagcacagggatgtcagggagggtctgcctcagaggcgtttgggacaatgacatgagctaatgctggtagcacccctcccatagcccctggcatgaacctctcccttcctccctgccccctcctcccctgcttcttccaccttgtgtggaggccctgatactctgtcactgcccattcctggcctggctgtagggtccccgcccctccttccccagccttatttaattccaacagactttatcaggcacctgctttggatcaggcctgatactgaccaaaatcaggtgtcccaagttggggagactggccgagatcctgctgggatggcgcctggtcagtgatgctatcccccgaccttcctttccctttctctgttgcactctccagcccctgaaatactagacatttgttcctttactgccctcacccccaccctcgctgtcctgcataggacagaagttcctcgggtccgtctgggtctgtctgccaggacacagctgcaggggacaagggctatgagggtggatgtaaagtactgggctgtggcaggaccctcctctctcccactgctgttcccactgcagccacgaccacctgctgtgcctggatggaggaggagtgaaaggcctcatcatcatccagctcctcatcgccatcgagaaggcctcgggtgtggccaccaaggacctgtttgactgggtggcgggcaccagcactggaggcatcctggccctggccattctgcacagtgagggcggcccctggggatggggccaggcggggctgagacctgtgtcctcaaggggccgagtttgtcttcagggctttgcaaaaagagagtggaggagtagaggagggctataagcactttgaggaggcaggggcggggctgcaggtgctgaggtcccaggctggaaggagaagggctgggcccatgggcttgggtttggggatcccccgccctctggccacagagggtagagctggctgtgtgaaattttggcataggaagcgtttcctatcgactgccttaacccctcctcccctcacccctgcaaagcaggcaccaggggccacacagcctgctgcacataaggaatcccattcccagggtgcacgcagcaggcagtctcaggaatgaggagccactgagcctcaggatgccagagccctcgcctgcacacttcattttactgggaaattttactgggaaattaagttcccaggtggggagggatgacgtgaagtcacatagctcatccatggggtcgctgggctggagcacagtcccctagactcccagcctggcacctcctaggccacagggcactgtgtagtctcctttcactgccgctttgcgaaggcgcctggcttgctggacagatagccgggtggtcagtgttgtgacggctcctctgtggagctgtctgagcttctaggtgctgacaggtggggaggggcactgccagatcagggtcctcagctccccccaaccccctggacattgtcctgggactcaacatgtctgactggtgcccctgcccctgtgctggtcagattccattttctccagagcgcccccacatctggatcctggtcatgcaaagtcttggaggtgcccggggaggactccccaccctagggtgggtatcagggcctgtgggccaggcctgtgttggatgctggggatgcagagctgagccaggcataccccagcctcaggagcagggggctcagccagtccaggaggtgctggggacagagtcccatgggcggaggaggagagtcatctgtcaagttgccgggacgttagtgtccacggcggtttattgactggtatttcatttccttttgatgattctcaccatagccctgcggggtgagcagatggggaaactgagaaccagagaggatcagccagtgaattgggcagtcaggactgggtctccagcagtgtgcccagctctctaccccagcctcagggtcccagcatcccctctctggtcttccacagggtccaagggcgggcacgaggtctgagcaggcagactgggcagagtcctagcttcttctccaaaagggccacgtccttcttcagggaccatttcttccccatccggggtcttgagactcccaggggccatggaggggatttgagaggtctcctggctgatcctccggtgtgggcagatggcctcctttcagctaccctctgcttgtacatccctggccctggggaactcactgcctcacgggggaagtggggcagcttctccttcctggaggtgcagccggccccttggccctgtctgttctgaaggctcaaaggacagggctattccttgttttctgtgacaaacaacgtgggtctagcttttataagcttttactcttgaggggctcttctttaaggaaaataatacaaaatcatgaatacaagatgaagtgcagagccgtggggcttcagtggtttttgagtctctccgttgcccaggctggagtgcagtggtgcatcttggctcactgcaacctccgctcccgggttcaagcgattctcctgcctctcagcctcccgagtagctgggactacaggcgcccgccaccacacctggcgaatttttgtatttttaatagacggggtttcaccatgttgggcaggctggtctcaaactcctgacctcaagtgatccacctgcctcagcctcccaaagtgctgggattacaggcgcgagccaccatgtccagccggaaggaggtttctctctgtctgtctgggaggttgcaaaggaagggcccagaatttgggtttgcttaggcctcggtaaacccgcttcctcctgccacctcctgcgttcaggcgctctgcaggctgttctacgggagccctgcgtgtggccgctgcatctccccgcctctgacccctttgttcctaggtaagtccatggcctacatgcgcggcatgtactttcgcatgaaggatgaggtgttccggggctccaggccctacgagtcggggcccctggaggagttcctgaagcgggagtttggggagcacaccaagatgacggacgtcaggaaacccaagtaagccctggcgcactggggccgtggccgcagctgtgcccactgtggctgttccctggggacagagggctccctgtcctgctgagggagggggaagagcgccccacgcttgaggggagcagagggaacccccttcccagggaggcagagggctggggtgtggctctcacttgggcatgcagacacctgctgagcgcaggaggggcgtggcctggtgggcctggctctgccctgcctggctctgccctgcccggctctgccctgccggctctgccctgcctggctctgccctgcccggccaggggtctggggcttgcctggagagagcctgggccacccttctctgagaccacctgggcagaggctgggtttttgctgcccaggcaaaaggaacccactggcctttcaaatgacacggctaaacattttctcacatttcagacagcactcgctcccaggatcggactactaggttataatcagagggcttcagtcttacctttaatttaaggcctacaagacttgaactaatttaagtcagactgaaggagaaagtcacatttccaggaaacatttgtttgggaagcccaaatcctaggactaagcaatgcatcccgttcggggctggatgaatggtgtgttccaagaggagtgttttgagcatttctgagtgattttttcatattttgaaagtgagtgtcccccagtcttaggggcccggcatcccctctgcggtcttccctagggtccaaggccagggaccttcaatcttttttcccactctgtggcttgtctttctgctctgtggtgtttctaggtttttgttttttgttttttgttttggttttggttttggtggcccatgttcttaatgaggtagataatatttataaatatttttcttcttgtagtttgtgattttttcctttctttctttcttttttttgaaacagggtcttgctgtggggcccatgctggagtatattgctgtgaacacggcttactgcagcctcgacctcctgggttcaagcagtcctcccatctcagccgcctgagtgcctgggactactagcatgtgccaacacatgtattttttgtagagatggggtttcaccatgttgtccaggctagtcttgaactcctgagctgaggcgatcctcccgccttggtttcccattacaggcatcagccaccatgcccagcctagtttgtgctttttatttctcgttcataaacccctttgctgcccccaagcagcacacgattctcctgtgtcgagctggaaagctctctagatctgccttttacattgaggtcttttatcaacctggaattgatttttgtatgagggtgaaatccaagatccaatttaatgttttccacgtgattggccaatttttcccagccccatctgtgaagtctgtccttccctccgcttcctcagcagtgggtcaagcatccctctgctcttggatctgctccaggctgtgttttgttccactggttggaaagctgtctctgtgcccggaccacagagcataaaaaactaccgctgtgtggtgagtcctggtgtctgggtggcagatcctccaccttggccttcttcaaaaacatcatggctattcttgggggcagtagagagaagtggatacaagcatagaccctgaagtttctacctcttctcaaaaataggaatatgccaggcatggtggctcaagcctgtaatcccagctctttgggaggctgaggcaggaggatcacttgaggccaggaggtcgagaccagcctgggcaacatagtgagaccctcatctctacaaaaaatttaaaactaacaattagctgggcatggtggcactatggctgtagtcccagctaattgagaggctgaggtgggaggatcacttgagccccggaggctgaggctacagtgggctgtgatcccatcactgcactccagcctgggcaatagagtgagaccctgtcttaagacaaaaaaaaaaaaacaaaaacaaacaaactcacaaactataaaaagaaaaaatatttataaattctactccattaagaacatgggtccatccaaataaataaataaaacaaaaacaccataaagggagtaaaaagacaagccacagagtgggagaaaagatttcgaatccatacatccatcaaaggactcattttcaaaatatgaaaagatcattcagaaatgctcaaaatagtaaccaccattttactttctcttcctatgagtttaactgctccaggtactgttaagtaaaatttttaggggataattgatttggaccaggattctgtaccaggcccaacagaagaaacgaatatggagtcattcatgccaagtgaacctagttagcttaggcgtatacccatgtaacaaatagctgagttctggttagctacaacagctaagctttaatcaatcatagatggccacctgattcaaacaaggcaaaccaattaagctccacacctcactttggttttcagcccatcaacactgcctgaccacgttgcaggccagagttctttgaacctattctggttttgtggcctgcctgactctcagttcatcaataaaagccaattaacatctttaaatttgttgcaattttatctttgaccgtaccttatgtaagtggaatcatacagtatttgtctttttgtgactggcttatttctttctttttttttttttttgagatggagtcttgctctatcacccaggctggagtgcagtggcgcgatctcggctcactgcaatttctgcttcccaggttcaagtgattctcctgcctcagcctccggagtagctgggattataggcgtgcaccaccatgcccggctaattttttgtattttagtagagacagggtttcaccatgttggccaggccagtctcaaactcctaacctcgtgatccacccacctcggcctcccaaagtgctgggattacaggggtgagccaccgtgcccggccatgactggcttatttcacttggcatccatgttgtagcgtgtgtcagaatttccttcctttttaaggctgaaaaactccattgtctgttggatacacgttttgcttctccattcatccattgatggatattttagttgtaaattgactgctgtcaatgtcggatgtgcaaatacctgtttgaggcctactctctcttactggtgccttctctagagagaattctgatgggttcagtttgatcatattttgtttaagatttttggccaggcgcagtggctcacgcttgtaatcccagcactttgggaggccgaggtgggcggatcatgaggtcaggagatcaagaccacagtgaaaccccatctctactaaaaatacaaaaaattagccgggcgtggtggcgggcgcctgtagtcccagctactcagagaggctgaggcaggagaatggcgtgaacccgggaggcagatcttgcagtgagccgagattgcgccactgtactacagcctgggcaacagagtgagactccgtctcaaaaaaaagatttttgtgtccacgctcgtgggcgaacttgacccgttttttcctattttgggttttgaggaaatatttcctctttttatttttcttggaagagttagtataatagtttattttgaatttatggtagaacttgatagtaaattcttctaggcctggagtttgcttggtgggaggatttttgatgatggaattaatttctatagtggttgtgagactgaccactcggggtttctaaatacctttttgagttagttttggttaagtgaggtttttctaggaatgtgtccatttcatctaaatctttaagcttattggcttagagttgttcaaaatattctgtttttttttttttttttttttttttgagacggagtttcactcttatcgcccaggctggagtgcaatgacgtgatctcggctcactgcaacctctgcctcctgggttcaagcaattctcttgcttcagcctcccaagtagctgggattacaggcatgcgcaaccacacctaatttttgtattattagtagagacggggtttccccatgttggccaggctggtctcgaactcctgacctcaggtgatccacctgcctcggcctcccaaagtgctgggattacagacatgagccaccatgcccagccgattctcctttttctaacgtctgcagtgtgtgttggtgcggcccccttttctttcctgattttgataacagataacagccatgttttatcagtcttgcaacaggtttttccattggattagcctttcaaaaaaaccaacttttgctgaattgtgcccccaaggttggaccaatctgacactcctccagcactgccggagagagcctgttttgcggggatggtgcggggagaagcccacctatcccgaacagaggttggagtgggcactctgctacccaaggccctggggtgtgaattgtggggaaagggaaaggtggatgggcgggtggctcagccgtcctcctgcctcatttctctccagggtgatgctgacagggacactgtctgaccggcagccggctgaactccacctcttccggaactacgatgctccagaaactgtccgggagcctcgtttcaaccagaacgttaacctcaggcctccagctcagccctcaggtttaaaccatgtttgatgcatccatgggaagcgactggcccgagaggctgtggggtggtgggtgggagtcgtgcacttgccatcaggcaccctcaccgtgccaccagcccacccgctgcactggtctttattggctgaggacagggattgcgggggagctgtcaggcccctggcaggttagaaaagtccctggaaagtcctcagctgtacctgccttccaccaggacgaactagccagagagtgtggcttcgtgggtcctgcttctgaagagttcccagcctcccctcttcccgcacccccagcccccaacacgcacaccctgagatctggagtgcatgggttttatgccagtcccttgtgccactgggccgccctccttccccgcccctagaccagctggtgtggcgggcggcccgaagcagcggggcagctcctacttacttccgacccaatgggcgcttcctggacggtgggctgctggccaacaaccccacgctggatgccatgaccgagatccatgagtacaatcaggacctgatccgcaaggtgagtgccgtaggccagagggcctggacccactgctccctggagccaatcctgtgtcagcaaaccatgctagggaccgacccccaggacagcaggtggcttttacacacgcactcattcatatgtgcacacagggcaaattgatctcactggaacctgttccatgggtgggatctgcctgaagcactgtgctaagggggatctgaggaccactgtgctctaagtgtgcatgagtggggagggcggcatgcataccatgaacgtgccactcgagccagcctggggacaggacacatgcttgcccttgagctcacctctgtggatagacagtcccacaggaatgcctgtccccacgggttgccggtgctgtggtggaggaccgtgaggcctctgctaaaaggcctgggggctcggaaagggctccatggaacaggggacccatcctgaggcccttggggacagagcagtgcagaatcagtgatctggaggaagagcagcagccctctctctgcagaggtacagcagaggctggcaggacccagcatgctaggggaggccctgtggcgtggcgggcggtgggtgaccggggtgggcgagcgcggtggctgagctcagaccctggagccagggcgcctctgggggtccccgttctgcctgcactcactgcagctacctaatggggccatcatagcgcctgcctggggaggctgcgaggccttggcatgctgttgtctgtgaaatgttcacagcactgccgggagcctgagctgcatccttgctgctgtggtttcccgaagccccagggcgtcctgggcagcgcagcagaggctctgggcagacagagaagcgccctctaggggccagatcgggcagggcgggcttcctgcaggcggcagagaccgtcagactgtcagacactagccagtctaactctcctattgcgtgcggatggggagcctgggacccagagtgggaggcatcacccaagatcatccagcaaatcggcagcagagcttgttcggaagcaaataagagaggcagcggccgggcgcagcggctcacgcctgtaatcccagcactttgggaggccgaggcaagtggatcatgaggtcaggagatcgagaccatcctggctaacacggtgaaaccctgtctctactaaaaatacaaaaaaattagccaggcgggcatagtggcaggagcctgtagtcccagctactcgggatgctgaggcaggagaatggtgtgaacccaggaggcggagcttgcagtgagccgagatcgcgccactgcactccagactgggagacagagcgagactccgtctcaaaaaaaaaaaaaaaaaggcagcacccagggctcaggttcaagccttagcccctacttccctaccacgtggcccctgcagctgcttcccggcctgagcttcgctgagagccctcatttgcaaactgggtgatcagtgccctctccacagactggctggagattaaatgaagtaatgatgcaaatacctggcaaatcaccaacaccaaggaacaccgtctgcctttcctcccctggccacgacttgacttgggccagcatcagatggggtgggcgggatccttcttgcagctggtgtatgtgtggtcctgttggtacacagatgctgtcctgagcagatggcatgtgatgcccgcaccagccgttctggggtcacgtgcaagaggctggctggaaatcatgccaggcatgctcttgccaccagagacctcttgccctgttctcatgtgccccagagcccagtcttgggcctccccttgacgctccccttcgtgccccctacctgtggaaggtctcttctgactgcccctgtcctgttcccaacagggtcaggccaacaaggtgaagaaactctccatcgttgtctccctggggacagggaggtccccacaagtgcctgtgacctgtgtggatgtcttccgtcccagcaacccctgggagctggccaagactgtttttggggccaaggaactgggcaagatggtggtggactgtgtgagtgtgggcccctcccccaggccacttccctcagggtctgtagcccaggtcgatggcttcccctcatcctgtggggcctttggtgttggaggagacagcagggctctgtccatcgcctttagccagctggagggagagagagtccacagttcagagtctcagtgcggggcagggaccctcagtgaccaccagcaggggggttttcaaacgctttttagctgcggatccctttctgcaaacatagcgcagtgtagaagcccagaatggacaaaggctccagagcgggctgggcgctcaccctgtaatcccagcactttgggaggccaaggcaggcggaccacttgagcacagcagtttgagaccagcctgagcaatataatgagactttgtctctaccaaaaaattaaaaactagctggacatggtggtgtgtgcctgtggtcccagctactcaggaggctgaggtgggaggattgcttaagcccaagaggcagaggctgcagtgagctgtgatcatgccactgcactccagcctgagcaacagaaggagaccttgtctcaaaaagaaagaaagaaagagagagagagagagagaggagggagggagggaaacttcagggagaggggacatggaggcctgtcgactcagccgctaccctttcccccactcatcatccctgaaagggcactgctgagacctctgcccctctgattgcacagctgggacagtccctgcagtcccaggaaggggttttgcccgagccgctctgctgctgtgtggctcagcctgactcgaaagagcctggggctccccaggctggggctccgagagtgcagggcagggccgggcggggtgcgggccgggcggggtgtgggcccggcactcaccaaggctgcttctcaccagtgcacggatccagacgggcgggctgtggaccgggcacgggcctggtgcgagatggtcggcatccagtacttcaggtgagggctcagccgccccagcccttggccccgtgccctggcgtggtcggactcaccgaccttcccctcccagccctagtgtggactttcccttccccaagggtctgctctgttccccaagcccaccctggtcctagctggcgtcccctgcccagcctgagcatcctagggtgaccccctcctccctggcccgaacagattgaacccccagctggggacggacatcatgctggatgaggtcagtgacacagtgctggtcaacgccctctgggagaccgaggtctacatctatgagcaccgcgaggagttccagaagctcatccagctgctgctctcaccctgagggtccccagcctctcaccggccccagctgacctcgtccattcagcccctgccaggccaagcccagccactgccctcccgggcagatctgggcccaggcacctctgagtccatagaccaggcctgggagaatgccaagctgcctgcccgaggctggtcctgaaggcctgtctcccactaaccccgccttccagcactttctgtcattccaggctgggaaagtctagagccccctttggcccctttccctgactgtcaaggacaactgactcccccatcagctcaa

SEQ ID NO: 15732 - DNA, 69948 bp, Homo sapiens
ggaagtaggaggaagtagaagtgctgagtaagccgaggtgagtgacctcgcgggtgggcggggcctgggggtccgttccccaacttcctcggcgctccggactcccaagtctccgccggaccctcctttggatattcctcgtgtctccgattctgaggcatgtcctccattaacccttatgtgactccctgagtgcccccaccttccatcttttcatccccctgcgtccccaattcccatcccgagaccgcccgtgtctcatctcgaacttgtggaccccagggaccccagcttcgaccctgagtttctcccctgaaccccagtctcctccgtgtgtctccctcagtatccctaacttcccgagtcaatccatctcttctctttccccgaccctcagtgcctctttaggccccattggccgtcctaattttccttcctgtgctcctctaagtgctcacttgattccccacttcacgtccgtctccacctttcgtggtgcctctactcatttctcactccctgcttctcctgcctttcctccctgctttttttccttgcctttcctctctcgcgtgcctccagacctgcccccgacatgctccctccttcccctcagcctggccaccccagagtctcccacccctaatcctgtgtccacctcctgctcccacagatgacttggaagctggtgacagggagcatgtgaccagggtgatcatgggactgggtcggggcaagcctgtgggtgtgggacagggagggcacagggcaaggggacctgtggccgtatttttaatgggctacccacatgaccccaacgaatacctccccctagcttctgggtctttccctcacctgcctcttacccgcccaacaggatgtcaggcaggttcggtttggcaacgttgaggctgcacccttgggctgaatgcattgtttttgaatgcattgtttttgttagagtttctgcctggagtttggaacctgttttctgtccaagtctcagtttcctcatctgtgacaggggaactgtacctcctgccctcgtaagtctgccatgaggttcaaaatttgaatgagaaaatgtagaaggtaaagctttataaccagtatggccctgtacaaatacatgattttactgttgggtcataggcagaattgaaaggagtggaaagggaaagggctagaatgagaagacaaggagagaaggatgagcaggaggtcccttgtctttcagtgtatcatttggcagtgtttgttcatcacctcttgtgagtcaggctcttctgtatatgttctcttcaccattcattcagtcatcgtttatctaacaaatatttacggactgtctgatgttctaggctacccttggtgtggccaatgatattctcacttcacatgagaaaaagagggcgcatgagttgcttgaggtcacaccgatgaggttgaagctggaatctgacaccagagcctgtgtgattgtcctgatgtgtaaggtttgctactgtttaggacacttcttgttccttccgtggattactttcttgttacatgagagactccccaaaagggagtttccctcttactcagcagaatgacatcactaagagatacagaaaggagaaatttaaatactctgtgtgtgtgtgtgtgtgtgtgtgtgtgtgtgtgtgtgtgtgtctgcagacatctattgggtgtgtgtgctgggggaagtaggtaggcaaggagtaaggggccgtagtgaagagtgtgttacaaacttcactttgtagagggtggctccctgggagaatatgttctgtgtctttcacagtggattttgatagggtcatgtcttaaatgcctcttctcgttttcggatggtgatctcatccagtcttatttctttaagtgccgtctctattctgtcagcccacaaatttatatccccagtccagtccagacctttccctggaatgacatactcaaatctagttgcttactcagcacctcaaacttaggcttttcaaacttgaagtatttatttattgatttatttattttttgagacagagtctcactctgtcacccaggctggaatgcaatggcacgatctcggctcactgcaacctccacctcctgattctcctgcctcagcctcccaagtagctgggattacaagcatgcgccatcatgcccaactaatttttgtatttttgtagaggcggggtttcaccgtgttggccaggctggtctcgaactcctgatctcaagtgatccacctgccttggcctcccaaagtggtgggattacaggtgtgagccaccgcgccaggcctcaaacttaagagtttagaattgagctcctgttagttctgccctccatccctgaccccactcttcaccaaaacatgtccctcccactctctttctcatcttaggacataggagtattgttcattcagttgctcaggtcaaagctgtgagattatctatgatgcctctctgtttcttaccccacacccagccagagtgatcttgttaaaatgttgtttctttgcagtggcctctcctctcatggcacatgcctggccccctgttgcctctctgatgtcactggcttccttgcttttcctggaactcgctaaacatgttccagccccatggcctttgcacacgctctctttgcctagctattcatatgactttcatctctctccatcaggtatttatttaagatcaatttcttggtgaagacttctctcctcacccaatctaaaatttcactctccacctcagcacttcctatccccattctctggtttttctcctcagtagttaattgtcatctaaaacctttgtaaatatttacctgtttatcttctttattattagtagctctgtctaaaatataagttccaggatgtcagggattttgtggggttttttttggttggttggttgttttggttttgagacagggtctcactctgttgcccaggctggagcgcagtggtgcgatctcagctcactgcagcctccgcctcctgggtttgagtgattctcccacctcagtctcccaggaagctggaattacaggtgcacgccaccacacccagctaatttttgtattttttggtagagatggggtttcactatgttggccaggccggtcttgaactcttgacctcaagtgatccacccgcctcggcctcccaaagttctgggattactggtgtgagccaccgcgcccggccttgttttgttttaagacagggtctcactgtcgctcaggctggattgcagtggcacaatcacagctcactgcagcctcgacctgctagacttaagcaatccccccacctcagccaccttagtagctgggacttacaggcatgagagataccatgcctgggtaattgttaagtttttgtagaggtgaggtctcactatattacccaggctggtctcaaagtcctgagcttaagtgatcctccttccttggcctcctaaagtgctgggattacaggagtgaactgccgtgcctgaccagtctgttttgtttacgattgtatcctcagcggttagaacaatgcctgccacaatccatctcagtaaatatttgtggagtgagtcataacatgggccacactgtaccgtgccaccagcccaaagatctcttaaagtcacccctgtctcatgtgcttgggagctccagtgacagtttcggggcagtttgcttccagctgtggtccagccaagcggagtgaatgaaagagatgctttttccttttgtgaaaggacgttttgctctggctcacgtgagcagcagtgcattttgagacgagggccttggcttttggaatctaagagcctgttgagcaagcctcgctcagccaccttctttcagctttctcctgaaggcagtttgaggattaagagcctgatgctctggattccacctaattgggttcagatcctggcaaactgtgtaacctgtgccccagtttcctgtgtaatgtggagagacctggaccttttcttacaggtgtttggagggttaaatgtggcaattcggccgggcgcagtggctcatgcctgtaaccccagcactttgggaggtggaggtgggcggatcaccggaggtcaggagttcaagaccagcctggttaacatggtgaaaccccgtttctactaaaaatacaaaaaattagccgagtgtggtggtgcgcgcctgtaatcccagctagtctggagactgaggcaggagaatcgcttgaacccgggaggcagaggttgcagtgagccaagatcacgccattgcactccagcttgggcaacaagagtgaaactctgtctcaaaaaaaaaaaaaaaaaaaaagtggcaatttacccgaaactgtggtgaagcgtctggcgccctgtgggtgctgggcagcagtgggtgctgatggggtgtgaggggatgggatcaagccctttcccactaacttaggaaagaggttggaatgagctggggtcagagggaacatttgcggggacattttgccgggaggctgccttggaggttcagaggctcagatgacccctgtgttcattcagtgttttctcacccacagattgagcacctgctgtgtggccagccctttgcctagtgctgttcaagagtcagaggacataggcaggcaatcccccaccacaacctgccaccccatttcctctcttggggccttgatttctccacatgccaaacagggagaatgattgcaccttccttgtttctttttttttttttttgagacagtctcactttgtcatccaagctttagtgcagtggcatgatctcggctcactgcagcctctgcctctcgggttcaaagattctcctgcttcagcctcccaagtagctgtgattataggcacccaccatcacgccaggctaattttttttgtagttttagtagagatggggtttttttctcacacgttggccaggctggtcttgaacttctgacctcaggtgatctgcccatctcaccctcccaaagtgctgggattacaggtgtgagccaccgcgcccggctgcgccttccctgtttctttgtgagcttggaggtggatcacaagtgtgaaaccctttgccaaccgtgaggcatggtggccttgtgagaggacggaggccggtgtgtggtggcatgctcccgtgctgtgtggcacagacggagctacaggaaggaagttggggcagcttggcactctgagtggaccctgagtttccagcctgctctgtcttgactgggtgggaggagggtgctcaggagggtgtcactgctgccaggttctgctgccaggaccatccaacagttgttccaatcatgggacatcctgtcgtcagcagctggggctcgtgaggcctgatttccacctcgggcagttctgtgtgtgctcctggaatcccccacgtggccaagcctgtgaggtctgcttcctggcctgctgcctgtgggttcctgtcacgcacctctcgggcagctgtccggctcctctgctctcggcttagtcaagaaggaagcagaaggcttggagtctttcctgcttggactaggagtgagctcagcctaagtgccctgactatatataaagctgaactttccagaccgaagcctggggatggatcagtccgatcacttagggccgctcctgaaggagtgcaggtgctagatacaggttctcccggtggaggagcgaaccccttgtgggccgttagctactggtgggatttgagcatggtatttccctatccgttgtggagaggagcatggcagctcagagtgggtgggaacagtgtgtggtccctgttatcaccttcaagggaataaagtgtgtctgggggcttcagaggtgctggccccatgggcttataggtggttcattcattcattctcattcattcattcaccaaacttattaaacacccactgtgagtcaggaacatcatgccaggtgcttagggaaacaaatcaaagcgggttgggtgagcagcccaagccaacagatgcacccccattctcacatggtgtgtgttcctgtgggctgggccctgggtggtgtggggtgctggggagaagaggaaggcacaccaggctgcagggcggaggtgcgggtatgaattttcagaggagatggcacctgagctgtatcttcatggataagaagagatttgttcatttgtcctttgtggagcacacattcaggttaagaaagtggggaggatgggctacgctgatggagcgtatgtgtggtatccccaagtgcactgagacacgagtttgacgtgttctgggaagatcgatggtgcggcgtggctggagtagaggtgagggatgagttggaggggtgagttgggccagctctcatggatgctggagtctgggctttccctgggaggtcatggggcgccactggccagggtcagcagggagacctgcagctggatttgcatcgtacagtgggcatggaggggtgtcaggctgggttgggaaccgtgcaggctggaagggcactctggtgctctgagcattcagagggggcagctgggccttgaaggatgagcaggggctccagcaggaactggagagcgcattccagggaggacgcaagtgcaggcccctttcactacagaaaagcagttttcacacagaccttccaaaggggaggagaggggactgcctgggcctggcagctgcggcaggtagcagcaatcagagggcagggaccgctcctcccgtgcctgagacctgcccagggtccttcagggaattcgtagctgaggaggaaccagatttttgggactgagttctccctcaccacccgctctgagccaccctcttggtcccttgtcctctactgcacttcttccggggcttggctcctcgtcatgagaggagcttccctgggcatggcgaggggcgtgactgacatagcagccctggacaagtggctccaggtgacctgtgttcacgttgatcacagcactaaccacggcccctcctctcagcaccttcccctctcgagccgtccagtcccagtgaaaatgctcaccgttcatgggtgggctgagcaagcccctgatctctgccttcctccgtgttctgatctgcttcatctgctgtgaaggcctctcgccatttcccccgctggcaaactcctgttcttcctggaaagttcagctaaaaagtcatcccctttaggggtccttccctcaggggaccgtgcacttggcgagacagggactggtcttgggtctctctgttgactgttttatgaacccaggtagtcacttccagggaactcatcagagatgctaccattggctccaatctccctctgttcccactcgaggttttttgtttcttcgtttgtttttctttctttctttttttttgagacagagtctcgctctcgcccaggctggagtgcagtgacatgatctcggctcactgcaagctccgcctcccgggttcacgccattctcctgcctcagcctcccgaatagctgggactacaggcacccgccaccacgcccagctaattttttttgtatttttagtagagacggggtttcaccatgttagccaggatggtctcaatctcctgatttcgtgatccgcccgccttaacctcccaaagtgctgggattacaggcgtgagccactgcgcccagcccgtttgtttttgttttttggtggacatcaactttaatttgccctttgttttgttttgtttttgaggcagggtcttgctctgtctcccaggctggagtgcagtagtgcaatcttggctcactgcagtctcgacctcaagaggatcaagcaatcctcttgccttagcctcccgagtagctgggaccacaggcgcacaccaccatgcccagctaattttattttatattttgtagagacagggttttgccatgttccccaggctggtctcaaattcctgggctcaagcaatccgtctgcctcagcctcccaaaatgctggaattacaggcacgagccactgtgcccggccttaatttgccctttgaacatgtacaattcagggcctctctgggcctcagtttcttgatctctgagatgggaagatgggataataatacttgttcctcccgtccttcagctcctccaggggaccctcacaccagcacactctctgtcagtcttccctcaatgaacccagcaggcaagcttggttttgacagaggatgggtgagcagagataaggaaaacggccagaaatatctggcttccctcagcaggggcaccaaaattggtacctggaaattgcctggcttggacaggcagaattgtcactgtcaacccccaccaccaaaggtcttgggtctttgtctttctgcttgtggtgtttgagagagctgcttgacacagccgaggtgcggtctgtgtcaggtgacctgggcatcctgggggtgcagggagaagcccaggtaaggaggaggaggggccggtcatcagtggggaaaagtgattgtctaccccacgggaaggtcaagggtaggacgctgtgagaagccagggggagagatgaagtgaggcatgatgcggggggccctcatccaccatccccctcttgcagctgtgctgggaagagcctaggctccagggtccaaggtggcagggacagaaggaagcacgtgtgagcactttctccctgctggcccgccttcctggttggcaatgccgtgagtgttccaggatgtggccccgtggctgtcatttcctttcttccacctagtgataacaatggccactgtttgtgtgcccacagtcggcctgtgtcccagacaccttccctccattgcgtcatctcgtcctcctgcctaccctgaaggctggatgccagccaagcctgtcgtttctgtggccatgctgtcgtgggtgtgtggggggcatcccctagccccaggctctggtggggggtacacaggctgggccattgacgaaggggtgtgtggaatctttctttgatttcactgcacccctggtgactttctccctcaatctgaggctcatgggtgctggatgctcttgactctctgcccttcctgggcgcacccctccgcgtccctgtgggcccgtcctcggggtagcctctctgcgctcttccaggccaggcctgagtcccacaggtccccatcttcccggctgcagcccccagaggctcagcctatactgctacttcctttgaaaactataatcgctttacatagcatctggaaaatagggaaaaggaaaaaacaaaagcccataaacccagcaccctcatctactcaatggcatgttttctgtcagtctatcttggtttgttttctatcaggctttgttttttctatgcataatatttactcagttaaatttttgttttgacaaactttctgtgagccaagcttgtggacggagatgaaaagacgagcagctgcctttgagaaactcagactctgggccagcccatctgggtgccagctttcactgctccacccactagctgggtgaccctgggcccgtgactttacccctctgttctttggtgttctcatatgtaaaatgaggataataatagtaaccagttcatagagtggttgtcagacagaatgattaatgtacgtaaagctttcaggatggtgccagcaagatgcacaggagtgtttggtaggaggatgacgaagcttaccgtctggcaggaggggcagttgtaacatgctgggctgtgatagtacagatgtgtttaaagtgagggagagcccagagcaaggagagagaacctggcatctggtgatggtgtatcaagaacattttaggccagacacggtgactcacacctgtaatcccagcactttgagaggctgaggcaggcagatcgcttgaacccgggcgttcgagaccagcctgagcaacgtggtaagaccctgtctttataatttttttttttttttttctgagacggagtcttcactctgtcacctaggctggagtgcggtggtgctatcttggctcactgcaacctccacctcccgggctcaagtgattctcctgcctcagtctcccaagtagctgggattataggtgcccaccaccatgcccagctaatttttttatatttttagtagagacggagtttcaccatgttggtcaggctggtctcaaattcctgacctcaagtgatctgccctcctcagcctcccagagtgctgggattacgggcatgagccaccatgcctggcctctataaaaattgtttggaagaaattacctaggcctggtgatacacacctgtagtcctagctactcaggaggctgaggtggaaggaggtagaggctgcagtgagccatgattgagccactgtactccagcctgggcaacagagccagaccctgtttcaaaacaacaacaacaaaaacatttttaaggaggaggctgagaaccacgagaaccaagcttggatttgaagaaggatcagggctttctcagacagaaaaggagaggaagaacattccagatagacatcattgagagatggcactgagccttgtaatgggacactgcgaacttttcttcagttgttatgatctttttttttttttttttgagacggagtttcgctcttgttgcccaggctggagtgcaatggcgccatctcagctcaccgcaacctccgcctcccaggttcaagcgattcttctgcctcagcctcccaagtagctgggattacaggcatgcgccaccatgcctggctaattttttgtatttttagtagagacggggtttctccatgttggtcaggctggtctcaaactcctgacctcaggtgatccgcccgagtcggcctcccaaagtgctgggattacaggcgtgaaccaccgtgccttgttggtataattattagtattgatcttttttccttttcatgtgcctcttagtgggccccttgcttttgtcttccttctgtccccagggttgatcctgtgctcagcacataggccagggaagaatgtggctgtgacccagtgtccactcagatgtcctctctcccccagggcacccatactctgtccttagtgtcttttgtctggtgacatcttggcacagaggcagagggcggcctccgtctgattggcgcctggctttggtgacagtaccttaggaaggcagtgtattttctgggaacctaggaaataacaaggtatctaattccatcatcaacactggggacaatttccatggcagaaactatgactctgaatatgcagcgtaaagttaccacccagacactgctgctcctgagtctcgaatggcatcttctgcaggggctcccccacctgcccctgcagaaggtgcagttcgttcatttccaaggagcttgcttttgtgtgctgtctctcggagctctttgggaaacctgtggtagcaggaaacaaaggatttagaccaatgccgatgatccccttgctccgatagagtgtgacatgatgctggtcaccttttggtatctaggaggggggacattgattttgtttgcggaagtgaaatgatccatgctggcctctttttttttttttttttttgagacagagtcaccctatcgcccaggctggagtgcagtggcgcgatctcagctcactgcaacctctgcctcccgggttcaagtgattctcctgcctcagcttcccgggcagctgggactacaggcgcctgccaccacatctggctaatttttgtatttttagtagaggcagggtttcgccatgttggccaggctggtctcgaatttctgacctcaaatgatccgcccgcctcagcctctcgaagtgctgggattacatgcctgagccactgtgtctggtccatactagcctctttgagtgctgaaaggttatctctgtaacttatttagtgagaaccctccatttgcccagggcattactgcctataatgtatgttcacatgtgctatctcctttggtcaataccacacactacaggtgaggaaactgagtctctgctgggacactgggtcaggaagcaggcagttaaggtcacctgtgcacagtggcagcacagggggacagccttctaggtagccagcctggcctgagggttctgtcacttttacctcccactcagtgttgtttctctttctttcccctccttttaagatccctccaggcccaggatctggggacaacgctggtggggagtgatctgggtgtctgtgcaggaaaccgctgcactgggtgagatgggcatgggagactgtgcctggctgaccagagacctcgttttcttccagacagagggggaagacggtggggcctccccacctgccccgcagaagatgcagttctttggccgcctggtcaataccttcagtggcgtcaccaacttgttctctaacccattccgggtgaaggaggtggctgtggccgactacacctcgagtgaccgagttcgggaggaagggcagctgattctgttccagaacactcccaaccgcacctgggactgcgtcctggtcaaccccaggaactcacagagtggattccggtgggtgatgctcagcgggaacatacttctctcctttcactcccccacgtctcggattggaggtcttattggccgagaagcagtttctttgagtctctgtctgaggggtctggagaggggtgggagagaggggagactgtactcttggaccagagggaagggcttccgagactccacacttctggcccatcagtgtcccagcacgaggctgaggatggaagcctgggttgtttctggcctggaggctcgacctatatggacaaagggaagaaggaaggacagggagactgagagtgtccacatcagataaggcccatggggagaacctttagccctggctctttatttttggttttggtttttgttttttgagacagtcttgctctgttgcccaggctggagtgcagtggcgcaatctcggctcactgcaacctctgcctcccaggttcaagcgattctcctgcctcagcctcctgagtagctgggattacaggcacccaccaccacgcccagctgatttttgtatttttagcagagacggggtttcatcatattggccaggctggtctcaaactcctgacctcaggtgatctgcccaccttggcctcccaaagtgctgggattgcaggcgtgagccactgcacctggcctagccctggctctttaagggcatggccgttctcataggggctgcccagggtttgcttaggaaggctggacagagctgttgcctcttggggcatgctgggactcccctgggcctgaagagaaggctcaaaagccaggacaggcctgagggaaccgggccaacggcagagctggttgggaaaaggggagaagcagccaaggttccaaatgcaggccccagcagtgcttggcagactggcatctagttgggctcagacagatatccctgtttccgctcacctatccatctggctgtcctgtcagccatccattcaacatgcaccaagcacctccagtgtctccagagtcctgggcttcgggccagtcctggctggcctgtgagatgacaaacatgtcctgtgtctttaaggaacgtacagtctggtgggggaggtccggtgcaaacaggcgtcatagcaccccttgaggagtgctgtgacagagggagagcctaggaaacagtgtggatcacaaggaggtgattgagagctactctgcgtctggaagagtgaggaggagcctgtgtggcagaacaaaatggataaggtcgttccagccgtgcagaagtgtggaggtgtgagcctgcaggcaggtggctctggttggatcccaggtgcatgcagggctttggtgagagtgaggctgaaggaagcagctggggactcattctgactaaagaggcatggcaggaggggtctctgaaagtgtcaggctgggggccaggggctgccaccaacagaagagcaaggcaggtatcagggccccatccaatcaggtgagaattcagagcctggctccacaaggaacctgaggcagaggcacccacagcaggtgcttgggctaaatgcagctcagtggccagtgcaggcaccagttttaatacagtggggccattccagattctgagtgcagatggggctgagcagaccgccttccagctggactcgatcaggactgaccctggacggggcaggcttgcacttgtagcttcagagctccactgcaggcacagctgaccagggcagcgggtccactccttggagagctggacagccccacttttgaggtacacggccctggggataccactaatctccacgtaccaataatcaccaagttctgtcagttgtaaaatcccttgacaggattccagatttgtctcagccagcttaagccccagtgtgggcagacctccatcccaggaggatttagtcctttgtcagcagcttcttagctacacgtaagctattctgtggtactttatagtttacaggattttttgttttcttttttttttttttttgagacagagtctcgctctgtcacccaggctggagtacagtgacgcgatctcggcttactgcaagctccgcctcccaggttcacgccattctcctgcctcagcctcccaagtagctgggactacaggcacccgccaccacgcctggctaatattttgtatttttagtagagatggggtttcaccatgttagccaggatggtctcaatctcctgacctcgtgatccgcctgcctcggcctcccaaagtgctgggattacaattttacaggatgtttttaagtatgttgggttagcacattctctgccaatccgtggaggtgggcaaggaaggcagtattccattttatgcatgagaaaatagccttgggatgataagtgattcatcccacttatacacaggaagcagtgaagaaacagaatcagtgtcttctggttcccaattcatttctctgtgctgctgtgttgtttccatgtatgtatgtatgtatttatttttttgagacgttaagtcttgctctgttgcccaggctggagtgcagtggcatgatcttggcttacagcaacctctgcctcctgggttcaagctattcttctgcctcagcctcccgagtagctgagactacaggtgcgtgccaccatacctggctaatttttgtgttttttagtagagacagggtttcactgtgttagccaggatggtcttgaactcctgacctcgtgatctgcctgccttggcctcccaaagtgctgggattacaggcatgagtcaccatgcccggctttgtttgtcttatttctaaattttattgatttatttattttcacagtcatagctctggagtcttttttatcttctcccctctaacctgctcccacccgaacctttccatttcagcagatagcatcattgcaacgggctgtgccagatccagccatcacatccacctttccagccaaagggagggtggaagggcaggatgcagaaggtcaatctccccctcctcagggacatttcatggaagttgcacgcattggccagaacccggtcacatggccacagctaactgcaaaggatgctgggaagtgttgcctgtgttgcagacagccacgtgccagtcgaaaatcagaggttctttctccctccgtcttgctgctggctcgcttctccagaccacagtcattgtgcacgtgtctcctgctgctccggctgtggcctgcactcctctcatcctcttccaagctgctgtcacagcgctgtttccagagggcaaatctgattggtcactcccctgctttactccccaagggcttcctgttttcttttatttttatttttattttcattttttgagatggagtctcgctctgtcgctcaggctggagtgcagtggcacaatgtcagctcactgcaagatctgcctcctgggttcatgccattctcctgcctcagcctcccaagtagctgggactacaggcgcccgccaccacgcccagttaattttttttgtatttttagtagagacggggtttcaccatctactcttagccaggatggtctcgatctcctgaccttgtgatctgcccgcctcagcctcccaaagtgctgggattacaggagtgagccaccgcgcccggccagcttcctgttttcttaacacatcaggtgcttaatgacttaaaagggcccagtgtgatcaagtttctgcctctgtgttctcagctcatgccgccttgtgctcctggcctttgcccaggctcttgctgtggcctggaatactcccctttctttgcctgccttccttcctcttgccctcccctgacctgcaggctggattaggagtttctgctgggcatcccatggcacccgtccctgcactggggatcctgctttcctggtaggccacagaccttgtgaggggagggactgtgtctgttgggttcatgacagtgtgcccagcccccagcaggtgcctggcgtagatcaggtttgtggaacaaatgaatgtgatatattaatttagctttagagtattcattgagggctgctgtgtgccaggccctctgtgccacctgggtggagggtggaggactgttgcattgagggcagttgaaggagtgagctgggaagtgggaggtggaggatggggactgggatgcagggtttgaggttatcaggggtcccagaagcagtaatgccaaggcctaggctgtgacctggagtgagggctgcgatggggtggggtggggtcgaggctgtggaggagggtcatcagggcactgctggagccctggggttctccagggccgggggtggtcattgcagtgttctcccagctcctctcaacaccctgcggtctgtggagagcaggcctggtgcactggacttgcctctggccagggctgagtttctgccttctaaacgatcttcctcctgtgttgccctagaggcctctggactgtcctgagtacttgacgcgtgttagagtgagcatgggctgctagccttccgctccaggtggaggagtttctgttgttcttttgctgctgttgctgcagtgagctgccaggctgagcttctggatggacctgggggatggaattaggagcttctgaattcttgggttgtataacctaaggccggagagtcccacagcactgctgctgggcggagagactggaccctgctgatacagacagcgacagcagcaggagcatctgcagtttcccagcaggtcctgcatgcctgggcttggcactagtctaagtagtaactcatgttatcctcacgacagtcccacgaggtggggtcattactgacctcctattacagatgaggaaacagaggcttgcagaatttgagatcacacagctggtcagcgtagcgattattcagaccctgtcacctggctccagaacccactcgtttacctttcttacatcagggctgctttgtagtgtggcgagctgagtggagctccacccgcctgggctgatcctggcccttcctgcctgacctatggtgcgggggccctggctctccccgtgtgagcccccaggggtcacttgtaatatgcctgtgtacactatgatagcatagatacttctgttcctggtacagattaatcatttacggctggcattgacttgtaacagatgacatttgatgaaatcaaccagcctctcactggtatctcagcagaaacagggctgtacctcccaggcatcctgggaaggatgatagaagtgtgtgatctgtgcttccctaccgggagctgacttttgaggctctctggactgggactttgccataaaactgcttatcagaaacctcagataagtggagtgccctgtgtcctggccacgtactctggggccagctcctccatccattcagtcctcccacatcccatcttcaccaagcagagtggaaagcggcaggtctctgcgagaaaaggaggctctgtacccagccttcagtgagataactttagagtggggccttgtattccctacacaggccttgtccccgacacggcctctttgcccttgcttctccttctgctaagaatgctccttcccaactccttggctggacacacggctcctgctctgtgggcctgtcctgttcccactcagagcctcagcaccccccatgtggccaagacacagcccctcttgccttaggttgccgtgggtctgtttccacatctgtttcccctccagactgcagggctcctgagggacagggcctggggccaagtctcctctgcgttcctgatgcctggtggtgtgccacgctctccgtgggtgcacggtaaatatctgccgagtggctagatgtatccatggttgctgaaggccaagtgtgttgaccagagggcgtgggaaaggctccactggggtggctggggtagagatagaccttaaggggtccagaagactccaccagctggagggaaaggccctacagagacaaggtactaggaaaggcccagaggacagaggaggggccctgtggggagcctgtgggcaggaagggcctgtgctgggctttgaaactggggactcaggtactgctctagcgtgagggtccttggcattttttttggtccaggaccccctgaggtccctggggaatgagaacaggctcacacagccactttcaagaggtttgcaggtcccctgaggcttagccacagacccctcccaccccagcagagacacagcagaggcttctgagtggaggccaggtggcttcagcctggggttctagaagggagggaagagacacacccccgtgtgtcctccagagcctcagccttctccctgaatctcccctttgcctcctcactgtaacccacacctggctctccttgaaggacccgcttgccccgcagcctcctgagagttttctctcccagtccctctcccactgggcctggaggtggggtagggtcctccttgcccccagccttgaatcttctgtcaccctacaataccacttgctgtcaccccggtgataggtatctacgagcctggggtgctcccccacatcctcaaagatgtgagcccctgactcagcgttgcctctggttcctgaccctccacattcacatgaccacgcgctggcctttatcatcgccagtgacagcagctctcccgtaaatacaagtttcaagcaccccactttccagtctctgccttctgtctttccagttcattccctctagtcctccacccacacagtgcttttccccattgacagggaattgctcctggccgcttttcccagccccatcccgttcatgtgccttgctttgtacccagcatggactccatggcctgtcattgtcactccttcacctatacttcctgcctccttgcttctctctctcttcgtcatcctggcatcaccaccccagaactgcttggtttcagttctccaccatggctaggggaacatacctttttgctgactgctctcactttctttttttttttttttcttttttttttttttgacacagagtctcgctctgttgcccaggctggagtgcagtggcacactctcagctcactgcaacctccacctccggggttcaagcagttctctctgcctcagcctcctgagtagctggtattataggcacccgccaccacacccggctaatttttgtattttttttagtacagacagggttttgccatggtggccaggctggtcttgaactcctgacctcaggtgatatgcctgccttggcctcccaaagtgctgggattacaggcatgaaccaccctgcccggccctattgctctcactttgaaatcacgacatgagccacagtgagcctatgatgtggtttgacgtctttctgcatttctctgttcacccctctcccagaaggcatgcctccttccctcccctcagcctgcagccccttcccctccacgcttactctcagctgatagccctgctgctgtctcgctgagaaaatagaaatagccagaggagaattccctctaccccatgcacacacctctgtccccgcctactccacattccctgttgtcagcaccgatgtgtttagctgagggtggtccccccattcaaggccatcatctcctgtcatctacttcttgacaccatttgaacaattatctcccctctttcctacataacactttccccttttctactatatattttttgctatggattgaaagtatccccccgaaatcatatgttgaagccccaatccctcgtgtgatggtattaggaggtagagcactatgggggtgattaggtcatgaggatggagccctcatgaatgggattagtgcccttagacgaagaggcaagaaagagatgatctgtctctgccatgtgagggcacaacgagaagatagccatctgcaaaccaggaagtgaaccctcatcaggaactctatcagccagcaccttgatcatagacttcctagcctctagaactgtgagaaataaaggttgtttaagcctcccagtctgtagttttctgttataatgtcctgacctaagttattttccatcgctatacaatgggttatttttttctttaaaaaaaaattatttcttgactctactttttcctccagagactgcttatattccactgtcttcattcttctcctcctgttttctctctttaaacttttcaaaaatagcaaaatataacacatatagagaaaatgatatacagctcagtgatttatcacaaacacctgtgtaaccaccactcgaatctagagataggacattacagcaccccagaagccctccttttgtcccctcttcccaaagaagggtaaccaataacttgccttttatgataaaggctttttttttttgagatggagtctcactgtgttgcccaggttggagtgcggtggcgcaatctctgcttactgcaagctctgcctcctgggttcacgccattctcctgcctcagcctcctgagtagctgggactacaggtgcccgccaccacgcccggctaattttttgtattttagtagagacgaggtttcaccgtgttagccaggatggtcttgatctcctgacctcgtgatccacctgcctcagcctcccaaagtgctgggattacaggcgtgagccaccgcccccggccaagataaaggcttttctatctggcttctttgttagcattttgttggcgagattgatacgttttgtgtgcagctgtctgtcattttcattgcaatagaattccattgtctactatatcacagttactcattctactactgatgaaaatttgggttatttctagtttttttggtgcatacatgcatacatttctggtagacatacctagaagtgaactggctgcattatgggccataacttgtcttcaacgttagtaaataataccgcccgtctgttttccaagcagcagtaaatggcactttctgttacttcatatcttctgttacttggtactgtcaggttttaaaattttagtcattctgtcgggtgtctagtagtatgttattgtggttttattttgcatttgcctgattgcaaatgaagttgagcactttttgatacagtgattaaccatttggatatcctcttcagtgaagtatcagctcaattctcttgactatttaaaaaataaagttgtttatctttttcttacagagttttaggaggagttttttggtacatgtgcagtccaaatacacaccttttgtcagtgatacgtgttcagctgcacacacggtgttttgcctttttattcttttaatggtatctattgataaacatgagttcttagttttaatgaagtcaaatttgttcatcttctttacggtgtactttttgtgtcttgtttaaggaagtccttctctatcttaaagctttgagaagcattccttctttctcctattttctaaaaattgttgaagatctccttccttccttccttccttccttccttccttcctttcatctatctctctctcacccaggccaaacttcagtggcatgatcatggctcactgcagcctcaacttcccaggctcaagtgatcctcctgcctcagcctcctgagtagccaggactacaggcacgcaccaccatacctggctaattttaaaaattttttgtagagacacggtctcatcaagttacccaggctggtcttgaactcctgggctcaaacaatcctcccacctcagcctcccaaagtgctgggattacaggcatgagtcacatgtctagcctgtattctttctttcttaaatgtttggaagaattcatgggtaaaaccatgtgaccctggagtttatttgtgggaagcttttaaaacatggattcgatttctttaacaaatataggactatgagattttcatctcatgtcggtttgggtatgttgtgttttcaaggaatttttctattttatcgaagttgtcaaatttgtctgcaggtccccttatttcctttttaatgtatggaggatctgaagggatggtactttgtgttgtctctatttcttgtttggttttgctagtgatttgccaatttaaaaaatctttccaaagaaccaacttttggctttgtttattttttgaaaacctgagtagctgggattacaggcgcccaccaccacacccggctaatttttttatttttagtagaggtggggtttcaccatattggccaggctggtctcgaactcctgacctcagatgatccacccgcctcggcctcccaaagtgctgggattacaagtgtgagccagtgtgcctggcaagccgctttttaaatggcaccaatcccattcatgagggcagagccctgatgatcgaattacctcctaatggccccatttcttaatactatcacactgagaattaagttttaacataagaattttaggaagacacaaacattcagaccatggaacatatataaaacagttgtcctaccaactaacagaatacacattcttttcaagaacacctatataaaaattatagacactgacctatgctggccataaagcaaatatgaacaaatttcagatacctgaagagatttagactatgttctccaactacagtgcaattaagctagaaatcaatagcaaaaatgtaactataaatgagcccgtatgtttgaattttaagcaagatatatgtaaattatctatggttcaaaaaagaagtcacagtgaaatttagaaaatatcttgacgtggcgggttgcagtggctcacgcctgtaatcccagcactgtgggaggccaaggcgggtggatcacctgaggtaaggagtttgagaccagcctggccaacatggtgaaaccctgtctctactaaaaatacaaaacattagccaggcgtggtggtgggcacctgtggtcacagctacttgggaggctgaagcgggagaatcacttgaacccgggaggcagaggttgcagtgagccgagattgcaccactgcactccagcctgggcaacatgagtgaaacttcatctcaaaaaaaaaaaaaaaagaaaagaaaaagaaaatatcttgacccaatgatgatgcaaatactacgtatcaaacttgtaggatgaacttccacttctggccatgacagaggagcctgtatcagactagccttcctatttatatatttatttttgagatggggtgtcgctctgttgcccaggctggagtgcggtggtgcaatctcagctcactgcaacctccacctcctgagttcaagtaattctcctgtcccagccttccaagtagctggaattacaggcgcccaccaccacacccagctagttttttatatttttagtagagacggggtttcaccatgttggccaggctggtctcgacacctgacctcaggtgatccacctgcccctgcctcccaaagtgccgggattacaggtgtgagccactgcgcctggccgtgagtgacctttttaatgtgttgttgaatttgatttgctggtattttgttgagaagttttgcatcaatatccatcagggatactggcctgtagttttctttttttatatgtctttgtctggttttggtgtcagggcaatactggcctcatagaatgagtttggaagttttctctcctctgtttttcataatagtttgagtagggttggtattagtttttgtttaaatgtttggtaaaattaagcagtgaagccactgggtcccaggcttttctttgctgggagacttttcattacagctttgatctcattacttgttattggtctatttaggttttggatttcttcacggttccatcttggtaggttgtgtatgcctaggaatttatccatttcttctagggttttcaatttattggcatataattgttcacagtaacctctaataatcctttgagtttctgtgatattggttgtaatatctcttttgtcatttctgatttttttgtttgggttttctctctttttttgttagtctagttaaagatttattgattttgtttatcttttcaaaaaactttattttgttgatcttttgtattgttttgtttcaatttcatttatttctgctatgatctttattatttcttttcttctactaattttgggtttggtttgctcttttctagttctttaagagacatcattagattattttgaagtttttctacttacttgatgtaggtgcttataggtacaactttcctcttagtacttctttccctgtatctcacaggttttgatatgttgtgtttccattatcatttgtttcaggatgtttttaaatttccttcttaatttcttcattgaccattcaagagcatattatttcatttccatgtgttcgtatggtgtgcaaaataccttgtttttgatttgtagttttatttcattgtgatcacagaagatacttgatatgatttcaaatttaaaaagtaatttggctgggagaagtggctcatgcttgtaatcccagcgctttgggaggccgaggcaggcagatcacgaggtcaggagatcgagaccatcctggctaacacagtgaaaccccgtctctactaaaaatacaaaaaattagccaggcatggtggcaggtgcctgtagtcccagctactcaggaggctgaggcaggagaatggtgtgaacccgggaggcagagctggtagtgagccgagatcgcgccgctgcactccagcctgggtgacagagcaagactctgtctcaaaaaaaaaataataacaataataataatttaagacttgttttgtggcctaccatatggtctatccttgagaatgatccatatgctgaggagaagaatgtgtattctgcagccgttggatgaaatgttctgtaaatatctaataggttcatctgatctatactgcagactaaggctggtgtttctttgttgattttctgtctggatgaactgtctaatgctgaaagtggagtattgaagtctccagctattattgtattgaggtctatctctctctttagctctaagaatacttcctttatatatctgggtgttccagtgttgagtgcatatgtatttaaaattgttacattatcttgctgaattgacccttttatataatgaccttctttgtctctttttatagtttttgtcttgaagtctgttttgcctcatagaatagcatagctattcctgctcttatttggtttccatttgcatggaatatctttctccatccctttagtttcagtctatgtgtgtctttacaggtaaagtgtgtttcatgtaggcaacagatcactgggtcttgtttttctatccgttctgccactctgtgtcttttgattggagagtttagtccatttatgttcaatgttattactgacaagtaaggacttactcctgccactttattaattattttcttgttgctttgtgatcttctttctttccttcctgttctccttttagtgaaggtgattttctctggtggtatgttttaatttcttgctttttatttttttgtgtgtatctgctgtatgttttttgatttgaggttaacatgaggcttgcaaataatatcttataacctaatattttaaactgatgacaccttaacactgattgcataaacagacaaacaagcaaagagaaaactaataaaaactctacattttaactttgtccccccactttttaacttattgtactgtttatgtctgaaaagttgtagttattatttttgattggttcctcttttagtctttctactcaagatatgagtggtctacatatgacagtgttataatattctatatgtttctgtgtacttgctattaccattaagttctgtactttcaagtgatttcttattgctcattaatgtccttttctttcagattgaaaaactccctttagcatttagcagtatgtgaactgcatttttcaagtccagaatttctgcttgattcttttttttttttttgagatggagtcttgctctgtcgcccaggctggagtgcagtggcgcgatttccgctcactgcaagctctgcctcccgggttcacaccattcttctgcctcagcctcccgagtagctgggattacaggcgcccgccaccacgcctggctaattttttgtatttttagtagagatgggatttcaccatgttagccaggatagtctcgatctcctgaccttgtgatccgcctgccttggccttccgaagtgctgggattacaggcgtgagccactgtgcccagcctgcttgattcttttaaattatttcaatctctttgctaagtttatctgttaggattctgaattccttctctgtgttagcttgaatttcactgagttccctcaaaacagctattttgaattctctgtctgaaaggtcacatatctctgtctctccagaattggccactggtaccttaattagttcatttggtgaggtcatgttttcctgtatggtcttgatgcttgtgatgttcgtcagtgtctgggcattgaagttaggtatttattgtagtctttgcagtctgggcttgtttgtatctgttcttcttaggaagactttccaggtaataaaagggacttgggtattgtgatctaagtttttggtcactgcagccatatctgcattagggggcaccccaagcctactaatactatggctcttgcagactcgtaaaggtaccacttgggtggtcttggataagatctggaagaattctctggattaccaggcagaggctcttgttctcttcccttactttctcccctaaaagtggagtctctctctctgtgctgggccgcctggagctaggagaggggtgacacaggcacctctgtggccactatcactaggactatgctggctcagacctgaagccagcacagcactgggtctcacccaaggcctacagtctccactgcctggctactgcctacgtttgcttaaggcactagggctctacagtcagcaggtggtgaagccagtgagattatgtccttcccttcaaggcagcaagttccccctacccccatcctgggaaggtccttagatgccatctgggaggcagggcctgcagtcagaaaccttagtaatctccccagtgctctattctattacagcctggctgatacccaagccataaggcaaagtccttcctgctcttccctcccctttccacaagcagagaagtctctctccatggccaccactgccccagccctgtggcagtgctgccaggccactgccaacgttcattcagggcctaagggctcttgaagcaactgaacactgccaggcctgggactctccctttagggtagtgggctcccctctgacccagggcaggtccagaactgccaccccacagccaacacttagaatctgggaccccaagagccctcttggtgctctgccacactgtagctgagctggtacctaggctgatttttgctttttatgaaggtacttttttgtgtgtatagttcaatttggttttcctccagggaggacaattggtggaggtttctatttgggcatcttttttttttttttttgagacggagttttgctctttcacccaggctggagtgcagtggcgcgatctcggctcactgcaacctctgcctcctgggttcaagcgattctccagcctcagcctccccagtagctgggattacaggtgcctgccaccatgcttggctactttttttttcaattaaaaagtaaactttaatgtcgaaaatgcaaacttggggaaggcagaaagatcacacacaaggctgtcgcttcacacttggaaggttgcacggcggccaggagaggcactcctcacttcccagacagggcgggggccgggcagaggcgctcctcacttgccagacggggcggcggccacatgcctggctaatttttgtatttttagtagggacggggattctccgtgttggccaggctggtctcaaactcctgacttcaggtgatccacgcacctcggcctcccaaagtgctgggattacaggcatgagccaccgcgcccagccctatttggccatcttgctttgcctccaccttcatttgataacagaacacccccatgtaaccaccaccacaatcaagatataagacatttctgttattctccaaatttccttcaccctcctttatagtccatggcacccaccccatccctgggcaacacctatgtgcttcctttttttttttccccgcaggaggacgtcttcctatacctatgtgcattccatcactgctgcttttaatcatatagcgtgtagtcttatgagtctgactttttcacttagcataatgcttttgcaatttgtgattgagcgttttcatatgattctgttttttctgtctcttagcttggaagttatacactttttagtagtaactgttgggagatcgttctccaagagtctctctcatatttccatacatcctgctagcagagacattgactacctgtttttgtctgtttagtgttgctataaaggaatacctaagtctgagtattatacatagaaaagaggttttatttgtctcatggctcctcaggccatacaagaaacatggtgccagcatcttaccagtgtcacatggcaagaaaggaagtgaggaagagaaaataagttgttaactggttgttaaaaagtgccaggcacgggccaggcacagtggctcgtgcctgtaatcccagcactttgggtggccaaggcgagtggatcacctgaggtcgggagttttgagaccagcctgaccaacatggagaaaccctgtctctactaaaaaaaatacaaaaaaattagctgggcatggtggtgcatgcctgtaatcctagctactcgggaggctgaggcaggagaatttcttgaatccaggaggtggaggttgcagtgagccaagatcacctgggcgacaagagcgaaactctgtctcaaagaaaaaaaaagtgccaggctctttttaacaaccagttcttacaggaactaatagagtgaaaactcactcacccccaccccacagggagggcattcattcatgagggatccacccctatgacccaaacacctcccattagccccccacctccaacattggaatcaaaatttaacatgaggtttggggggcagaaatccaaattatagcactacctttgttccaggctaccttcaaaggatgtttatacagcaaacagccttggaaaatagagttagggtctccttgtagagcacagggtaagtttgcttacttttcagcataatcaagattgtgtcttcttctggagcaaaactttgacaacaacaagcggggcaaagtctgaaaccttttgcacatcttgacagaaccttagagattacgagatttatctctgccttactcaaggtccattagtatcttccagaacaataagttggtcttagaatcctttagctatgtattcccttccaggcttcgatgctgtgtgctgttgttttatttagtttttattttaaacccaacaagacgctataccatcaatacttatttagatccccccacatatttaacttgccatggtgcttcattctttcatgcctctttaagcatccatctaggatcgtgttcattccacatgaagagaaagcttttggcccagcacgatggctcacacctgtaatcccagcactttgggaagcctaggcgggaggatcgcttgagcccaggatttccagaccagcctgggctacgtggcaaaaccctgtctctactgaaaatacaaaaaattagccaggtgtggtggttcacgtccctgctactcgggaggctgaggtgggaggattacttaaacctgggaggttgaggctgcagtgagcgttgattgcaccactgcactccagcgtgggtgacaggagtgagaccatgtctccaaaaaaaaaaaagaaggaaagaaaaagcttttgtatttcctttcgtgtaggtctgctaatgacaaagtctctgggttttttgtttgactagagaaatgttttaattttaaccttattcttgaaggttttgtttttgttttcattttgttttgtgtgctaagtacagaattctcattggcatttatttatttagagacagagtcttgctctgtggcccaggctagagtacagtggcacgatctccgcctcccaggttcaagcgattctcctccctcaacctcctgagtagctggggctacaggcatgcaccactacacctgactaatttttgtatttttagtagagacggggtttcaccgtgttgcccaggctgatctcaaactcctgagctcaagtgatttgcctgccttggcctcccaaagtgctgggattataggcatgagccgccgtgcctggccagcatttattttcttttcagctctttaaggaagtcattccattatctctgggttccattgttgagaagccagctgtcattctaatggttgccctttgaagataacttttttccctctgctattttaaatatttcctccttgtattttattttcaacaggtgtaatgtggcacatatatcagcaattgttatgttacatacaatacatattgtgcaacatatgtatcattatcagttattgctgtgtaacaaactactccagaacacagtggcttataaaaggaatcatttatttagtccttaaatctgcaatttgagcagagctcagtgggaaagcctcagctttactttatatggcaccatataaggtaactcgcaactggcaagttggtgctggctgttggctggtagttcattcagggctcagggcccaggaccaagagtcgtcaccatggcttgcttcagcctccttgaggcatgatggctgggtcccaagagaagagaaatagaaacttccagtctcttaaggcattggtctggaagctgggacggcatcacttttgccatattctgttggtaacgcagttacatcgccagattaaagggtaaagagatacaaattcccactgctcagtgcaaggaatatcagtgattttagggggccctgttttaaaacccctacaaggtgctaagcgtggatttctggggctttcttgttttttgtttttttctatgtgtttttttttttttttttggtggtggggtcagggagggcttatagggtatgttaaatcagcagaataattttatttatttatttggagatggagtttcactcttttgcctaagctggagtgaagtagcgtgatcagagatggagtttcactcttttgcctaagctggagtgaagtagcgtgatctcggctcactgcaacctccgccccgctggttcaagcaattcccctgccttagcctcccaagtagctgggattataggcacccaccgccacgcccggctaatttttatatttttagtagacatggggtttcgccatggctagtctggaattcctgacctcaggtgatccacccaccttggcctcccaaagtggtgggattacaggtatgagccactgtgcctgacctataatgttttttaaaaatcagttttggaaagtttgcagacattaacttttcaaatgtagcttccatttgattctttttctactctgcctctgatcctccacttatgtatgtatgctagatcttttattagatagtctgtgtctcttatgtactctactatattttgtattcttctgtctctccatgctttattctgtttactctttcctgattatattttttaattttgtaatttccatttgatgcttttttgatcattcaaaactcttcaccaaaattctaaatttccttttttaacctctcgaatgttatcacagttactttaaagtctattttggataacttaaatatttacagtcccctcacagatatgtttcttttgtatattgtttctgttggttttctttcatgtcttatctccacatatgcctggtgagttttgattatgtgttggtcattgtatttgcaagtatgctcgtagaaataatctggaatggccgggcgcagtggctcatgcctgtaatcccagcactttgggaggctgaggcaggtggatcacgagatcaggagatcaagaccatcctggctaacatggtgaaaccccatctctactaaaaatacaaaaaattagctgagcatggtggcacgttcctgtaatccctgctactcgggaggctgaggcaggagaatcacttgaaccaggaggcagaggttgcagtgagccgagatcacgccactgcactccagcctgggtgacagagcgagactccgtctcaaaaaaaaaaaaaaaaaaaaaaaaagaaataatctagagcctagtttgatgtttccttacaaagaatgaatttatttttgcttctcccattgcaactaggataacctcagtctagtttctggaactgaaatcacttgaggctgaactgtggtctctgtgagagcgtgtctgtgtatggctcacccttattcctaggctacgtagttctttaggaccctaacccaaagtaagagatgttcatcagggctctcctcttggcagacgcctgggctccagtccctgtgtcctgagccccatgaggctgttactggtgctgctcgtctgcccatcctctccagtaacagccacctgaacactgcaattcctgggtttccatcattccttccagcctggtgagtcatcagtgtcttttgaggtatccagtgcctgccagcagatgttttttaataatttgtccagcatttctggctgtcctcagtaggtggtctgtttcacattccctagtctgctgttaatggaaagtggaagttctgagagagaatcatcgttcccgtcagcattcaaatgcctgattacactttccccattcgctatcctttcctttatttgctcctcaccacagcaaaactcctcaaaaatatctatctttgcaatcttcagattctcacattgtgtccttaaacccactttaatcaggccttggttccctccattccactaaaagtaatgttgtcaaggtcgtgcatgcctccgtgatgctaattccagtgatgagttttcagttgtcattctctgacatatcggcaacacttgatgtggagtaccctgatgttgagaggctggtgagatgaaggaaaaacccagccaagggcaatgaggaatggcttccttccgcctcctccttccctatctttgttgtggtttttgttgtttctgtaacactgattacgttatagtttatttaatgtacttccttattctatgtttttactttagtcattttgttgatctcctccataataacataggctcgggccaagcacagtggctcacgcctgtaatcccagcactttgggagaccaagatgggtggatcacttgaggtgaggagttcgagaccagcctggccaacatggcgaaaccctgtgcctactaaaaatacaaaaattagctgggcgtggtagcaagcgcctgtaatcccagctactagggaggctgaagcaggagaattgcaggagaatcacttgaacccagggggcagaggttgcagtgagctgagatcgcgccactgcactccagcctgggtaacagagtgagactctgtctcaaaaaaaaaaaaaaaaaaaaggcttcaggagggcagagcattttatgcaattgttcattaattgacccctccatttggcacagatcacatgcccagtagttaactgttaatcaacgcactctctgtggaacaacaggctggtcccgttgagccaacactctctgggcactgccttcactagactctggctggctgctgcgcttgtagaggtatgcaagacaaaaccttttggtatgttaaaagccctggtcagaactttaagtaaccatcactgacatataatggttatggttttgaaagtgcttttatagtggtttttcatctgtcctcacagcacctctgggaggtaggtaggacaggtacagttagtctcatgtttcaaatggggctcagagagggaaaaggatttcccaagatcacacagcaccttagtagcaaaacttggactcaacctcaacacttaaaaatgaacaaagctggccgggcgcagtggctcatgcctgtaatcctagcactttgggaggcccaggcaggcaggtcacctgaggccaggagtttaagatcagcctggccaacatgacaaaactctgtctcttctaaaaatacaaaaaattagccgggcatggtggcgggtgcctgtaatcccagctactcaggaggctgaggcaggagaatcacttgaacctgggagatggaggctgcagtgagccgagatcgtgccattgtactccagcctgggcaacaagaatgaaactccatctcaaaaaaaaaaaaaagaaaagaaaagaaaaagaaaagtttccctttttttaaatatctcattttaatgactgcataatagtttattacatagttataccataatttatataatattttgttgctgtacatttaggttaaacaatacttacttagttcctactatgaagaggggccaagtactcgaggctggagctctcacatgtggcaatgaaattagaaagtggatatggcagggctgtggtaaaataaaatataaaaataataaatgatattaccaaagaaaaggaaagtttttcaaaataaaggaaaatctagacaagcatagtggctcacacctgtaatcccagtacttttggaggctgaggcaggaggaacacttgaggccaggagttcaagaccagcctgggcaacatagcaagaccccctgtcaacaaaaataaaaaaaaattaggccaggcacagtggctcacggtggctagtgcctgaaatcctagcactttgagaggctgaggggggtggattgcctgagctcaggagttcgagaccagcctgggcaacatggccaaaccccatctctactaaaaacacaaaaaattagccaggtgtggcagcacacgcctttaatcccagctactctggagactgaggtaggagaattgcttgaacccgggaggtgaaggtcgcagtgaggtgagattacaacactgcactccagcctgggtgacaaaatgagactctatctcaaaaaaaaaaaaaattagctgggcatggtggtgcatgcctgtaatcccagctactcaggaactaaggtaggaggatcccttcagcccaggaattcgaagatgcagtgagtcatgatcacaccaccgcaccccagcctgggttacagagcaagaccttgtctctaaaaaacaaagaaagtctaacctaaacgccattatgtcatttacatgtgtataggggtgtgtgtgtgtgtgtgtgtgtgtgtgtgtgtgtgtgtgtgtgtgtgtgtttgcttgggaggggagtcgggctggagctggccaggccgcagcctggggaccttctgattccagcagggatgtgggccgagggtcccgccttactcatttcgggtcttgctcctctgtcctggctctacagactcttccagctggagttggaggctgacgccctagtgaatttccatcagtattcttcccagctgctacccttctatgagagctcccctcaggtcctgcacactgaggtcctgcagcacctgaccgacctcatccgtaaccaccccagctggtcagtggcccacctggctgtggagctagggatccgcgagtgcttccatcacagccgtatcatcaggtgagcaagggaacaagaccatttggacaacgtgtgtgtacctgcttgtgtgggcagtgggggccgcaggcctcggttcccctccatagtttgacttaaaaaggagcagggcctggcatggtcgctcactaacgcagtcccagcactttgggaggctgaggagggaggatcacttgagactaggagttcaagaccagcctggcaaaatagcaagaccttgtctctacgaaaaaattaaaaaattagcatgtgtctatactcctagctacttgggatgctgaggcaggaggattgcttgagcccaggagttagagtttacagtgagctatgattgcaccactgcacttcagcctgggtgacagaatgagaccttgtctctaggaaaaaaaaaaaaaaaaaaaaaaaggtgctgcgttgctaccagattaaaatgtaagaaggacaatgtaatgtttccagagtccggagtgctcaccaggtgccaggtctgtgggagctgatttctacccaccatgaaattgaattttcccaacccccacaaggtatcgtcattttattttactttattttattttattttattttattttattttattttattttatgttacgttatgttattttattttgagacggagtcttattctgtcacccaggctggagtgcagtggcgcgatcttggctcactgcaccctctgcctcctgggttcaggtgattctcctgcctcagcctccggaatagctgggattacagtaatgtgccatcatgcccgggtaattttttttttttttttttttttttttgagacggagtctcgctctgtcgcccaggctggagtgcagtggcgcgatctcggctcactgcaagctccgcctcccgggttcacgccattctcctgcctcagcctcccgcgtagctgggactacaggcgcccgccaccacgcccggctaatttttttgtgttttttagtagagacggggtttcaccatgttggccaggttggtctcgaactcctaacctcaggtgatctgccctccttggcctcccaaagtgccgggattacaggcgtgagccaccatgcccggcccaggtatcatcattctagagagagctaacaggacttgtgcaggtcactcagccagagagggtgaaagaggggcttggatccttggtgtctgcccaggctgctcttctggaagctgaaggcctccttttgtgaatccattcagccagcagatggagcagctgttgcccctggtgagggcactgtccccacccttgcacagggcaccagttggccatcttgtgcagaggtagccacacctcctctgagtctctatcctagatagctcagttaagctcccaggcccagaactcaaaacctcactgctggccgggcgtggtggctcacacctgtaatcccagcactttgtgaggccgaggcgggtgtatcacttgaggtcaggagtttgagaccagcctggccaacgtggtgaaaccccgtctctactaaaaatacaaaaaattagcaaggcgtggtggcgcacgcctgtaatcccagctactcgggaggctgaggcaggagaattgcttgaacccagaggcggaggttgcagtgagccgagattgtgtcactgcattacagcctgggcaacaagagtgaaactccacctcaaaaaaacaaaacaaaacaaaaaccctcactgcactttagtttccaggcgtgcttttggacagcactgtctcatctcaccatcactctgtccatttcctggggcaggcacagcagcttgtgtcgataaggatattgacgcccagaaaggttaagtgaattgcctgaggctagtgagatatccgtgttctgtgaccctttcctgtgccaccaccctgcccacttcctgctggtgtggccctggggcccatctcttgtacgagtgagcaaactgaacagaaacctgatacaggtcacatcagatataattacattcaaatcagcccaactagctgagtggcgggaatgctcttgagctcaaataaaccagaaagtccgagtttccgagtgcacttccctgcatgtgcacttaggtccccctgccaccttgtaccacacctgctcacctctgctcaccctggccctctcctgcagctgtgccaattgcgcggagaacgaggagggctgcacacccctgcacctggcctgccgcaagggtgatggggagatcctggtggagctggtgcagtactgccacactcagatggatgtcaccgactacaagggagagaccgtcttccattatgctgtccagggtgacaattctcaggtgctgcaggtgagcagggggaggggcagggtgactggtactgatacctcccggtgtccacggttccctttgggcccctaggctcaggtgtcactctcaggcctctcactgtcccccattggtccttgaggcctgagctccttcatggagggtgcagacccctccctggctcttccctcccagcccttttccaggagccacgtcctcagtctctttgcttgataaacctggggacggcctccaacccagcaaaataaaccccaaaaaaggcccagctccagtcagttagttcagttccacttttcctgagcacaaactgtgagccagatgcctgcctggaggggctcgtgggccagcgggacctgggcttaaccttttgcaagcttgtccaatctgtggccctgcaggctgcatgcagcccaggacggctttgaatgtggcccaacacaaattcacaaactttcttaaaacattatgagatccatgcatggaccttttttttagatcagctgttgttagcgttcatgtattttatgtgtgacccaagacaattcttctgatgtggcccagggaggccaaaatattggacaaccctattttacaggaattcaaaccaagcaaaccaaactgtctccagttcctgtaggcatttgtgccagaggccctcctgttaacgtttttgattacctgggcaaaagatgtgattttttaattgtgggcaagcagatggggtgatactattaaatagctatttcatatattagattgaacagaaaaggcaggatgttggattatgttttattgtctagaattagaaaattcttctaaagatcatgttctctctgccttggcatcagaatgcaactacgttataccagaaaatgtggattcctttttttttttttttttttttttttttgagacagagtttccctatgtctcccaggctagagtgcagtggtgcgatctcggctcactgcaacctccacctcctgggttgaagtgatgctcgtgcctcagcttcctgagtagctgggattacaggcatgtgccaccatgcctgggtagtttccgtatttttagtagggatggggttttgccatgttgcccaggctggtctccaactcctggccttaagtgatccacctgcctcagcctcccaaaatgccgggattacaggtgtgagccactgtgcccggcccagaaaatgtggattcatatcttatgcttcttgctctcagggaagggaattctccacccactgttgaactccactttcaccgagaatcctctgcgcacccagcatggtgccgcgcagaccctgcctccatgcgggggtgtgcacacccgcttctcgatagtcatgcacgactgcagctgtcctttatccggtgctgattggtgcctgaccttgaactgagtgttgtatgtgttccagttaattcttagaatacactcatggggtggaggtcattattcccctttcctctccgaagaaactgaggttcagtgttgttaattaagaagcgtgcccagggagggccacaaagctgagagagtggggcttgaccttacattggcctcgatgccagccctttgctcttcctgctgtgtctctggcctgccttcaggtccagtgggactgctgtgaggtgaccctggtgtcacatgggtacactgtggttgtaatgaacctcatggggacagcactgagccaaaagtgagacagtaaaaccctcctagcactttcttttttttgagacagcatctagctctgtcgcccaggctggagtgcagtggtgtgattgtggctcactgcagcctcaacctcctggactcaggtgatcctcccacctcagcctcctgagcagctgggactacaggctcgtgccaccacatgggctaattttttttttttttgagacggagtcttgctctgtcgcccaggctggagtgcagtggcgcgatcttggctcactgcaagctctgcctcccgggttcatgccatcctcctgcctcagcctccagagtagctgggactacaggcgcccgccaccacacccggctaattttttttgtatttttagtagagacagggtttcaccgtgttcgccaggatggtcttggtctcctgaccttgtgatccgcctgcctcggcctcccaaagtgctgggattacaggcgtgagccaccacacccaggccacgccagctaatttttaaaatttttttggtaaagatggggtctccctatgttgccgaggctggtatcacactcttggtctcaagtgatcctctcacctcccagtgtgttggaattacaagcatgagccactgcgcctggcccctggctctctttttaatactgctgttctttcattgaaaacatagtacctgcatgtagaaaaaaatcagtcaggacagaatgaaaagcaagaatcattcccacctggacccccagtgcccatcctgagatacagctaccttttaagttccttgactcagaaatgtttcatgtgagccacagtcatgccaggtcgaccccttccctcccatccacactggcacttggctttcctggtgcttctctttacgttctttttttttagacagagtttttgctctattgcccaggctagagtgcaatgatgcaatctcagctcactgcaacctctgcctcctgggttcaagcgattctctttcctcaggttcctgagtagctgggattacaggtgcctgccaccatgcccggctaatttttgtatcgttagaagagacgacatttcaccatgttggccaggctggtctcaaactcttgacctcaggtgatccacccaccttggcctcccaaagtgctaggattacaggcatgagccactgcgcccggcctctttacgttcttatcagcatcctatggagtcaaacttcccttcctctttcatcagctccttggaaggaacgcagtggctggcctgaaccaggtgaataaccaagggctgaccccgctgcacctggcctgccagctggggaagcaggagatggtccgcgtgctgctgctgtgcaatgctcggtgcaacatcatgggccccaacggctaccccatccactcggccatgaagttctctcagaaggggtaagacctcctcccctccccatctgctggcctgctgggctccagctctcctgtcacctgtcccgtgcctgaggcaagcagtatccaccatagatcttagcatctccagcctcagagcagaggccccgggttcacaagcctcattaggccccgcctggcccaaagaaggtgctccatcattgtatcatgggtaggaatctcggttcacaagttcagctgtgcaaggaggagactttaaaatttttctggctgggcgcggtgtctcacgcctgtaatcccaacactttgggaggctgaggtgggcagatcacctgaggtcgggagttcgagaccagcctgaccaacatgaagaaaccccatctctactaaaaaatacaaaattagctgggcgtggtgacacatgcctgtaatcccagctacttggaaggctgaggcaggagaatcggttgaacccgggaggcggaggttgcagtgagccgagatcgcaccgttgcactccagcctgggcaataagagcgaaactgtctcaaaaaataaataaataaataaataaataaataaataaaaataaatttatttaatgtaccttaattcctaggagtgaatctccctctataaaactggagacaaccaatcttagccctctttggggtctcctctttccagctcccctccaggtggtgctccagttctggagtctgatgcaaccccaaggcccacctggcccctcctctaacccagcccagcctgatctgaacagccccccgatggcttcagtgctccttggtttcttgtgtgcccagctcaaagcctgggaaatgcttggtaaggtggccgagtgcccgtccacctagatgcctctttcctttctggctggtggcacgttgggaggcaggtacaggctcatgttttgggagcctgggaacccctggtgtcaggaaaattgtcttcaaaggggtaggggatgagataaaaagataaatgaatatctcaaatctcaaaatactatctaggccaggcgcggtggctcacacctgtaatcccagcagtttgggaggccaaggtgggtggatcacctgaagtcaggagttcgagaccagcctgaccaatatggtgaaaccctgtctctactaaaaatacaaaaattagccaggtgtggtggtgtgtgcctgtagtcccagctactcaggaggctgagacaggagaattgtttgaaactgggaggcagaggttgcagtgatttgagattgtgccacagcactccagccagggcgacagaacaagactccatctcaagaaaaaaaatactatctaacaggaacaacatctagaatgaatgaatgagccaatgagtccttcgatcctggcactgtgctaaagcaccagcctcaccgaaatgaataagccactccaggacaggagacaccccagccacccagaatctcatagcgcagtgccagacaagcagtgagaaggcatggacgggcagcactcaggcagggaggctggcacttgtgcctgtcctcaggttgttccttcctctgggagctgcatccaccttgctagccccatggggcattgctagcccttctaagggctggaccaagcctggacaaaccctcctttccttgaatctcccaagcacagccagaatgagctagagctttcagaaatacttgaccaaacagagaagataccaacacccccagccccgcagtcaggttccccatttgcaggttgtgacctgagtggacaccaggtgatgctcttctctacccagagggctggcacatggccccactcttgcttgtctccagccaccctgagctgtactgggcaggagctgtaattgaccagttttctctctcttcaaacaacctcagccctcaccggtccctctgtccccacacaggccatcctgggtgggtccagcgtcccatcacataagaggatctttgcacagaagacaaaggaagaggctcctaccttgagtggagcagggagatcccttatcgacttggcagccagcacagccctactccaagaatcccacggcctcagtgttactgacaagtggttccctcacagctcagactaggagctccctcgctgtttttctttttcttttcttttctttgttttgtttttgagacagagtttcactctgtcacccaggctggagtgcaatggcatgatcttggctcactgcaacctctgcctcccaggttcaactgattctcctgcctcagcctcccaaggagctgggattacaggtgtgcgccactatgcccagctaatttttgtatttttagtagagatggggtttcatcatgttgaccaggctagtcttgaactcctgacctcaggtgatctacttgcctcgccctcccaacatgctgggattacaggcgtgagccaccgcgcctggccacctctgctgtttttcaatgcagctgacctttcccacaaagctcggtttgtgcctgcggttctcagatggttaagcccctgctgaggaagggaaacagataatcccagacagtgagatggaggctgagactgaggatgcctgggggctgcactaggagctcagagacggcatcaggcagctggagttcagggaaggtttgggggcagcagagcccgagccaagccatggacactagccggagctggccactcgggtgaagacttggggggctccagagggcccagggaaagaagctgggcctgactccatgtgcctagtgctgagcaccaagcgctggcataagggctgtagggagctgggcagcataaatcctgggcctgtgctgggcacccctaataatagagaacagcagctgaacactaacgctgtcccagccaccggcttagccttcatgtgggctatttcactatagcccagagagctgatgtattttattccccctctaaagctgagggccaagtgtggtggctcatgcctctaatcccagcactttgggaggctgaggcaggaggatcgcttgagcctaggagtttgaggctacagtgagctatgatcatgccattgccctccagcctgggtgacaaagggaaatcctgtctcaaacaaacaaacaaaaaacagatgaggaaaccagggcttagagagattaagtaatttgctcaaagtcaggcagtcagtaagtgccagacctgggaattaaacccatgtgggctgtcctagtaattgcactaaaaaaaaaaaaaaaaaaaagctttattgagatatagttcctattccatacaatccacctattgaaagtatacaatgattctgatatattatgtttattttttccaactgtgatagattatatataacataaaatttgccattttaaccacttttgttttttgtttttgagacagagtttcgctctcgttgctcaggctggagtgcaatggtgtgatctcggcttaccgttacctccacctcccgggttcaagtgattctcctgcctcagcctcccgagtagtagctgggattacaggcatgcaccaccatgcccagttaattttgtattttttagtagagacagggtttctccatgttggtcaggctggtctcgaactcccgacctcaggtgatccacccaccttggcctcccaaagtgctgggattacaggcgtgagccaccacacccggcccattttaaccacttttaagtgtacaattcggtggttttaatcacatttacaatgttgtccaaccattacccctttctaaaacttttcttatcacctcaaacagaaactgtaaccattaataactcccgattctcccctccccacagcccccgataagtcccatatcctctctgtctctcagaacttgcctgttctagaacctcgtatcagtgaaatcatacagcgtttgtccttttgtgcctggcttatttcacttagcatgatgtcttcaaggctcatccatgttgcagcacgtatcagaatttcctttctttttaaggcagaatactattttgtttatccattcagtccttcactgatagacgcctgggttgtttccaccttttgtctgttgtgaagaatgctgctgtgtacatgggtctgcaaatgtccattcaagtccctgcattccgtcctttgatacttccgacctcaggtgatccgcctgcctcagcctcccaaagtgttgggattacaggcgtgagacaccgcgcccagccagaaaaattttaaagtcttctccttgcacagctgaacttgtgaaccgagattcctacccatgatacaatgatggagcactttctttgggccaggcggggcctaatgaggcttgtgaacccggggcctctgctctgaggctggagatgctaagatctctggtggacactgcttgcctcaggcaccgagtagaaagcaattgtgctctttcccactctgtcatactgcttcctatagcatgcaggtcactgtgtgactcactgacagtgtggtaaggaggtggagggtggctgtgtgccaggcacagaactgggctctgaaatgcctggtcttccttacaccccagccactcctctcagcactctctccatgttgctcagcttctggaggccaccagtgaggaagctggggcttgacttcaagcccatctgactctaaagccagtaccagggagggtgatcattgctggtggcagcatcaggaaggcttcctggaggagggggttagttgtgccttgaggggctcagtacagccttaaccatggtgagtgtgctggttgggtttgctgaactttgtttgcagtgatgctctctgtaagcagtagatgaagctccaagtcctggcttcatcccacgccacgcagaccctagcttctgctcaccaaccggggcccctctctcaccaggtgtgcggagatgatcatcagcatggacagcagccagatccacagcaaagacccccgttacggagccagccccctccactgggccaagaacgcagaggtgagtggatcctgaggtgggtgggtggggcagggggccgggccccgcaggtcctcagggccctcaggaagcaggttcccgagaggaccctgaggctagcacttgggggctgaccttgcagtgggtgtgcaggcagagaagtccatgaagagctgggatcctggcagggctctgctgctctctggctgggcggggggatccgccctgtgcctcagtttcctcatccatgaattctgctttggcgatgtgatgaagtcagcaaggcagtgtgtgacaaaactcggcacaaattgtaaagtgcttcccaaatagaaggtggcgtgatgatgattgtattattagtcaggattctctagagggccagaactaacaggagatatatatatagagagagaggggggtttatttttttattttattttttttgagacggagtctcgctctgtcgcccaggctggagtgcagtggcacaatcttggctcactgcaagctctgcctcccaggttcatgccattctcctgcctcagcctcctgagtagctgggactacaggcgcccgccaccacacccggctaatttttttgtatttttagtagagacgaggtttcaccgtgttagccaggatggtctcgatctcctgacctcgtgatctgcctgccttggcctcccaaagtgctgggattataggcgtgagccaccgtgcctggcctaaagggggatttattaaggagcattaactcacacgatcacaaggtcccacaataggccatcgcaagctgaggagcaaggaagccagtccaagtcccagagctgaaggacttggagtctgatgtttgagggcaggaagcatccagcacgggagaaagatgtaggctgggaggctaagccagtctagccttttcacatttttttctgcctgctttatattctggccgtgctggcagctgattagatggtgcccacccagattaagggtaggtctgccttcccctactgactcaaatgttaatctccgttagcagcaccctctcagacacacccagggtcaatactttacatccttcaatccaatcaagttgacactcattattaaccatcaagatgatgatgatgatgatggatgatgatggtggtggtggtggtgctgggcctagctgcacacacagggagcctggctgggcatctcctctgagttcttcccctaagctaagctctgtcctcctgggaggatggaggcctctggtctcatcaccaggaagcacagcttgacagagaatgggatgccccagagttcatggcctacttctcaatgtgatgggccaggagggagggcactgccagcctcagggtacctctgcattccaggagccggacaccgagtcaggcccttccgtgtaggtttggtcactcattgtcatcacatgctgtgaggtggggacttgcattcccatcttcacagaagccctgaagtgcacatggctacagtgacccatccaagcgcaggcagctgggatgagtgaagctgggctttgggctcaggtctgtgactccaaagccaggctcccctccctgttcccaaggctctgccagggatgtgcattgccaaggcccagtgagaggtgatacctttgcagggttccagggagggatgcagggagcggggtgcttcaggacaggccccagaggagcctttgcaaggagagtgggttctgttggcactaggaaaggaccagaagcctcttaaaacagtcagcacatctttggctttttgtccctagtcttgggatgctgatgggatgggaggcagtctaggcccccctagaactggggcctgcccctggaatcctcttgctagcgctttccaacatcccagtacctgtaggcctctcagagcagaagtggcagtgcccacgtgtcccggggtgcggcagctccccgagtgcctgtgctaactcagcctgaccgtctcccgcagatggcccgcatgctgctgaaacggggctgcaacgtgaacagcaccagctccgcggggaacacggccctgcacgtggcggtgatgcgcaaccgcttcgactgtgccatagtgctgctgacccacggggccaacgcggatgcccgcggagagcacggcaacaccccgctgcacctggccatgtcggtgagcccaggaccgcgtgtcctgccctgtggggccccggtgggaatgcaggagggctgtccggactggagccctcctccccactgtctccctcctatcgtcagctgctccaaatcatcttcccacccaaagctcagttcagaccctgactcctccctcaggaagccttccaagtccccctctcagcccaaaataacaccacctcctgtgtgctgtggtaccttttccacctgtgcccccatttggcacttgcatggcacgagagggaaaaatgacagctctggccatagactggccctgagcaagccatgtcacctgtcagcctcgatttcctcatctggaaaatggtggtgtcaatacttatctggaagagttgtggaaaagttatggtggacacttggtcaccctctacagaatgtctaagtgacacacgcagtacctggcccgagtgagcatcctgcttcccttcactggtccgcgtgttgctctcatcttccctgggaggctgtaagatcctggcaggcaaagcctgagtgtgcagcccagcagcctgtggcaggtgccaggcatattcgttggtttattatagaacacagttcctgccctcaaagcccttactgtctggttacacatctagagtatgaacatattaaacctagcagaggaggacgttactgtgttacagacatatgtgtgtgcatgtattcttttttttcgagatggagtctcgcactgtcgcccaggctggagtgcagtggcgcgatctcggctcaccacaacctccgcctcccaggttcaagcgattctcctgcctcagcctcccaagtagctgggactgcaggcacgtgccaccatgcccagctaatttttgtatttttagtagagacggggtttcaccacgttggccaggctggtctcgaactcctgtgttggccaggctggtctcaaactcctgacctcatgatccacccgccttggcaccccaaagtgctgggattacaggcgtgagccaccgcgccccaccgtgtgcacgttttctatagcaataccgtatgtacagaagtctgtttactgagtctcagtgacagaacatgagagacccccgggactctaaaagctgattcaggacacattcagagacatcctgttttataccaaaggtcaaaacttggaagagatgttgttgcccaaaaggctgaaactataaatagtttcatttttgaaactgtggacatttttagcactgggtgggcccttggaatgatctaactcagcagttctcaagttttttggcctatttgatccctttatactctgaaaaattattgaggatcacaaagattttttaatcatctggattttctttatctatatttaccattttagaaatttaaagtgtgaaaatttcaaaatattaattcatttaaaaataacaataataaatatatatgcctactatgtacccacaaaaattaaaattaaaaattttttaaaaaacttaaaaaataactggccagctgcagtggctcgtgtacaccagcactttgggaggccaagatggtcagatcacctgaggccaggagttcgagaccagcctggccaacatggcgaaagcccatctctactaaaaatgcaaaattagctgggtgtgagacctctgaaagggtatcacgtgttcacaggggtccccaggtcttactttaagaactgctgatagactttggtcatcttcatcccatcttcacagtttttggcatattcatcaaccacctttacaattatgtacttaatcacctcttcaaattggcttacttttatttatttattttgagacagagtttcgcttttgttgcccaggctggagtgcaatggcacgatcttggctcaccgcaacctctgcctcctgggttcaagcgattctcctgcctcagcttcccgagtagctgggattacgttcatgcgccaccacacctggctaattttgtatttttagtagagacggggtttctccatgttggtcaggctggtcttgaactcctgacctcaggtgttccacctgcctcagcctcccaaactgctgggattacaagcgtgagccaccgtgcccggcctggcttacttttaaactgacttaaatttattttgagagaaatgttgcatcactaccataaatggccatccatccatccagtgccaaccataaaaggtaaccaatgcagggcgcggtggctcacgcctgtaatcccagcattttgggaggccgaggtgggcgaatcacgaggtcaggagttcaagaccagcctggccaacatggtgaaaccctgtctctactaaaaatacaaaaaattagctgggcgtagtggtgggcacctgtaataccagctactctggaggctgaggcaggagaattgcttgaactcggtaggtagaggttgcagtgagctgagatcacgccactgcactccagcctgggtgacagagtgagactccgtctcaaaaaaaacaaaacaaaacagtaacaacaacaaaaaatcacagttaatgctgaaaacacacacatatctgtagccatagaagtcctaatagaatgtgaagaactgtttggaaaaccccattctagacccacagcttcattctctaggcagggaaatcgggtcccaagaagaggaaggtgacaaggccagagcccacagttccaggtggccagtgtgtcctctgaaaccatgccatgctctgcgcccctgcccggcctccaggtgtggaaatgtgtgacgttcttcgtggggacactcccccgaaggctgccattaggggcacgtgtgttcggttacccctcagggatgacaccctggactgggtgggcaagatggccttccctgccctcacccaccctctccttgctactcctgaaagccatcagcagctgacctactgtgtccccatggctcctgggtcggggtcacagatgcactgcatctttggaggcggagctggcagagcaggggcgagtcacttctagtttctgcctgggttcttacaccctcccctgtgggtgcttttaagcctgtttgtcaggtccccagccatcaaatggcagactttggactaccagattgacttgggtgggggtgaggagggttccagtgtctccccgtgctgaggagaggcccgctgggtgagttgacaggttggggctggcagccaggggcccctttgttcttcacttccccggcagttgcacgtcttatcctctctccatctccaacagaaagacaacgtggagatgatcaaggccctcatcgtgttcggagcagaagtggacaccccgaatgactttggggagactcctacattcctagcctccaaaatcggcagacgtatgtgctctgcactctggggctggagtggggtgagggttgggtggatacagggaccgaggaggagggaagtcccaggcatcaggtgccagcatcctgtgctgacccgccctgctcagagctgccaggagcacctcgtactcagagagggggcttccttacccaagcacaagggccctgagcagtagatgcaggcccaccacggggcttgctataccagcatcctctcccgtgcagcgccccccacctcagggagctaagattcccagcaggggtggggacaggagagccagcagcagccttctttccccaccgttggggaattcactgatggaaccactggctagaatgaccaagggtgcatgcactacactgcacgagctctgggcatgcctgtgtgggcagagtgcatggccatgtgctgcacgctcgcacagtgagccttagcttcagagctggacagagcagatcctcctcaccagaggcctggagcccgctctggagggtttcagcagctgtgggggtcactgtgggcaggtacctgatggcagcagtgtgtgtgtgccagtgcacacgtgtgtgtctgcatgcaccgcatctatgacctccttttcagcaatcccatccatcaaatggagtaggtgccccctggctggctcattagtccctttggaaccctgaactatcacttagcatttttgagaatcactgaatgtggccatgggattcctgctttcttggctggagtagaaggaaagaaggggttcccacaggcatcgggcagggtgacactgacctcctcctcccatatcctccttccctggccttaggaagctgcttgggatgtaccagcctgggggcagcactccctgtcagggtgggctgaggcctctggagcagcccacgtgcccagggcctgggagctgggacaggggacggagtgtggaaaggaggggcctctcctttgcatgttgacatcatttctgatcctgtgccatctccccttccccaaaccatgacaagttgtcaccaggaaggcgatcttgactctgctgagaaccgtgggggccgaatactgcttcccacccatccacggggtccccgcggagcagggctctgcagcgccacatcatcccttctccctggaaagagctcagcccccaccgatcagcctaaacaacctaggtaggcctcgcctcccgactccctcttctccagctggttcccaggcccctggatcacagcaggccccaccaaagcaacaggatccctaggacggaagtcactaaaggaagccggggaggatggggccggagttgtcagcctctaggcagccagcaacccacagatcccagaggcctagggtgtccctggctgatgtcccatgctccgttgcccctgagaggatgtgtcctgcacacagtctcaggcctgggcatttccagtggcacccatgaggtggctgctgttactgccctcctgtccccagggcgttcagggtgggcagtgaggagtgctgtcgggggactgggggcccgggccctctggcttcacctgtccctctggcttcacctctatcacactgtttgaatctcggttgggcctgagacctgtgtgcccccttcctggccccgtggtgactttcagacgttgaatgtggccaggcagccagcatctgccccggtgcattccttggtgcccagggagacatccccagactagacaggacccttctctggactttctgtgggctggcccactcagggacctccattgtttgggagcggggtcccctgaacagagggcagccaggagccagtccttggtgagccagacttcactgtggaggcggcagcaccttcagccagggtagcccgaccaagcctggaactctggagaggcaccgtgactgtggcttctagtcctggctccacctctctctcccctcccaggaactccccctccacctcccatctttatctctcaattttgcaggcagtcacccaagccaggccggatggtgggcctggggtgcggcgtcagatgggtaacgccctgggcctggagaggccaccgagcctagccatgcggcattagctctagctctcactccctaatccgtccttcttagctgcgcacacaccacacgccccctcccctgcaccctgtccccggcctctctcagccactcttctgcttcccttgttcactgtggagccgtgtgccctggggagggggagacaccgcttcgcagccctcggttctgctttgctgcttctagactctgcacagtggtggggggctgtcagagttggggtcacgcgggctgctgcaccaggcacctggggactgggctgcttgtcaggaggggcagctagtcagttgggtggacgtcaggcaggccttggacacaaaggaagacatggacagagtggatggtgggcctgatcccggaggccactgggatttccagacctgggatcaggacgagggatgtctcctttcatccatggacttaaaccccgaggaacgtcctgactcagccttttgactaaatgaccttgggtgaattatggaccctcttagagcctcacctgtcaatagggaataagaattcttaggccccaggtggttattgcagcatcggctccgatgcaagaagaagcactttgtctgaagaggacacgcaagggtattcatgccttggggtttcaagaggaagagattgaggggaacctgggagctggctgggcagggtggggagcccttcccagagcagtgggcccccctttccactccagcccatttctctcctgtggcctgtggctcagctttctcctgggacagagtccttcctgtggggaagggacagatgacagggggagtggggggatgagggcgtggccgtgggcgaggcacagcccaggtttgatctagggacctctggggtagcagggcttggggacccacctgaccacagcatgccctgctctgtgcctcacagaactacaggatctcatgcacatctcacgggcccggaagccagcgttcatcctgggctccatgagggacgagaagcggacgtaagtggatcgagatcgggggcagagcggggaacgtgtgcgctttcctgcccctcacccaccccctgttgtgggctcagggctttactctctgcaccctcacagccggcgaagtggctctgctcctagtcttatagttctcagcagagacagaacatggagagcctgtgtcgctcgttcattaatgctgggcggtgcaggctctggagaccagcccagggtgccaggcttcttggacttggtggggctggcgcagtgttctggcctccctccctgatctccttatggctagaagagggggagatgcctgggtcccccctggggagatctcagcagctgcttcccactgctcctactggcttccttaaccacctcccactgcagaatagtggcgtgggctgccttccccagcacctgctgtatacctagtcccattgtaagaggcgggcctgggtgacaggatgcaaagagaagacgcccaggccttgcccttcaggcataatcccgggtgcttgaactcagtgccagctggcacggcaaggtaccaggacaaatgcgtttccagccactgtgctgtcgccacctcccttgattgctgcagttgattcatttattctttattagtctctcatgttcctaatagccttcccagggaggaatttgtaaccttgttttacagatgcagaacctgagcccctgagaggtgaagtgacttgctcaaggtcacacggagtgagtgtcagggtggcaactcacagccgggtcttccgaacccacgtcctttgtgctaccgcaggctctctctgggttctctgtggactctatacctagtgccagccctctgcagggaaagctctcttctcagaatcagaggcagctccactcccagggccaggcagtgatcgtgcagctctgtgggtcctctcacttcgcactcacttccatgctaccctgttgtgtgccctggaggttcccctgccccatcagcattccctcccctgtgccccctgcatgctcttgcacgcgggcacacgcacacacacacgcacacatgcacgcacacacacccacatgcacatgcctgcgggttgcccacatgcatgtgttgcccacatgcaaacacatggacacgcacacacatgcacacatgcaaacacacgtgcatgcacacacatacacatgcgcacacatacacatgcatgcatgcacatggacacccacacacatgcacacacatgtacacacatgcatgtacatacacacacctgtgcaggggctgaggtgaggcagctgcacctgaaggggggacccacatttcccaagggaggaaaagcagattccccagattctggagcctcagaaccctgcctggagcggggctgaggcaagagtcaggagacccctcggtagctccccacttgggccttccaagctacagagccctgcgccctctgggttgatctctgtcgccagccccgcatcttcgggagtttgctttggcctccagcaacagtgtagtctctcccctgccacctctaggcttgctgtggggctgggtacctggtccaggaaaagacccctagaggtgggacccgggcctcctccatttatcagccctcttgggcacctcctgcatccccttgacacacagcgctgcccagagcagaggcggcttctgccctggtggagcttccaggtcagcgcaggagagagtaaaagaaagattgcgaatggaatggaagcagcctccaccaggaagcaggtggagcagcaggcgggctgtgagggagggtctcgatggcatcagggcaggcttctctcagcttcatcaagctgagatgggaagatgagaagatcagaggaaggttccagactgaaccaaccacaaaggcattcccccagggcatggccaatgaggacaggcaggatgtggggagacgtgtcagggcgcgctggagagcatgtgactcaggaggcggcagacctgggtccaggtccagtccgcatccatatgacttggttcccgtcacctaacctctgagctacactccctccgtcactcaaaaatatgcacagagagtaggcgcagtggctcctgcctgtagtcccagctactcgggaggatcacttgagctcagaaggttgaggctgccgtgaactgtgattgcaccaccacacaccagcctgggtgacagagtgagaccctgtctctataaataaataaataaataaataaggctgggcacggtggctcgtgcctgtaatcccagcactttgggaggccgagacaggcggatcacatgaggtcgggagttcaagaccagcctggccaacatggagaaaccccgtctctattaaaaatacaaaattagctgggtgtggtggcgggcacctgtgatcccagctactcgggaggttgaggcaggagaatcgtttgaacccgggaggcagaggttgcggtgagccgagatcgcgttattgcactccagcctgggcaacaagagtgaaactccgtctctaaataaataagcacagggatgtcagggagggtctgcctcagaggcgtttgggacaatgacatgagctaatgctggtagcacccctcccatagcccctggcatgaacctctcccttcctccctgccccctcctcccctgcttcttccaccttgtgtggaggccctgatactctgtcactgcccattcctggcctggctgtagggtccccgcccctccttccccagccttatttaattccaacagactttatcaggcacctgctttggatcaggcctgatactgaccaaaatcaggtgtcccaagttggggagactggccgagatcctgctgggatggcgcctggtcagtgatgctatcccccgaccttcctttccctttctctgttgcactctccagcccctgaaatactagacatttgttcctttactgccctcacccccaccctcgctgtcctgcataggacagaagttcctcgggtccgtctgggtctgtctgccaggacacagctgcaggggacaagggctatgagggtggatgtaaagtactgggctgtggcaggaccctcctctctcccactgctgttcccactgcagccacgaccacctgctgtgcctggatggaggaggagtgaaaggcctcatcatcatccagctcctcatcgccatcgagaaggcctcgggtgtggccaccaaggacctgtttgactgggtggcgggcaccagcactggaggcatcctggccctggccattctgcacagtgagggcggcccctggggatggggccaggcggggctgagacctgtgtcctcaaggggccgagtttgtcttcagggctttgcaaaaagagagtggaggagtagaggagggctataagcactttgaggaggcaggggcggggctgcaggtgctgaggtcccaggctggaaggagaagggctgggcccatgggcttgggtttggggatcccccgccctctggccacagagggtagagctggctgtgtgaaattttggcataggaagcgtttcctatcgactgccttaacccctcctcccctcacccctgcaaagcaggcaccaggggccacacagcctgctgcacataaggaatcccattcccagggtgcacgcagcaggcagtctcaggaatgaggagccactgagcctcaggatgccagagccctcgcctgcacacttcattttactgggaaattttactgggaaattaagttcccaggtggggagggatgacgtgaagtcacatagctcatccatggggtcgctgggctggagcacagtcccctagactcccagcctggcacctcctaggccacagggcactgtgtagtctcctttcactgccgctttgcgaaggcgcctggcttgctggacagatagccgggtggtcagtgttgtgacggctcctctgtggagctgtctgagcttctaggtgctgacaggtggggaggggcactgccagatcagggtcctcagctccccccaaccccctggacattgtcctgggactcaacatgtctgactggtgcccctgcccctgtgctggtcagattccattttctccagagcgcccccacatctggatcctggtcatgcaaagtcttggaggtgcccggggaggactccccaccctagggtgggtatcagggcctgtgggccaggcctgtgttggatgctggggatgcagagctgagccaggcataccccagcctcaggagcagggggctcagccagtccaggaggtgctggggacagagtcccatgggcggaggaggagagtcatctgtcaagttgccgggacgttagtgtccacggcggtttattgactggtatttcatttccttttgatgattctcaccatagccctgcggggtgagcagatggggaaactgagaaccagagaggatcagccagtgaattgggcagtcaggactgggtctccagcagtgtgcccagctctctaccccagcctcagggtcccagcatcccctctctggtcttccacagggtccaagggcgggcacgaggtctgagcaggcagactgggcagagtcctagcttcttctccaaaagggccacgtccttcttcagggaccatttcttccccatccggggtcttgagactcccaggggccatggaggggatttgagaggtctcctggctgatcctccggtgtgggcagatggcctcctttcagctaccctctgcttgtacatccctggccctggggaactcactgcctcacgggggaagtggggcagcttctccttcctggaggtgcagccggccccttggccctgtctgttctgaaggctcaaaggacagggctattccttgttttctgtgacaaacaacgtgggtctagcttttataagcttttactcttgaggggctcttctttaaggaaaataatacaaaatcatgaatacaagatgaagtgcagagccgtggggcttcagtggtttttgagtctctccgttgcccaggctggagtgcagtggtgcatcttggctcactgcaacctccgctcccgggttcaagcgattctcctgcctctcagcctcccgagtagctgggactacaggcgcccgccaccacacctggcgaatttttgtatttttaatagacggggtttcaccatgttgggcaggctggtctcaaactcctgacctcaagtgatccacctgcctcagcctcccaaagtgctgggattacaggcgcgagccaccatgtccagccggaaggaggtttctctctgtctgtctgggaggttgcaaaggaagggcccagaatttgggtttgcttaggcctcggtaaacccgcttcctcctgccacctcctgcgttcaggcgctctgcaggctgttctacgggagccctgcgtgtggccgctgcatctccccgcctctgacccctttgttcctaggtaagtccatggcctacatgcgcggcatgtactttcgcatgaaggatgaggtgttccggggctccaggccctacgagtcggggcccctggaggagttcctgaagcgggagtttggggagcacaccaagatgacggacgtcaggaaacccaagtaagccctggcgcactggggccgtggccgcagctgtgcccactgtggctgttccctggggacagagggctccctgtcctgctgagggagggggaagagcgccccacgcttgaggggagcagagggaacccccttcccagggaggcagagggctggggtgtggctctcacttgggcatgcagacacctgctgagcgcaggaggggcgtggcctggtgggcctggctctgccctgcctggctctgccctgcccggctctgccctgccggctctgccctgcctggctctgccctgcccggccaggggtctggggcttgcctggagagagcctgggccacccttctctgagaccacctgggcagaggctgggtttttgctgcccaggcaaaaggaacccactggcctttcaaatgacacggctaaacattttctcacatttcagacagcactcgctcccaggatcggactactaggttataatcagagggcttcagtcttacctttaatttaaggcctacaagacttgaactaatttaagtcagactgaaggagaaagtcacatttccaggaaacatttgtttgggaagcccaaatcctaggactaagcaatgcatcccgttcggggctggatgaatggtgtgttccaagaggagtgttttgagcatttctgagtgattttttcatattttgaaagtgagtgtcccccagtcttaggggcccggcatcccctctgcggtcttccctagggtccaaggccagggaccttcaatcttttttcccactctgtggcttgtctttctgctctgtggtgtttctaggtttttgttttttgttttttgttttggttttggttttggtggcccatgttcttaatgaggtagataatatttataaatatttttcttcttgtagtttgtgattttttcctttctttctttcttttttttgaaacagggtcttgctgtggggcccatgctggagtatattgctgtgaacacggcttactgcagcctcgacctcctgggttcaagcagtcctcccatctcagccgcctgagtgcctgggactactagcatgtgccaacacatgtattttttgtagagatggggtttcaccatgttgtccaggctagtcttgaactcctgagctgaggcgatcctcccgccttggtttcccattacaggcatcagccaccatgcccagcctagtttgtgctttttatttctcgttcataaacccctttgctgcccccaagcagcacacgattctcctgtgtcgagctggaaagctctctagatctgccttttacattgaggtcttttatcaacctggaattgatttttgtatgagggtgaaatccaagatccaatttaatgttttccacgtgattggccaatttttcccagccccatctgtgaagtctgtccttccctccgcttcctcagcagtgggtcaagcatccctctgctcttggatctgctccaggctgtgttttgttccactggttggaaagctgtctctgtgcccggaccacagagcataaaaaactaccgctgtgtggtgagtcctggtgtctgggtggcagatcctccaccttggccttcttcaaaaacatcatggctattcttgggggcagtagagagaagtggatacaagcatagaccctgaagtttctacctcttctcaaaaataggaatatgccaggcatggtggctcaagcctgtaatcccagctctttgggaggctgaggcaggaggatcacttgaggccaggaggtcgagaccagcctgggcaacatagtgagaccctcatctctacaaaaaatttaaaactaacaattagctgggcatggtggcactatggctgtagtcccagctaattgagaggctgaggtgggaggatcacttgagccccggaggctgaggctacagtgggctgtgatcccatcactgcactccagcctgggcaatagagtgagaccctgtcttaagacaaaaaaaaaaaaacaaaaacaaacaaactcacaaactataaaaagaaaaaatatttataaattctactccattaagaacatgggtccatccaaataaataaataaaacaaaaacaccataaagggagtaaaaagacaagccacagagtgggagaaaagatttcgaatccatacatccatcaaaggactcattttcaaaatatgaaaagatcattcagaaatgctcaaaatagtaaccaccattttactttctcttcctatgagtttaactgctccaggtactgttaagtaaaatttttaggggataattgatttggaccaggattctgtaccaggcccaacagaagaaacgaatatggagtcattcatgccaagtgaacctagttagcttaggcgtatacccatgtaacaaatagctgagttctggttagctacaacagctaagctttaatcaatcatagatggccacctgattcaaacaaggcaaaccaattaagctccacacctcactttggttttcagcccatcaacactgcctgaccacgttgcaggccagagttctttgaacctattctggttttgtggcctgcctgactctcagttcatcaataaaagccaattaacatctttaaatttgttgcaattttatctttgaccgtaccttatgtaagtggaatcatacagtatttgtctttttgtgactggcttatttctttctttttttttttttttgagatggagtcttgctctatcacccaggctggagtgcagtggcgcgatctcggctcactgcaatttctgcttcccaggttcaagtgattctcctgcctcagcctccggagtagctgggattataggcgtgcaccaccatgcccggctaattttttgtattttagtagagacagggtttcaccatgttggccaggccagtctcaaactcctaacctcgtgatccacccacctcggcctcccaaagtgctgggattacaggggtgagccaccgtgcccggccatgactggcttatttcacttggcatccatgttgtagcgtgtgtcagaatttccttcctttttaaggctgaaaaactccattgtctgttggatacacgttttgcttctccattcatccattgatggatattttagttgtaaattgactgctgtcaatgtcggatgtgcaaatacctgtttgaggcctactctctcttactggtgccttctctagagagaattctgatgggttcagtttgatcatattttgtttaagatttttggccaggcgcagtggctcacgcttgtaatcccagcactttgggaggccgaggtgggcggatcatgaggtcaggagatcaagaccacagtgaaaccccatctctactaaaaatacaaaaaattagccgggcgtggtggcgggcgcctgtagtcccagctactcagagaggctgaggcaggagaatggcgtgaacccgggaggcagatcttgcagtgagccgagattgcgccactgtactacagcctgggcaacagagtgagactccgtctcaaaaaaaagatttttgtgtccacgctcgtgggcgaacttgacccgttttttcctattttgggttttgaggaaatatttcctctttttatttttcttggaagagttagtataatagtttattttgaatttatggtagaacttgatagtaaattcttctaggcctggagtttgcttggtgggaggatttttgatgatggaattaatttctatagtggttgtgagactgaccactcggggtttctaaatacctttttgagttagttttggttaagtgaggtttttctaggaatgtgtccatttcatctaaatctttaagcttattggcttagagttgttcaaaatattctgtttttttttttttttttttttttttgagacggagtttcactcttatcgcccaggctggagtgcaatgacgtgatctcggctcactgcaacctctgcctcctgggttcaagcaattctcttgcttcagcctcccaagtagctgggattacaggcatgcgcaaccacacctaatttttgtattattagtagagacggggtttccccatgttggccaggctggtctcgaactcctgacctcaggtgatccacctgcctcggcctcccaaagtgctgggattacagacatgagccaccatgcccagccgattctcctttttctaacgtctgcagtgtgtgttggtgcggcccccttttctttcctgattttgataacagataacagccatgttttatcagtcttgcaacaggtttttccattggattagcctttcaaaaaaaccaacttttgctgaattgtgcccccaaggttggaccaatctgacactcctccagcactgccggagagagcctgttttgcggggatggtgcggggagaagcccacctatcccgaacagaggttggagtgggcactctgctacccaaggccctggggtgtgaattgtggggaaagggaaaggtggatgggcgggtggctcagccgtcctcctgcctcatttctctccagggtgatgctgacagggacactgtctgaccggcagccggctgaactccacctcttccggaactacgatgctccagaaactgtccgggagcctcgtttcaaccagaacgttaacctcaggcctccagctcagccctcaggtttaaaccatgtttgatgcatccatgggaagcgactggcccgagaggctgtggggtggtgggtgggagtcgtgcacttgccatcaggcaccctcaccgtgccaccagcccacccgctgcactggtctttattggctgaggacagggattgcgggggagctgtcaggcccctggcaggttagaaaagtccctggaaagtcctcagctgtacctgccttccaccaggacgaactagccagagagtgtggcttcgtgggtcctgcttctgaagagttcccagcctcccctcttcccgcacccccagcccccaacacgcacaccctgagatctggagtgcatgggttttatgccagtcccttgtgccactgggccgccctccttccccgcccctagaccagctggtgtggcgggcggcccgaagcagcggggcagctcctacttacttccgacccaatgggcgcttcctggacggtgggctgctggccaacaaccccacgctggatgccatgaccgagatccatgagtacaatcaggacctgatccgcaaggtgagtgccgtaggccagagggcctggacccactgctccctggagccaatcctgtgtcagcaaaccatgctagggaccgacccccaggacagcaggtggcttttacacacgcactcattcatatgtgcacacagggcaaattgatctcactggaacctgttccatgggtgggatctgcctgaagcactgtgctaagggggatctgaggaccactgtgctctaagtgtgcatgagtggggagggcggcatgcataccatgaacgtgccactcgagccagcctggggacaggacacatgcttgcccttgagctcacctctgtggatagacagtcccacaggaatgcctgtccccacgggttgccggtgctgtggtggaggaccgtgaggcctctgctaaaaggcctgggggctcggaaagggctccatggaacaggggacccatcctgaggcccttggggacagagcagtgcagaatcagtgatctggaggaagagcagcagccctctctctgcagaggtacagcagaggctggcaggacccagcatgctaggggaggccctgtggcgtggcgggcggtgggtgaccggggtgggcgagcgcggtggctgagctcagaccctggagccagggcgcctctgggggtccccgttctgcctgcactcactgcagctacctaatggggccatcatagcgcctgcctggggaggctgcgaggccttggcatgctgttgtctgtgaaatgttcacagcactgccgggagcctgagctgcatccttgctgctgtggtttcccgaagccccagggcgtcctgggcagcgcagcagaggctctgggcagacagagaagcgccctctaggggccagatcgggcagggcgggcttcctgcaggcggcagagaccgtcagactgtcagacactagccagtctaactctcctattgcgtgcggatggggagcctgggacccagagtgggaggcatcacccaagatcatccagcaaatcggcagcagagcttgttcggaagcaaataagagaggcagcggccgggcgcagcggctcacgcctgtaatcccagcactttgggaggccgaggcaagtggatcatgaggtcaggagatcgagaccatcctggctaacacggtgaaaccctgtctctactaaaaatacaaaaaaattagccaggcgggcatagtggcaggagcctgtagtcccagctactcgggatgctgaggcaggagaatggtgtgaacccaggaggcggagcttgcagtgagccgagatcgcgccactgcactccagactgggagacagagcgagactccgtctcaaaaaaaaaaaaaaaaaggcagcacccagggctcaggttcaagccttagcccctacttccctaccacgtggcccctgcagctgcttcccggcctgagcttcgctgagagccctcatttgcaaactgggtgatcagtgccctctccacagactggctggagattaaatgaagtaatgatgcaaatacctggcaaatcaccaacaccaaggaacaccgtctgcctttcctcccctggccacgacttgacttgggccagcatcagatggggtgggcgggatccttcttgcagctggtgtatgtgtggtcctgttggtacacagatgctgtcctgagcagatggcatgtgatgcccgcaccagccgttctggggtcacgtgcaagaggctggctggaaatcatgccaggcatgctcttgccaccagagacctcttgccctgttctcatgtgccccagagcccagtcttgggcctccccttgacgctccccttcgtgccccctacctgtggaaggtctcttctgactgcccctgtcctgttcccaacagggtcaggccaacaaggtgaagaaactctccatcgttgtctccctggggacagggaggtccccacaagtgcctgtgacctgtgtggatgtcttccgtcccagcaacccctgggagctggccaagactgtttttggggccaaggaactgggcaagatggtggtggactgtgtgagtgtgggcccctcccccaggccacttccctcagggtctgtagcccaggtcgatggcttcccctcatcctgtggggcctttggtgttggaggagacagcagggctctgtccatcgcctttagccagctggagggagagagagtccacagttcagagtctcagtgcggggcagggaccctcagtgaccaccagcaggggggttttcaaacgctttttagctgcggatccctttctgcaaacatagcgcagtgtagaagcccagaatggacaaaggctccagagcgggctgggcgctcaccctgtaatcccagcactttgggaggccaaggcaggcggaccacttgagcacagcagtttgagaccagcctgagcaatataatgagactttgtctctaccaaaaaattaaaaactagctggacatggtggtgtgtgcctgtggtcccagctactcaggaggctgaggtgggaggattgcttaagcccaagaggcagaggctgcagtgagctgtgatcatgccactgcactccagcctgagcaacagaaggagaccttgtctcaaaaagaaagaaagaaagagagagagagagagagaggagggagggagggaaacttcagggagaggggacatggaggcctgtcgactcagccgctaccctttcccccactcatcatccctgaaagggcactgctgagacctctgcccctctgattgcacagctgggacagtccctgcagtcccaggaaggggttttgcccgagccgctctgctgctgtgtggctcagcctgactcgaaagagcctggggctccccaggctggggctccgagagtgcagggcagggccgggcggggtgcgggccgggcggggtgtgggcccggcactcaccaaggctgcttctcaccagtgcacggatccagacgggcgggctgtggaccgggcacgggcctggtgcgagatggtcggcatccagtacttcaggtgagggctcagccgccccagcccttggccccgtgccctggcgtggtcggactcaccgaccttcccctcccagccctagtgtggactttcccttccccaagggtctgctctgttccccaagcccaccctggtcctagctggcgtcccctgcccagcctgagcatcctagggtgaccccctcctccctggcccgaacagattgaacccccagctggggacggacatcatgctggatgaggtcagtgacacagtgctggtcaacgccctctgggagaccgaggtctacatctatgagcaccgcgaggagttccagaagctcatccagctgctgctctcaccctgagggtccccagcctctcaccggccccagctgacctcgtccattcagcccctgccaggccaagcccagccactgccctcccgggcagatctgggcccaggcacctctgagtccatagaccaggcctgggagaatgccaagctgcctgcccgaggctggtcctgaaggcctgtctcccactaaccccgccttccagcactttctgtcattccaggctgggaaagtctagagccccctttggcccctttccctgactgtcaaggacaactgactcccccatcagctcaaaca

SEQ ID NO: 15733 - DNA, 52940 bp, Homo sapiens
cttgatctcccgctgtgaccagcccctctctgcctggcaggggaaagccaccaaactaaggccttcctggtagccaaggagcccagcagaggggctgctgctggctgctgggattgcagaggccggggtctctgtggtgttgctttcctggaaaggagggacggcacctccagggcagccagcagtgtgggagcccattccagggcgcaaatgggcactcaggaatggaaaatccaagaaggaaccaaccaccaacaaggaaatgcagtgtgagcggcggctgcgaagtctgtgccttcaaatatacagcgcccaggggacctgtgttggacggggagcaaattggcagggctgagagcgccttggttttctgtgcagacaggtccagctgcagaaattaagactggggctgagtcggggagaagccttccatgttgagatggcaactgggcaaagcaggacggagacctgtgtgtctgattagagaggcctgtggcattggcatgtggctggaggtccaggcagggtgccaccaccgcagaggtcaagcatgaattcagtcctgacaaaacatgggtctccacctcgaagctggctcagcctttgttcaggaaccggtgagtatgttttctatctcttttgtctagaaaggaggtttgaggacacagagtgaaaggaggggctttgcaggtcttggagggctccaaggactcacactcactgaattagtccggacggtttaagagccacttgcaggctggatccatttggtctcattcttccattaatcagtgagttaagccctccaagccctgcagtttgagccatcagctctgatttgagggcagaggagggggacttgctgctcagccatctaactcctgacagaagaaagacctagactccatatgccgaagggttgctgggcgcagtggctcacgcctgtaatcccagcactttgggaggccgaggcaggcggatcacaaggttaggagatcgagaccatcctggttaacacggtgaaaccccgtctctactaaaaatacaaaaaattagctgggcgtggtggcacgcacctgtagtcccagctctcgggaggctaaggcaggagaatggcgtgaacccgggaagcggagcttgcagtgagcagaaatcgtgccactgcagtccagcctgggcaacagagcaagactccgtctcaaacaaaaacaaaaacatatgccaaagggttgctctggtggcaggttggctttgctgctgtggctctcgtgttagaggagggttacctgtttcctcctctgtgacatagaaagtggggcaagaaagatgccccaaggcccttcagactgtcccattttgtgccttcaagttgcacgcccctggcaaggatggtctggaaccgttcccaaccttgtctttgtagctctcgggaagggccaggaaattcctcctgcacatccatattttcttttcttttttctttttcttttttttttttttttgggatggagtttcacttttgttgcccaggctggagtgcaatggtgcgatatggctcaccacaagctccgcctcctgggttcaagtgattctcctgcctcagcctcccgagtagctgggattacaggcatgcgccatcaagcccggctcattttgtggttttagtagagacggggtttctccatgttggttgggctggtcttgaactcccaacctcaggtgatctgcctgcctcggcctcccaaagtgctgggattacaggcgtgagccaccgcgtctggccctgcacatccatattttcaagtttacttttaatatccgccatgacacggccgggcgcagtggctcacacctgtaatcccagcactttgggaggctgaggcgggcggatcacaaggtcaggagatcaagaccatcctggctaacatggtgaaaccccgtctctactaaaaatacaaaaaatcagctgggcgtggtggcaggcgcctgtagtcccagctactcgggaggctgaggcaggagaatggtgtgaacctgggaggcggagcttgcagtgagccaagatggagccactgcactccagcctgggcgacagagcgagactctgtctcaaaaaaatatatgtatatatatatccgccatgacgcattttgggagtcgggggtcaggaatagcgttcatgaaatccagtaacattctcctacccgagttggagcctggtctgggaaacatcccggccccagcgggatagcctggcctggcctggcctcggggcatttgggccatggacccttctgtttgtcgtcagatctgagcctgttccaacctttatctctgtctccctgatggctggcccgacagatttatgaagctgacagcgagtcatggagaattcctcccagggccatcccctccccagcaaggaatctgagctgctgactttttcttcctttgctcacccccacaagctcatcccctgctagtattcagggaatatagagttatgtgagccacagtgacagcgacagcatgttgacatgtgagcccctagcactcacatagtaaaatggccacttaattaaataagcctggccctgcttatttactgaagggagattgcgtccaggtgtgggtgacactgggggttacagaccttttggagtgtcccctgtatcatacctaccccatgaacagcagagaatggtcacctattctcagcatatgcttggttgtatctttttttttttttttttttgagatggagtctcactctgtcacccaggctggagtgcagtggcgcgatctcggctcactgtaacctccgcctctcaggttcatgccattcttctgcctcagcctcccaagtagctgggaccacaggtgcccaccaccacacctggctaattttttgtatttttagtagagatggggtctcaggcgtgagctaccgcgcctggcctttttttttgtatttttagtggagatggggtttcaccatgttggccaggctggtctcaaactcctgacctcaagtgatccacccgtcttggcttcccagagtgctgagattataggtgtgagccaccttgcccagccacagaggtattacttttataagcagaacaaaagtgtacatgtgtgtgtgtgtgtgtgtgtatatatatatatatatgtgtatatatatatatatatatacacatatatacacacacatatatatatacacacacatatatacacatatatatacacacatatatatacacatatatataacacacacacatatatatacacatatatatatacacacacacatatatatacacacatatatatatatgccagtacaaaaaacttgccaatacataaaaacattcctcatcttttattttatatttttttgagacagagtctcactgtgttgcccaggctggagtgcagtggtgtgatctcggctcactgcaacccccacctcccgggttcaagcagttctcctgcctcagcctccccagtagctgggattacagatgcccgccaccacgtccagctaatttttgtatttttagtagagatggggtttcaccatgttggccaggctagtctggaactcctgacctcaggtgatccaccctcctcggcctccaaagtgttgggattgcaggcatgagtcactgcgcctggcctcctcatcctttttaatggcttcacgatatacatggatatgcctgaaattttaaaccaggcctctaatagcaaacttttggattgtttccaatatttcacctatttgttttttcttttgagacaaggtcttgctatatcgcttaggctggtctctgaaagtcctgggctcaagcaatcctcctgcctcagcctcctgaatagctgggtgtgtgccacgaagcccagcccagtttttcattcttgcaaatggtgccatagtggacattcttgtgtctgtgtctgtgtgcacttgtgaaagagcatctgtagagggaattcctaggacagtggaatttctgtgtggaaggctgtgagcaatttcattctgacatttccagattgtcatccagacagccacttattctcccaccagcagagtaagtggtcaccgtcttccatgtccatgtccctgagatatgaggggcatgactagtcaggtgactccttatgtggtcaccaggcatttccctcttgtccactcacattgctgaaatgccatggctcttggcagaggagcaggggcagcggtaggggactctggggtcatgcctccagaacttccgagggtggtgtccagaggatacactatattaaatttgcttatctttctggttagatttcccacttctaaagaccctcttacatagtctttttttttttaatttaattttttgctgagacagagtcttgctctgttgtccaggctggtttcaactcctggcctcaaatgattctcccacctcagccttcccaagtgctgggattataggtgtgaacaaccatgcccaacctcatacatttttttttttgagacagtgtctcactctgttacccaggctggagtgcagtggcaaaatcttggctcactacaacccccacctcctgggttcaagtgattctcctgtctcagcctccccaatagctgggactacaggcgcccgccaccacacccggctaatttttggtatttgtagtagagacggggtttcaccgtgttagccaggatggtctcaatctctcgacctcgtgatctgcctgcctcagcctcccaaagtgctgggattacaggcgtgagccaccacacccggcctcatccagcttttttagttgtcccaaatgggaaggtgggtctgatttattgactccgtcactgttggaagcagagttcctactgaaggctctaaatgttcaaagcatttagcacattgtctatttgtagctgttgttatatccaaaattcggtatgattttctttctttctttttattttatttttttattttttgatggagtcttgctctctcgccaggctggagtacagtggtaccatcttggttcactgcaacctctgcctcccaggttcaagcagttcccctgtctcagcctcctgaataactgggattaatgcctggctaattttttgtatttttaatagagttggggtttcactatgttggccaggctggtcttaaactcctgacctaaggtgatctacctgcctcagcctctccaagtgctgggattacaggcttgagccaccgcggctggccaattttctttttttttttttccttcaagatggagtcttgctctgtcacccaggctggagtgcagtggcatgatctcggctcgctgcaacctccgcctcccgggttcaagcaattctcatgcctcagcctcccgagtacctgggattacaggcacctgccaccatgcccagctaatttttgtatttttagtagagacaaggtttcaccatgttggccaggctgatctggaactcctgacctcgtgatctgcctgcctcagcctccgaaagtgctgggattataggcgtgagccaccacacccggccattttctttctttttctttttttttttgaggcagggtcttgctctgtcaccaaggctggagtgcagtggcacaatcacaactcactgcagccttgaccttctgggctcaagtcatcctcttccgtagcctcctgagtagctgggaccacaggcgcataccaccatgcccagctaatttttaaactttttgtagagacacggtctcactatgttgcccagcctggtctcaacctcccaggttccagagacccaccccagcctcctgagcagctgggaccacagctgagtgccaccatgcctggctaatttttaattttttttgtagagacaaggtctcagccatgttgtccagtctggtcttgaactctagggtcaaggagtcctcctgcctcagcttcccaaagtgctgagactgtagacgtgaacctccatacctgtccctgctttatgcttctcgagatgtaaatgaacaggatccaggcagaacccctccaggcccatatgggaggctctcaggaaacagcctcctctgtaatgccaagatgggttgagaccccatagctgccctgcacagaaactgcctctggaggctgggcctgtgtcctgggcttagcggggaagggcccttgacttctgtgggccaacagtcagacaaggcccatccgaggcagcctgggtctctgctgggcatgtccacagtgacagtagtgacagtttccaaccaacaggaccagtgtttcgacaatggggtagatggtttgaaatcctagctgttctggaagtccagcctgtcttttccgtggttgggagcccggcccaggagcctttgttccttggacagacttggccctcgagagggccccagtctctcagtttgtctggccaggtttaaaagtctgcagtggccagcagctggcagtcaggctggaatgtagctgtgctggcttggccgcagacagccccgaggaacagccttcatttccgcctcttcccctcacctcaggctgaaaaatccccggcaggtggcagctgctgggtcttagtctgagtctcagcttctccaaggggaccaggtttgaccccaggcgggcatccaggcatgtgggctgccctctgggcatggtcctacttggatgccagggagccctgccaccttgacacacagggtgaggtggagcccagctggaccaagccttggggtatttggaagtcagccctggtgagagatggttgattgcaaattgattctagttcaaatcaataagcatttccctggcacctgccctgggccaggctgggcctgggccctgcatccccgatagagtctagattctaagggctcccaggctagatggagcgaggggagctccacagcgggatccaggcgtcagtgagaggagctaccgattccaccaggaacagtgggtgggcggggccccagggtctaagtggccatgccgggggcaggcttttaatcaagacagtgacatttgcagacttgcgttctgttcttctgctgtgactgttggccactgtctctgagtttggaggggactctcctggattaatttattcacccccccatggccaccctgtgaggcctgtgaggcctacgctgtataaatgaggaaactgaggcccaacttgttcgagatggcacagccggcaggagctggagctgggatttgaacccggggagcccggctggttctggaggctgtgttggagggggtaaatgtgagacggggagggactgaggcagggcggtggtggcctgaggctgtgccagcgcagggcagggctgatggcactgaaagacatcctggagacagagcttagaacagtgtgggagctggtttgtggtcggcccgccccaggctgcagttgtcccgaggctgcagctggtggttgggtgggtgatgatggtccggccagatgctgggcagtgactgggcctcccaccctgctggtgagccgagtgggcctgagggccccactgtctggcttccctgccccccacacactcggtagcccggggaggggcccatgccagtgggctcgaaggtcagggaggtttgtccaggcctgaatggctcccagagtccaagtcagggggcacatctggggctgggagaagcccacttgagctcacgtggcctcagggcttgaacagtgctgagcaggaaggacaactcgctcggcctgggatgaccccacagcatgtggagctcaaatatctcggctgtgaaggaggagccaatggtatggagggtggtggacagaccctgcggcagcacccaaccccttccgagcgacatgggcaggtctccaggcgtcccgagcctccgcttcctcctctgtaaaacggggtgatggtgatccaatcacagggccactgggtagattaaaggagatgccaccttgaaggcccttggtccagagtcctggtataatacataggacaccggcagatgttagtgtccctgctgtaaggacagccagggaaagggggctgagagggtccctggcccagcaggagtctgttcctgagcacagggaagagagtagcacgggctccccggcttccaagggcctctcccctgcccggccctgggcttcctgccagcagaaccctctcccccttcctctattcaggccatagtggcagtcacacactcactctctgcagtgctgggggcagcctctctgggggggctgcagtcaggcagcctgcagtgcccactccaggcctggaggtgaagccactgcatggctctgccggcccagtcctcgctctgtgagccctgtcgtggccctgctgcctcagtcccccatctcacatgcctcagtcccagcgcctgggggccctgaggattggagaaaggcctgtctgggcagcacaggagtgtgtgggacccctctcggatccctcctgtcttgggggcggtgggcatcggcagctgctgggtgaccgccagcccccttcagacgtttctctcgggcttgccaggctccaagcggggtcctttcatacaggcagcctcatttaatcaccctagtcggggcttaggattgtctccattttacagaggaggaaacccaggctggaggagtcagtgaccgtccttgttggtggtgcctgtcctctttggtccatcccccaccccagcagcacccagggctggcacagggcccatcagagactgtggggaggggagggtgttgggggctaaggctgaggcctggttgaagctcaaggacgggctggccaggggccaggtggttgtggcccaggtttccaccagcatcttccaaacaaatggactggcagatgggctggggcactggacccacgcatctggccttcagaattgtttaacttttttttttttttgacacagtttcactcggtcgctgaggctggagtgtagtggcgcgatctcggctcactacaacttctgcctcccaggttcaagcgactctcctgcctcagcctcctgagtagctgagattacgggcacctgccaccacacttggctaatttttgtatttttagtagagacgggatgtcatcatgttggccaggctagtctcgaactcctgacctaaagtgatccccacccgccttggcctcccaaagtgctgggattgtaggcatgagccactgtgcccagcccagaattgtttaatttggaggaagggtctgtgctgcccgcaccacgccctgttcacccctcccacaggtgctgacactgggcccactgcttgctggctggtgggttggcctccgccccacctggcccccgcccccagggtcactatcaggtattggccctgtagggttctcagcctgtgcctccagagggcagaggcagattcttttcttttttggagacagagtctcattctgtcacccaggctagattgcagtggcatgatctcagctcactgcaacctctgcatcccaggttaaagcaattctctgcctcagcctcccaagtagttgggattacaggtgcctgccacccctcctggctaatttttgtatttttagtagagacggggtttcatcatcttggccaggctggtcttgaactcctgacctcgtgatccacctgccttggcctcccaaagtgctgggattacaggcgtgagccactgtgcccggccgggcagaggcagattcttctttttacttggcctggtggagcgtttggggagggcctggccagaagaacagagacaggagagccagagggcagggggagtggctagcgcccactctctccagattacataatggggctctgcagcctggcctgtgcagaaacactcacccacagcatggctgcctgggtgcttctcatgagagccgggtagctagaactgggcatggcggccccgcatgcacgcagctggctctccccggctgccctgggggtccagacaggcctcctcagacaccgggagaggaagggaggaatgtggttacctgcacctggggccctggggtccacaagaggccacagtgggccttgcctggggacggggaggaacggggctcttgttgggtacagggactccccaccaagtctatccctttggggtgagcactcaccctgcgccaggctccctgctaagccctgtgcgtgcagggtcttgtggagatgacaccctggggggctctctccttaacccattttacagatgtggaatcgggaagtgtcacggccgaggctgcccagcttgggaggcagaagcctaaccctgaaccaagccctcccctgccgggggctgccctcagaaaacccctgcagtgggaaggggtcatccagggtggttgaggggagaaaggatgttcaggggcccgtggagcccccagcctgtgagcttaggcaggaaaagtgccccagagcctacgtctcccgagtggccgtggcttcctggcgtgggggtcgatggccgggtcctgccacctgtttctcttcctcttttggccccttactcagcgagaccttgcgggggtggaccctgcttgggtcctccctcacttggcacttccgctctcaaggaaacagctgtagtttgcagaggactcgccccctccccatgtccaaggccattgccaggaacgggatgaagcgggcccttgtctttagcccctgtccctctgcctgtcctggttccagccccaggccaggggatgctcactggagcacagaaggaaccagaggtgggacgagaggcaaatcttagggtctccgggcccagggccacagctcccagccccaggggcagcccgcgtgagggcacaaaccaattgtctctgctcccctgggatcttcctgtccagaggccgtgaggcttccaggggactgagtcccccgagataggtctggggctgtgggagagcagccctccagctgagggcccgcctgcctctctcgggcctctagctccctgtctgtacccagcagtgacttcgagaggcgctacaggtgggtgaggagggccaggcctagagcggggtgggcagtgcggccagcagtgtgtgtaccgctctggggctcagccctggctctccctcttcctagctctgtgtggccctgggcaagttgcctgtcatggcctcagcttctccatctctgtggtggggacagtagcacctgctattggggatgaagtgtggattggagatgatgtgtgaatagtgcttgctcagtatggcattgggccatggtaagtggagagcctgcctgaggctgggcacacaacagaatgcaagacagacagctgtccctgaaggcaccaagagcaacccccgtgtttgtcagcggcatcgctcgtcagtcttgtttcctggttttccccagacccgaggaaaaggcccaggtgtgtctacctgccttggacagctgctgcctcagagagaggggctggcgctgcaccctcgagcactgtgggggtccgcttcactggcctgggggggcctcccctgacccactggggctgcctctgccttcctgcatcgggaggctgggtgggggaccctctagccttgtatggaaggagcgtgggagacagaggaggacagccgggcagcaggaacagcacaagcgaaggtgggaggtgggaggcaggaggcacatttggaggcagagggaacacagaagatgatgctccgtgtggtcaggatggagggtggagcccggcctcctcctcttggcatccagggctgcagcccctcaggagggttcagcctccgagcccgaaatggatgcctgggagtggggccccaggtgaccgctgcagcaggggcgtccccttgtgctcagcccacagttgagggtaggaaggagtctctgctgcacccaggcggggatgttctggggttggctgtcctaaaataataaccaggtgtggctcccaccaagcccagacaaagaggggccgaggctgggtaaaggctctaggacccaccccactggccctggcctctgctatggtgggtctgagacagagatggctggccaggccatggatggtcctattccctaagcctcagtctgacacccccaggcaggccacttgccacatgaacacgagccagggacacccccagctcctgtgggctcaggcccaggtcgtgtgggtgccagtgatgaaggccaagggcctgcgtttgtcctccctggccccgtgccggcgcgggaggggccggccaggcaggcatatggttcgaattattcaagccacctcttggcaccttagccctcagctgggggcgtgcaggctgcctggatggccactccagcaccccctgccacagccctggggtgacccctccatccccccgccccccggaaacagagccttctgctgccagctccctctgcctgggccttgggtctctgttgccaggcatctggtctgttaggagagccagctctgccctggctctgctccttcagacctggcaggctgggggggcacaggtggggtaagacagaggaggctcagcaaagcctggctggggagcccagtgcaagctgcccttggccccgttcaagtctggatttctgaagggctgccccatggccctctgatcacccccaccttctcccccagctgcttgttcaggtccccaagttggctttgaagctagacagtcttggggtcaaatacaagttctattccttgtaagctgagcctcagcttcctcatctgtgccatgaaggaagtgcccacacacgcagggaaagccacaatgaccctgctggggcacaggtcacgtggataccgtggcagaggtctctccacaggagggctgccataggctttgagttgctattttctagcttgaacattttgcagtttggacaacactctggaatcaactgaccagtggcttttcatttccccgcctgtccgctcgctttttcttcttctcatggttctttctgtgaagggtctgcacccccagccctctgacttcctccagctccacccgccgctcgggagcaatgaggctcccctgaggatgccagaggttcggctgcctagggctctatgcctgcgctgccattggtgtaggcgacatgatctgaaggaggaggcagcctggtgaagtgtggccagccccgaaagggagcccagagagcagagcccagacctcacaggcaggctgagggtgaggcctggcccacagctcctgccctgctggggggcctctgggggcctcggctcagtggaggtgagggacatgccttgagcttcctggggagggtccaggcaggagctggaatcatctctaggggcagcccacggcgtccccacaggtgcttctgttcctcactgagaaatcctgcagggttccactggggctgggagcggggtcacaggtcaggggtggggagccggaattgctcctcgggcagcacatttttcttctctggaaacctatcttagcaaagagaccacgaaacaatcgcactcttttccgggcctctgtcgtccccagacggccagcccgtctcctcggtgggggctccgagggggccgggaaggcgaaatttgtaaaatgtctgtaggaggggaagaaaggcgctttgtgtggggccggggccctggccattggtcagctctgaggcccccagccgctcccagaatgctccccttccagaggagggagcgcctgccagccgaggccagccccagtggtccctgaaaccccctgcgcccctgcactccctgcgtcccgtccccaggccacccagcctccgagggcgcgggccaggcggggcggcctcccctggcctcagcatgtttctctactggaggaagcggggcacctacgagctggaggccctgcccggcgacctggccgagctggagctggggacggtggagcgtttctcgtggagctccaccctggacatcatcgaggacctcgggggtaggtgcgaacccacctcccgggaggactttcagcaggctctggcaccgggcctgcccagccagggcctgtagcccattcacacacacatgctgctgacagtcacttgctccacggtggtgtgggggccagagccactcctgagagctgccgctggtgcaggagaggacccggaaatgaggaccctgggggccagagggcaggcaagcagctgaggaggctgtccttcctccagggctggcctggctgggcagcgtgggccctgcactgggcttcaggcctggcctctgcctctgctctcaccccgcccgcaagatcaggccatggtgttttctcagggctgggtggtgtaatgagatgttctggaacattcacgttccaggtcccaggacgtgggtcatttctccttttgtccccattttacagatgaggaaacagaggtacagggagtttaagcccctgaagaggcaggatgagctctcggggacgctgagccccgtggcttgtgtttagaggggtgggacgttggactgctcctgggggtgagaggttggggagctgtgaatgggaataatgatgccttgggggtcactgggaggctgagagcactaatggggatgacacacagggagcttcaaacagcggtggcagaggcagggcgcacctgtgctggctgtcggatgcccattctgtccgctcagctcagctggtcggcaccgtaggctggtcggcatcgtgggctggtcggtactgtaggctggtcggcacagtgggctgaccggcactgtgggctggggacctagctctgtcagggagctttggtgcagtgacagaaacttgagtccggtccgcagaagctaccggagcgctgatctccagctcccagcactgtggaactgtctggggccggggcctgggcctgggttctcttctccattagcctcatcctcgggcccaggagctggcctcccccaggccacaagcccagggagcaggagcctgtcctggatgagtctccccaggctggcgtggtccttccctgagcccatccgtgaggccagaggcagggagagtgacggttcagcctgcggtccacattgggaggcaagagggagcccgcagaccatacagcgaagggttttgaaaagggaggtgtaggctgggcacggtggctcatgcctgtaatcccagcactttgggaggccgaggcaggcggatcacgaggtcagggaatcgagaccagcctgactaacacggtgaaaccccgtctctactaaaaacacaaaaaattagctgggcgtggtggcgggcgcctgtagtcccagttactccggaggctgaggcaggagaatggcgtgaacccgggaggtgtagtttgcagtgagccaagattgtgccactgcactccagcatgggtgacagagcgagactccatctcaaaaaaaaaaaaaaagaaaaaaaaagagagaagggaagtgctgctcccaggagagaggacgatgccgggtgggcatgaaggccaggcgtccctgcctgtgaccagccccccactgtggaggagggggaatgtggctgcttgtcaggagaggcaggtacagtgtcccacaggccccagcaactccaggccccatcgggacgtgcgcagaaggcagggagggcaggacatgagaggggcggcccagctgcccagctggtggaggcagtggggatgcgggaggcagcacgggatgtgggggtggggtgaggaggagtgtggcagctgatgttgggggggcaaatctcccctccaccctcagccgggcactgtcctggagtcggagggtgggatcgggggcaggctgctctatttcttcacccggcagcttcctgcctacctgaggcaggtacggtgctacaggacccaacagagccagagacttgacccaggtcgtttagccacccagccccaagccagcagggccagccaatgggagcctgtgtcccacctctcgcccccactcagactgtgctccccttggcagggtggggcaaagtggggctgctcgccgtctgcagaggcaggccctccctgggctctcttagttgttctgtacatctcagtcatcctgctggtccctccccttgggatgccctcacggctcagatgcaggaatcacatctatgaagctgcctgtctctcctgcctctggggcaggcggctcctgcttctggggtttcacagctctggggccccttgatcacactggccacagagctaacgtagagagggcatacccagtgccaagtgctctttatttttctctttaagacagggtaggccgggcacggtggcttatgcctgtaatcccagcactttgctaggccgaggcgggtggatcacctaaggtcaggacttcaagaccaacctggccagcatggtgaaaccatgtgtctactaaaaaatacaaaaaattagccaggcatggtggcaggcacctgtaatcccagctacttgggaggctgaggcaggagaatcacttgaacccgggaggcagaggttcagtgagccgagatcataccattgcactccatcctgggtgacaagagcaaaactccatctgaaaaaaaaaaaaaaaaaagacagggttgtcttgctctgttacccaggctggagtgcagtggcgagatcacagctcactgcatctgacctgaagcagcactcctgcctcagcctcccaagcagctgggactgcaggtgcacaccaccaggccctgctggttttttaatgtttttgtagagatggagtctctctatgttgcccaggctggtcttgagcatctggactaaaatgatccttctgcctccttggcttcccaaagtgttgggattatgggtataagccaccatgtccagcctcaaagctctttaaaactaggctcctggaatatccatgcccactctctgagtcaaggccattcttggaatcccctttatcctggtgaggtgtggcgaggcctttgagatcccaagtggtggcacccagatgcaccatgcacaccctcagcctgagcaccagaactgagacctgttcacccgtgtgtgcctgccccagctctccccggggccggcagagaggcgccggggggctgcacacagcggctgggtcacagcacgtgaacaggtctcatgcatgagctgaggcggtcgggtgggtgagcctgggcacacggctgtctgtgtgggctctgtcctctgtgccagccagaccctggccggggcccatgcagggtgggccgatgccagccctgcctgtgatgggggtgggactggcgcttggagtgtgactgtcgggaattgggatctcatagctatttctgcagccccgctcctgttccgcccttggtcactctcggttcctctgaggaacctctggaggaagcccacggggggcagatgggcaggcgcccgcagtagcctcagccggaggaagtggccggctggccccaggcctgtgtgcagagctgtgtggacagtttcttgggccccaggaaggaatcctgaatgtgtcctcccacctcttcttactgagctcgagcagtgtgggtgggtagggctgtgttcagctctccggtccccggggactacgccagcggtggttctgggctgtaggcagaagcagtgtcctggccaaggtccatgcccctccctgcagctgggtccctacttcactgacctgccccaaggtgccccatggcgctttgggaaggggatcagaaacacatttccttcccaggcctccagtgacgctccaaccagtgtcctgcatagggagtggcggatgtcctgggaccagcagccatttacccaggacatgcccctctggcgtttggccaggtttgggacaaatcttgcccttccccaggctgctgcggctaagaggtccagccccagcatggcctgcagcagctgcccaggcatggaccggcgcccaggagggtggggctcacgcgggaggggacattcaaggccacagctgcttcctgagaggggcagcctttgcatggccaggcctgtggttgggaggtcgtgggcagggagggcctgttttcttgagacagaagggttcatcggagtggagggttcacaggtgaggggctaccctggagaaaatgagaacgaggtggttttccatgcacttgtgtcagcctgggaccagtggggaaaggggacactcatgtcatgatggggggaccaattcacgttttccagacagctaattgtgtcaggccccatgggagcactgtagcctggcggttaggagcacaggcttggaggcttacacactcacagcctcgttactctcattacttgtgtgaccttgggcaaatctctctaccctccacgcctcagtttcctcatctgtaaaatggggacaatgatcattcctctacacagagttagatggtgaaacgacaccatctatggacagcagagttcccagcaggtggttggcaagtgagagctgtggtcattgtgtgtcgttcctgaagccgtctgatggggaagacaggtcggtgttggttcaaaggttcaagacagtgggagtccagcaaggacacgttcacctggaactgggatatgtgacaatagggaggccttcctgaaggcagcagccttcaatctgggccttgaagagtgggcaggatggcagcagacagcgatgggaggatgctgggggagggcaaaggaatagcaccaagaagggctgggctggggtcagaagctcagttgtgtccggcaagtagcggagtgaggggcctgcggtggggcgacggagtggcgtggactgtgggggctggaagcatttgtgctgatccgaggcagacacagctcgggagctggagccgtccagaacatgggtccagagctgccgggctcctctggtttgtcaagagaagccagaaatatggacttttatgtgaaatctcctgacttttcaaagttggcaaccaatttaaattcttccgaaaccctgttctcagccaaacaaaacatgtctgccggccgttctgcccgcgccccgaggcccagttctggtagagatcatgttcaggacaaagcccaagtggcctcctgcgactgagacagggtcgggggagaactggcgagtaggctcctctgcctggccaagggccctggtctccctgcgacgggaggtgggggagccaggagggcagctgggctgttgcgcacgtggggaggcagtgtctggcatgcagtggcgggagctcagggttccaggtccgcctagggacgagtggagtgcagggttccaggtctgcctcaaggggggtagttcatggttccaggtctggctaggggtggggggagttcagggttccaggtttgcttagcggagggggtagttcagggttctaggtctgcttaggggaggggggagttcaagattccaggtctgcctggaggggaggttcagggttccaggtttgcttagcggaggggggagttcagggttccaggtctgcttagggtcgggctgaggtcggggagcagacaccgcttaggctggtccacataagaggggttgctacgaagaggcagggctcccaagggaagcccggggcaggcagaggaggccgcccccctgccaccccgagagctgcccactctcacaaagctgccttctcctgccctgtctgctctggggtgatttccactgaggggctgctcccctttttcctgctccccaacaatcttggggcatcgtacctatttggactgactctcagtggactcaagtctccagggcccagtagtagtcctgcctgtgggctcctatcaggaaggggatcggaatcatgtttccttcccaggcctgtctcaattcatagtctcaggagagcaaatctgactggctgagccaggctatgtagatggctcaacaactataatctcagcactttaggaggccaaggcaggaggatcccttgaagccaggagttcgagaccagcctgggaaacatagtgagacctccgttgctataaaaaaattaaaaagttagccaggtatggtggtgtgcaccggtggtcccagctactcggtaggctgacgtgggaagatcacttgtgcccaggaggtcgaggctgcagtgagccctgatcacaacactgcactccagcctgggtaacagagcaagaccctgtctcaaaaaataaattttaaattaaattaaattaagaaaaacccagctatgtccagggtacgctatcacctgatacagtatgtcccccttaccaggcccaccctttcctcgaaggctgtagatggggataggtcacctgcaggagagctcatgacaggcctatggtggggactgcttgtcctgacctcacccccaagccccacaggccccactctgggccctgagagctaccagggtcctgatggatttttcttcgtgtctgcagtctccaggagagaggagctcgcctacgcaatgcaggaagttgcagctttagagcagagcccagagggagctacctcccaggggagccaggaccaggggatcaggagtgtagggtctagaaggcagggtgagcacctggagcctgctgagaccaggggtcagaggccggagagttcaggcaggtagaccccagtgccaggaagtaccaggcaaaggacaaggaattccagaacccaagtggcatagaggccacaggatagtcaggcccgatggtggctgtgacctgagcagtcatggggggatctagggagctggtgaggcagacccagtggcagaagacatggcccggagccttcagaatacggggctacaatccagaggccctggggcaaagggtgtgagaatccaaccccaggctcagagttttgagaacgcaggggcctggaaactttctgggcggacagcagatgttgtcctgctcagctggagaagtcccaggctggacgcatgggaaactcccacaaagctggctgagggctccaggtccccgtggaaacacagatggcagaggagggcctgctggagtcatggcagacaaaagccccgaaccccactccaccctcaagtcagcttcctcccagcaggcagggacctcgccacagtcctcacagggccgtctcttgcctcggctgcctccacctccagcctagaggcaggacaggcatcgctggccccttggatggctgagagcagagactcggagagggaaatgagcacagtgtgggggtgaggctgggctgggcctgaggatcctgagagttcccgtaggctgtgcactgaggaggcccagggccccgggcagctgcttccctctcagcctggaggcccccggggtgcctgtggcagcccctcctcgagagccccctccccagggtcatgcagatgtgctgccccccaaagggctaccctgcccaccaggccccctgtgagctccccaagtcttgtcagggtcaccagtgagtccccagcacccagcttagagcttggctcatggggatcctcagaggatctttagtgtgtttgctgaatgaatccagagagctcaggagacccgggatccgtgctactttgctgtgccaggagtccttggggcaggcaccagtttctggtcacctgtgagtcccagggccggacccagcccatgtaaggagtccatgcagggaggctccagctgagaggccttccagtgaaggggtcagggaagtccacccttagcctttgggagagggacccggccctgctggaagctgcatcttctatacctaggtcttgtcggcgcaatgcctcctggtgccagtgtgcagggtgggctgggggtccagaggcaggctcaggagcactgagcccccgcagactcttggccacctctgcgaggctgtttctgtagggcaaagggtttgctatctcctgatgccatttacataaactacaggaccgggcagacgaatcgatgtgttggaagtcagggcggcggtgcccttggggggaccggttggcacgagggaggtggcgggggctggggactgggtggggacgctctgcagctcggtctgggcacaggttattttgtgaaagtttcctgaaaatgtgttgagctgtgctcacaggacaggtgcacttctctgtccgcgtttgcacttcaataaagtttaaaactgaaccagcagaggacatgcagcaagagccgtggcaggcgagtctctcccggtgacagccctcaccctgcgcggggcagcctccgtgttgccatggaaactgacctcggagacagcgattccgggctggggtgggggctctgcgtggctcccggcctgcattcctgcggacaggcaccctccgcgtggatggcaccctccaggacagagccgtgcgcgcttcctgagccgccccggtgcccgccctccgggaggtggaggcagcctccggaccgcagcgcgcaggggccggggagccggggagggaggggtgacaccgtcggcgccgaggcccggccgcgctcctgtccccccgccccccgcccccgaggcggggccgccgcggctcctccccgcccacctgccccgcccgcctcccgtgcgagggtccggcggcggcggctctgcggcctcccagtccccggcgtccccggcgcccccgcccgccgcccgccccccgcgcggcacggggcctgctccatgggtgagtgcaggcggggacccggcggacgcggggcggggtcctggggggccgggccggctcctaacctcctccggggagggcccgctccaggcaagggggtgggcgccgaccgggcttcgggccgctcgtacccaaactcggcccccaagtcggggcctgcctcggcagcaccccgcttctcctccctccccccgcctctcgctggttgcgccgctctgcccccaccgcggtgcactccagcccccaggaagagaggcagcttggagggggccaaattcagggtcaaagatgagtcttggggaacgggggtcgccccagaccttcgggggctcctctgtctctaaagggagcgatgcagggcgtaaggttctcagggatctgggatcttggagccccttccccccagcagccctgccgggaccccctgggaagtctggggccccaaaaggtcactgagcgctcccccacttgtcccccagactagagggacagagggagagagcagcgtatttccaaagatgttttctccccgtggaatctggataatttccctgaggactgcaggagaaaagggctctgcaaacggattcccgtgcagataagttggcatttaaaagagaaagggacgctgacctcttttgaagggaggactgaggagatcaccccacccctcctccggttgggaggccagtggggcccaggggagcctgggtgccccgctgactgatgccctctgctcctcccctgcagacgaccagagccccgctgaaaagaagggactgcgctgtcagaaccccgcctgcatggacaaggggcgggcggccaaggtagggaggctggagagcctggggaccctcgggggcagaggggccagggctctaactgccctttctatcccagcaccagctatccacagagccctggcacgggcgcggctggctgggctgggttcaagtgtaggtggggccacagtgtgtctggtttaggaggcagagggcctgcccccagctcaggaacagtggagtcgggggacttctacaagaacaggggggtggagtaccccaaagccctttgctgcactgtggtcctagcagccattctgaggtgacaggagctgtagccttatgtcacggatgaggaaactgaggcttagccaggggaagtggtctcccacggtgctggtccagtgcccagatggcacccttcctgttgaactcagccactcttcaggcctgggcatgggtctgagatgctttgggacttggcgagtgtgaccatggccctggggatgacaaaaggaggaaggggccagttgatcctggagtgccagggcttgggagctgggagtggggcgaagtataaatcagggataaagggggcaggaaggaggataatagtactggctgggcgcttctgcctgtgatgtgctgggcttagtgccacccgctttctgtgccatatgcactgattgcggcagctctgcagggaaggcatcgtcaccccgttttccagatgaagacaccaaggttcagagaggtccagtgacttggccaaggcccacagctcatgagagatggagccggggtttggagccaggttttgcccctcccagcatgcatttacatgacaatagtgacaactgcgcaacttagcatctggcgcaggcaccaggactcactgactcctcctccggccttctgagatggtcctgtccttattctcatttacagatggggaaactgaggctcactcagggacagactgctaggaagtgggagagctgggatttgaacccagtacccaggtctgtgtcataccagggcccgtgttgtcttccatcatgtgtctcagcactgccagctgcaggaaatgtaaaatgccaccccccaccccccgctcccctcccgcacctccacccagacacacacacactcgttctgcacaggagggccgtggtgagggaacagggagaactgctatggggcggggcggggagggggcggcctccagttgccgtggtcaccaggcaggggggcggtgtgatgtcagatacaatctgctggcacggatggtgcctggcattgggctctggtgttggctggttgcctctttcccagatgggggctcctggcaacaaattggcctcagctccccccaatatacatcctgccagaggcctgcggagccccgaggcttttgcctgacctgaaggggcggctggggcaataaggcacactgtcccagcccctcctctgggcagctgctctcagggggggtcctcaagctgctcaggcaggggcaggggtgggatggcccagccttcatagaggtgaggcctgggagaagagagctggtctcagagtgggtatggtccctctgcagcctccagacctcacctccagccctggcctgcctggaacttggcacagctgacattggcatcagctgatgagggtcacccagcgtgcacggggagagtctgggccctgtcactactgggacgccctttgggacaaatggcacagactcactgtaggggcagaaatgcctgaattatcagaggcatagagagccagtcagggagggcatcctggaggagggggcctttaatggatgtgaaaacatggatagacagaacagaggcaagggcagtccaggaagggagaggcagtggtggagaggaggtgcggggcactcagatttggtaagagaaacaaagaataacattgtcgatgatgataataataaccactactggctgggtgtggttgctcatacctgcgatcccagcactgtgagaggctgaggcaggaggactgctttagcccaggagtttgaggccaacctgggcaatatagggagacctctctctactaaaattaaaaaaaaggcctggcgtggtggctcacacctgtaaccccagcactttgggaggccaaggcgggcagattgcctgagctcaggagttcgagaccagcctggccaacatggcgaaaccccatctctactataaatataaaaattagctgggcatggtggtgggtgcctgtaattccagctactcgggaggctgaggcaggagaattgcctgaacctgggaggcagaggttgcagtgaactgagatcatgccattgcactccagcctgggcaacaagagcaagactccgtctaaaaaaaaaaaaaaaaaaaaaaaaaaaaaattagccaggtgtggtggtgggtacctgtaattccagctactggggagggtgaggtgggaggatcatttgagcctgggacattgaggctgcagtgagccgtgattgtgccactgcactgcagcctgggcaacagagcaagaccctgtctcaaaaataacaggccaggcgcaggggctcatgcctgtaatcccagcactttgggaggccaaggtgggcagatcacttgaggtcaggagttcgagactagtctgggcaacatggtgaaaccccatctctaccaaaaatataaaaaataattagccggacatggtggcacacacctgtaatcccagctacttaggaggctgaggcagaagaatcgcttggaccctggagaaggaggttgcagtgagctgagatcacgcaattgcactccagcctgggcaacagagcgagactctgtctcaaaaaacacccaataataataataataacaattattgctgaccgaacatgtttacatgccaggcggggcgttaggccctcctgcttgtctcagtgaagcttcttgagaccctcaggagaacagcgttattcttatgaccacatgacttgtaaggaaacggaggcccagagaggtagaggaacttgcccacatcacacagcatgatcgtcagagcctggcctgcgtgaggcttgtctgatcaagagccctattcttactctccaggatgtgactagcgttttgaaggagatgacttcatttattcatttaccagaccagctctgagcatctgtcggtgccaggcccagttctaggcccaggagatctccagagaacaaaggggatgccctcctggaggtgacattctagctgtgctgggaggaaggaagggaagtgaccctggctggccaaacttccccccaggctgccctggcaaaggaccaatttcaggcagggctggacccttcggcttctgggcccacccttgatgttttatttgaggctctcctgggtgctggagcttctgagatgaatttgccatctgtcccctacctcctgcccctggagttcccactgggaggagggctaaccaggatgggcttcctggaggcaactggagtcctgaggattaaagaggtactgagatggaggacagctgagtgagcagggggggacattgggggctataaggggcaagcgaggccagggggcacagggagaaggggacgggaggagggggaggcaggctgcactaggagcacctgcatgtccagatgaggggtctggactgtgtgtcatggagaccccaggagagaaatggcccctccccaggatgaagatatgtagagcagtccacacctctgagctccaggatcaaacctacttttttccagctgtgcgaccctggggaagtcactacacttctctgaaccccaggttcctcatctggaaaataacccggcagcgaggattaaaagaggcccatatataacatgcttagcatagagcctagcacagcgtaggtgtgcaaggtgtcctgggagtgggggtaacaaagtcacctctagactttgggtgtgccctccgtacctgccctgggatctgagacctccccaggctccatcccagcttcttgcacacaggtggagctgtgagtttggggagatggagaaaggccgggagatcaaggcagactaatgatattgtgggttccccctgccctcctgtgaggtggccacgggacagtgtgtggactccccagctccttgctgggctccactgggcactgttcgaggtctagtcagggcgtcccaggtcacaagggggcatggaggaggacacttgtggccctgggccacaggggacattgggcaccacatgtgagggtgtttatcatggaggaggtagtgattccagcagccgccattgatccagcacgtactgtatgccaggccctgccttagcgcctggcacagaaacctcatctggccgcctcccccgctgcggtggggcctaccccatctccgtttcctagagagggccctgcagagtggcgaggtaaaatgacttgccaagcaaggcaagatcaggactcaaaccaggcctctctgtcagagcctcccatttcctcagaactctcaggaggaaagggaggtgaatttttctgcacagctcccaaaggccttgacagggaggtggggttcagcacactacaggaaagagtttccagcagctggagctatccccgaagtggaggtagtgagcaccccatcactagacatatgcaagaagagacagaaagggaagcgtagaggggattgcagtgtggagtggaggttggatgggaggacttcagagttcccttgcagcttaacaatggcctgtgaggtggcagggatgagtcagggtatgcgtgtgtggagggaggggtggtgagatgaagaccagggagaggaaagggtggacctgaggcccccatggagaagggacgggcaggatgtgagtaatgggagaggcaatcacctattctcctgggcaatgctttgggggtgagcagcggcagaccaggatgccccagggaatggccaggtttgggccatctctggaagtgactggtccccggagagaggtggtggggctatctgcagctgaagaaacgggcagggccagagaaacaatgcaaggggactcctgggttttggctaagtagttttgggggagcaggtgaagacgtggggatccctggcccagccaggagctgccctagtataggcccagccccaagggttgtgtggggcagtctggaggttttggcctgggaaggggtcgggggaaggctgtataaaaagcttgaaagtgcggaacaggttggtggacctgaactccacctcctcgagtgggccccctgtatccacacccttcccagtcctgagcccagagttattctaaactcccgctgctgggagaggggaactgggaaccactaaatggcagaacagcacccttttccggccatatcacctgggccagaaaaaaaaaaaagagggggcccagagaaaagcgggctgtttctggggcaccgcggaggccgcagatcagaatccagctttttacaatagagcggaagcgaacctggctcagggcgattccggggcgggctaggcctgcgggtctctctgcctggtcccccggggcttttctgtcgcgcggaggcttcctgtcgcgggccctggtcccccctagcccccttccgggatgggcgagctcccgtcttcaagcccaagttaatgaccagggactttgaactttttggagatctgcaaagggctggcccctcggggacagtgacgccccccaccccctcccctgagcccggatcctggattaccccaagccaccgcccggcctccagccacctccctggctccggcgcggggcccttcctgggacccctcctctccccggtcccagccgggcggcgccgttggtacatcccggccggtccaggtggtagcgcccgcgcggctaccgtaattcccctacgtcccgcgccccagtttgcgctgagtcgactgagcccgtcccgcggctcccgtccccctctccccgcgcgccccatgaggctttggcagtctcggcccgagccttagagccttagacaccggggaggagaccctggtcctgttcctaggtgagtcgcggggaagtgggagctgcgctccggacggggggtgggactaggcgccaggacccccctaaaccgatggacagaacccggattcgagattcccacgtagtgccaggcctgtgggtgggtacagggtcctcaccagctgtatctccatttacgtgagggtggaatgggttcaagctcccgcccccatcacagtgtctctagggtgggtcggctcggagatagggccgtgaggagtctatgggaccctggccccggtatggggggtattggcggggcagggggatcctggaggggcccgggcgcgcggcgtggctgggaggctcagccgatcctccccatctggccagtcccggagtcggtcccaggcggaaaagccctctcgaggccggcagggggcgccagaggctgcgcctcgggcagtctgagcagacccaggcacccacttaggggtgggggatgcgggagacccgtgaatccggggaggccctggcctgccttggtggaagtctgggaaatggaggccaagaggtcccctgcagattccttagtaactcctcaagttgagggagctcgggggtattttaccattctcctgccctttagccggggtccgggcacacactaggacctggcagccatccccagatactgaattctatgccctcttggcacaggtgggcaaattgaggcccagtaggggaagggtgggggaacgtaggctccagaccaggtcttctgaagcccaggcaggtgccctctttcccccgctccctaccaaggaggcttctaagttgcaccggggaagggcttgctagtccaggtgctccgaagacacacgctggggtctggggctgggaactgcagaggctgggcaggaggggatgttcacagactgcagcccctccctctttctctagcactgggtcccagccttgggcatactagccaggaccgctccctggggaggaaggggccttcctggcttccagggcccgtgcggtgggcttagcctggggagaggttttctgtgtccctgccatctgcccggcacagggcagggccttaggtcaggctctgactccaggtgagcctcagaacccaaggggtgatgggtgaggcctgggcctaggggaaaggagggtgggtaggccgggtggagcgtagagagccgcctggcaaagccaccccgccctggctggcctgcccatgcatgcagtctccacccctggatttctaaggtgttgggtggggccttgggactagcaggctcccaggggagcttagccttggtgggaattcctggcaaggacatccctccagccagagagctcggactcctggttccaggcccgtctgctgtcggcagagcctggagctggccccagacctgcgtcctttcctggacagggaagtccctctcccacccagaccaggctggggccccagctcgttgtggggcagggatgcctgggggatccctggtttcccatctgcttttctggggctgggggaggtgatactgagggagaacagccgggtgcgggggtcctgccttggagactccattattcatcagcctccgcatctggtttctgggtatcagtttcaacaagccggccctgactcacaagcctggagctggggctgggctggggaggggctccctccccagggagttgggggccaggacttcttgggcctgcccctgagctgtttcagctccctgctgtggagaggaggtgggaatgcaggagcctgcccaggcccaccccactgccctggtacaggggctgggggctcctttctgctctgcactcttgcccctaaggaacagtcccccacccttgctgagtacccaggcagcagcctcactcagggatggccagggcccaggcactcaggtgacctctggtgatccgccctgacccagccctggtggtctccacttgatgcaacctggttaccccacaccggtgggctccccacaagctggctttgggatctgccgtgtcttcaggaaggcaatctccagggccctgttgcccaaaccaacattcagctgtcttcaggccccacgcctgccctgtgcctgaggcacccatttccctacgtagcagcagctggtgactttggggcaagtcagttgacacaggccttagtttctctatctgttaaatggggattgtaacagtatctcctcctaagagtctttgagaagagcgaatgggattcactgcctggaactcccacgatggggtggcacatggaatgctcagtgaaatgcagttatctgcctacaggacagtatgggggtggaggtctggggcaagaccacccgatttgaagtaggaactcacctgcccagggccagcaggcccaaggtcatggatactaggaggaggaagagaccttcggtctggcagtggggaaggctctgttgactgtcggccacaggaagggatatcctggccgagccctttcctgtccccatgtccttctgtggcatgaaggcccttctgccttcatctgttcactgatctcatccccaccaagcgcacctactgtgcaccaggactgttctaagtgccgaggacacagtgagatgcagacggccaaggcgctggcttctggagaggacagtctggtagggaagaatgatgataaaaaagtgaacaaagaaatgaattacaggtagtaataaacactaagaaggaaataatttaacttaaaggaattgagagtgggagggtaagggtggtttattttaagatgagggaaaaggacgtcttagaggtaacatttaagttggggcccggtgtcagctgtttcaagatagggtgcgtggaattccagacagaaaatacagaggagaaggccctgagcttggcgagctgtagggagagaaggaagaccggcaggtggaccctgtgcggaccagctgggagggaggcgggagcccggccatggtgggatttcactataagcaagatgggaagttttagttttcaaaactctgcctgttggccgggtgtggtggctcatgcctgtaatctcagcactttgggaggccaaggtgggggtggatcacttgagatcaggagttagtgaccagcctggtcaacatggcgaaaccccatctctactaaaatacaaaaagtagctgggtgtagtggcgggcgcctgtaatcccagctactggggaggctgaggcagaagaatcacttgaacctgggaggtggaggtcgtagtgagctgggatcatgccactgcactccaacgtgagtgacagagcaagattccgtctcaaaaacaaacaaacaaaaaacaaaaacacaactctgcctgtggtgtagacagtgggtgacctgggctttgggagtggagacagccctggaagtctcccagcctctaataaaacgctgctgccctcccaaagccatctcacggaccctggcccccttcccaccctctttccccatggaaccaggtggaggaggagcaattaggggtgggtgggctgatgacagacagcatggccacctcacccccatgggttctgaggagtgtcccaaggaggccatcccagaatcccagagccacagtctgagtttcagtcttgcctgtagacttttgtctctttatgtcactttatcccccacgccgtgaatggggctaatggtgcctgccctgccttcctgggaatcagtgtaaaagcgctttgacagccgtgtagtggtgactccagcaccagagtctgggcgtttgcgtcctctcaggctttgctgagtgccccctggcggtggggacctggcctagaactgcagggacctgggctgctgtgccatgtgggtcgccagggtttcctgatgcctccacctcacccagctcctgggggctgccaaggatagcctctcagagcagcccgccttctgcccacggccctttccagaggccaccggcctttggctctcggcctctgccgtacctgggcagtgagcagtcggtgtgagggggtgtccctggggctcaggctctcgggcaggggtctccaggttgatgggaggggctgagatgagagctggttgtgaggttggggtgggtgtgtgactggggctcaaagctggtgttggagcagagaggggtgtccctggggctagatggagagccggaccaaggaccctgaggggagtgtgccccatcctggcctcccccttctggtgcctgtattctaagagctcccttgctgggagtaagaaggggtcccctgggctgaggctccgaggcgggggtgggggtctccaggaggaagggaggagggaaggtacccttctggctgggagggaccgtgcgtgttggcgctgagggtgaggtggggaccacagcagagtgggcacccccagggctgggcggggatcgagtcacccaggggaggggctccacagtctccaaggtgggggggggtgtcaccagcgccccctgcctccagcattcaaggagctccccaggagaaagagcaagttctgaggagccctctgagcccggcattggtgttgaggagggagtcagagaagagaggggcccggggccgcgcagaggcgcagaggtgggggtaccccgggccaggcagaggtgggaaggtgggggtcccggggactgggcggaggcggggctgtgggggtcccccggccgggcagaggtaggggtgtggagtccccgggtctgggcagaggcggggaggcggggggtcgcccgggcaggcggaggcgggggtgtaggggttcccgggcggggaggcggggatccccggggctgggtggcgagggcccgggcgggagggaggtgtccgccttcctggggggctgggggctgttccgggcccggccctccccggggtccccgcgctcggcgggggcgggcgcggccgcacaatggcaggaagcggggctccgcgctttgtccggcgggcggcgcagaccgcggcttcctccggccgccatggggacaggacccggtgtctccggacgcctagcagcctccaggccgggcccggggctgcccctccgggactcggagccctcctgggccgggggtcgtgcccgcgacggtgatagccaggtacggggccgggacggggcgggaacggggctgggtgcccagttctcgcctgcagccgcccagtcctgtgcgggaggccagggagggggtgcccgtgactatgggccccgcggcccccaggggaaggatgcggcccatggcggccgagccccctacctgggcagctgcaccctggtgacggggacctcggactccggggtgtgtccccgccggctgagatgtccccgccaattcttggcgctttgtgtctggggccagctccggacacacctgtgggtcccgggccctatgctgggccgcccctctcctttccttcctctgccctggccctgcccacagcctcctcctaccccagaggcctctgtttctccttgtgcctctggccccagcccttgtgtgagggtggacgcctggttctctgtccccatcctcacatgcgtgtattccccaaagggcccccctctgttattttggctgcctggcgttagagggggtgggagctggctgttcccatgggtgggctctctcctcccttgggttgagacctgggaacattcccccccggaccctggtgtccctcctgcaggacagaggcaggacatggtgggcaggcaggcaggtgagggaggggcagttgggtctgagagaaggggctggagtctggcttcaagaaggggccattccgccctagtgctgggggagtcctgcctctggagggagctggggagactctggggtttgggggtgggacgtgaggcagaacggggagcagaaactgcaccagggagctctgcccaccccagcttctcagttgggctcatggttctcccggggggcttccagaacttcatcgtcaaccagatctgctcgacgaagtcggaaaccacctggttcagatcctggggctgagcctcactgtgcccccagtgcccctgagcctggggactgctgagaggagggaagcagatgaggtcagccgggcctgggcaccagcccctggcagcagctggaggagtcgagcagcctcagtgatggtagtggccacccagaccatcacagcagggaaactgatctcgaggctttcaagggatccagggtggggtgcgtcatagggctcagtccgtatttgttgaatactgactcttccgtaaggagcgaatcagggtatcaaatctgctgtctgtatattggattgatttaaaaacaagatggtggcacagagtcagacttggactggaagggtcccagagaccctcccagaactcctccgacctagcacggctccttccttgtcaccccctacctgcggtgagaccagggcttgggtcatgggcaggtctgccgccccagctggcactaggaaatctcaggaggcctggaagggattggagctgggagcctctgccatgctggctgggttcacagagggccagagggctgcggagcccgcagacggggggctcccaggaagaggggacaaggtggggcagggcccttccccagatcattctcatgaggagacacctgaagcttgggctcccagaagctgcaaagcctgatgtttctctcagcagtgcgctgtggattcagggtgagggtgtgggtagagccctggctgaggacagcttagtggtctctgtagtttttaaatttttttctgagacggggtctcactgtgtcgcccaggctggagtgcagcaatgtgatcatggctcactgcagcctcaacctcctgggctccagcaatcttcccacctcagcctcccaagtagctgggactacaagagagcgccaccacacccggctaattttgtttgttttttgtagaggcaggatctcactgtgtggcccgggctggagtttttgcactttgttttacgatagattaagacagaaaccagaaagagctgcaggggttgagggatcaatcccatcaccctcacttcaagccccacaagcacagttgaagatcactcctgaagggtgtagaagtgggggcacctggtgctcaaggctgccttcaggaatctgggtcatcctgtccccagccacctgcctggggcccagctccatgcagatcagcccctccctgagcacgtgggcctgcttggagtgccacctgccgactgccagtcctgtgccctgttccctttcctgtcagatggagacacggagggacacaagaaccaacagggcttgcatcaaactgagatagatttcctcctgtccccgtaatcccggctgacctgaggccagcctctcgctcctaagacacccatgagagggcgtgaatgtgggttaaaatctgggatccagtctgggtgccgtggctcacgcctgtaatcccagcacttggtgaggccgatgtgggtggatcacctgagggcaggtgttcaagaccagcctgaccaacaaggtgaaaccccgtctctactcaaaatccaaaaattacctgggtgtggtggcgtgtgcttgtagtcccagttacttgggaggctgaaacaggagaattgtctgaacccaggaggcggaggttgcagtgagccaagatcatgccactgctctccagcctgggcaacagagcgagactctatcgcaaaaaacataaataaatacataaataaataaataataatctgggatccagagccccacacacagtggcttcaagtcctagatccactggctgtgtgaccttagacaagtcatttcacctctctgagttttactttcctcttgtgtgaaacagggacaataacagcccttatcttatgggatgagatacacatgtaatgcccccagtgtggctccagacacatgacgaccacattaaaaacacactcagattcttcccggcctcctcctccctcctgtcactttctctgctatcctcaccacgcctatctcggaaatctctcatcgggctttcaccagccagaaactcttcagcgcctctctcctgccttaattcataaatgaaacaaggatttatggagcagctgggaccggaggtcaggcgctgaatcagacagagtaacatttctgtccttgcgaatgtgaccaggtgtggaggcagcagggtggaatatgtgacctgtcaggtgctggaaagtgctgaggacaggaaaggagcgtggagggcgaatgaggaggatgagaaggtgacttggggggaagctagcaggaggggagggaaggcagggagccatgcatttcaatatctggggaaaagcatctcagtccagggactggcagatgtcacagctcagaggtgggagctgccctgagggagtgtgtcccggaacgaccaggaggccagtgggtgaggggagtgagccaggatggaagagcaggacaggaggtccctgaatggggtggccttaaccctaaaaaaaaaaaaagtcaatgtcataaaagactgaaaaccctaaccttaacccttttggcttttttttttttttaagataatgtcttccctgtagcccaggctggagtgcagtggcgcaatctcagctcactgcaacctctgcctcctgagttcaaacaattctcctgcctcagcctcctgagtagctgggactacaggcgtgtgccaccatgcccggctaagtttttgtgtttttagtagagacggggtttcaccatgttagccaggatggtcttgatctcctgaccttgtgatccgcctgcctcagcctcccaaagtgctggggattacaggcatgagccaccgcgcctggcctttttatttacttatatatttatttatttatttatttatttatttatttatttattttgagacggagttttgccccaggctggagtgcgatggcacaatctcggctcactgcaacctctgcctcccgtattcaagcgattctcctgcttcagcctcccgcgtagctgggattacaggcatgcgccaccatgcccagctaattttgtatttttagtagagacagggtttcttccatgttggtcaggctggtctcgaactcccaacctcaggtgacccgcccgcctcggcctcccaaagtgctgggattacaggcatagccactgctcctggccccttttggcttttattcagagtgagatgggaacccttggagggttttgagtagatacagtgggactcctctttgaacagggcccactctagctgcacatggacaacatattgtgggggatgggggtagcagtgaggccagttttgaggccattgttgtcatctagctaaaaggtggctgggcagtggcacgcttatgagctgtggctgggttgaggccacagatactaaaggtggagccagcgggattttcgggctgaccagatgggggcataacagagaatgtcaagagtgaccccaagctgatatggtggctcacacctgtaatcccagcactaattccagcactttgggaggctgaggcgggcggatcagttgagcccaggagttcgagaccaggctgtgcaacatggcgaaatcctatctctactaaaaattagctgggtatggtggtacatgcctgtagtcccagctacttgggacggtgaggcaggagaatcacttgaacccaggaggtagaggttgcagtgagccgagattgcggcactgcactccagattgggtgacagagtgagaccctgtctcaaaaaaaaaaaggaaatcccccaccttgcagccatcagaagaatcaaataattgatttaggttaaaatcatctatgtatgctaaagctcttaggaccgcaagctcacatcaccatgcctggctaatttttttttttttggagacaaagtctcgctctgtcactcaggctggagtgcagtggtgtgatctcggctcactgcaacctctgcccccggttcaagcaattctcctgcctcagcctcctgagtagctgggactacaggcgtacgctgccacgactggctaatttttttgtattttagtagagacggggtttcaccgtgttgcccaggctgctatcgaactcctgagctcaggcaatccacccgcctcggcctcccaaagtgctaggattacaggcatgagccaccgtgcctggcaattttttatatttttagtagagatggggttttgtcatgttggccaggctggtcttgaactcctgacctcaactgattgagtgagattactggggaacaagacatctcaaagtgccatgccacagattacttattaattataggggaaaaagggactctacaaggtacagaggtccccagaggatccagcattacaggcaaatagcaagaacacacagctctgtggtgtccccgcctgaacgctcagtttgaaactttctgaggaccaccagggagatccacattgaggagctctgtgcgaggctgctggctcgaagacttccaaaatgtcaaggtcagccaggcacagtggctcatgcctataatcccagctctttgggaggtcaaggcgggcagattgcttgagcccaggagttcaagactagcctgggcaacatagtgagatctgtcactactaaaaataaaaaagttagttgggcgtagtggcatgcacctagtattcccagctactaaggaggctaaggcaggaggattacttgagtccgggaggttgaggttgcagtgagctgatcatgccatactactccagcctgggctacagagcgagaccctgtcttgaagaaaaaaaaaaagtcaatgtaataaaagaccacaaaaaacaaggctgggcacggtggctcacgcgtgtaatcccagcactttgggaggccgaggtgggcggatcacgaggtcaggagatcgagaccatcctggctaacacggtgaaaccccatctctaccaaaaatacaaaaaattagccgggcgtggtggcgggcgcctgtagtcccagctactcaggaggctgaggcaggagaatggtgtgaaccgaggaggcggagcttgcagtgagtcgagatcgcgccactgcactccagcctgggcgacagagcgagactccgtctcaaaaaaaaaaaaaaaaaaaaaaggataaacagacataaccaaatgccacgtgtgaaacttgattagttcctatatgaggaagtatatctgtaagaacgttatttagacacttgggaaaatgtcaatatagactatatatcaaggttcagtttcccaagtgcgacaattctatggggttttgtaggaaaactgtctttgttcttaggcagcagcatgatttctgccccaggggaggggggtgccgagaagagaatgggagagaagcagatgtggtagatatcaacttggggagtccagagggcatgtggatgtcatgtgctattcttataatttttggtaggtttgaaatattttaaaacaagtctgggcgcggtggctcacgcctgtaatcccagcactttgggaggccgaggcaggcggatcacctgagaccaggagttcaataccaacctggccaacatggtgaaactccgtctctactaaaaatacaaaaattagtcgggcgtggtggattgtgcctgtaatctcagctacttgggaggctgaggcaggagaatcacttgaacccgggaggcggaggatgcagtgagctgagatcgtgccattgcactccagcctgggcaacagagcgagaccccttctcagaaaaatttaaaaaaataaaaagaaaagaaatattttaaaacaaaacttgggaaaaataaagagagtgggaggagagaactaggaagtcgtgaatactgatacctgtttacagagtttagctgtgaagggaaagaaagaaagtcagccgtagctggagggtgaggtgaggcctctgtaaaatggagaaataaggctgggcgtggcagctcatgcctgtaatgccagcattttgggagaccaaggtgggcggatcacttgaggccaggagtttgagaccagcctgggcaacatggtgaaaccccgtctctacaaaaaatacaaacactcgcctatggtggtgtgtgcttctagtccaagctactcgggaggctgaggctcgaggatcacgtgagtctgggaggtcaaggctgcagtgagccatgattgtgccactgcactccctgtctcaaagaaagaaagaaaaaaaaagatggagaagccgggcgcggtggctcacgcctgtaatcccagcactttgggaggcccaggcgggctgttcacgaggtcaggaattcgagaccagtctggccaacacagtgaaaccctgtctctactaaaaatacaaaaaaaaaattagctgggcatggtggtgtgcgcctgtaatcccagctactggggaggctgaggcaggagaattgcgtgaaaccaggaggcggaggttgcagtgagccgagatcaagccattgcactccagtctgggtgacagaatgagactctgtctcagaaaaagaaaaaaaagaaaaagatggagaaataaccacgtgttggtgtggcagtgggggaaatgatccagcagaggggaaacttgatgatgtgggagaggggggactgctggggggcgtctcctcaccctggatcgagagatggagggcagttcattctaagtccctgcagcgctgggccggggtcgagggatgtggtggatctcgtggacctcctgaaggcttctgtccccaccccaggtatgtcaccacgccgactgccagcagctgcaccgccgggggcccctcaacctctgcgaggcctgtgacagcaagttccacagcaccatgcattatgatgggcatgtccgcttcgaccttcccccacaaggtgagcacaggcgggagccgcagctcggcccccagagctcctgtgtcagtgtttcagtaactgtcggaaacgtgctagggcgtcataaggacaagtcgactgtaaataatgaaacccgagtatgttacggttccttttgttccaaatgttttttagcaagagagaaagtccatgagcgtgccccttccagaggcaggcctttctctatctggtgctgtgctctcactggttctcacctcccccagctgcttttgcccctggcctgtggcccacacagagaaggcccctttctttctagttctgcctatcctcagggcaggggacttctggacaagtcctgcaagccaggctgtgggcctagcagaggcagtgtggagtgggggtggccaggtcaggaggcacttggagcaggaaataagaaattcctcttgctgagcagggacccagctcaggcccaccatcaactgcctatggaggagtggctcgcaggcacccaggcctggtgagaaatgccaacccccgagtcctttcccagctgatcagaggaacaaaaggattcttctggttgggcacggtggctcatgtctggaatacaaaaaatacaaaaattagccaggtgtggtggcacacacttgtggtcccagctgctcggaggctgaggtggaaggatcgcttgaaccccgacaatggaggctccagtgagccctgatcgtgccactgcactccagcctgagcgacagagcaagaccctgtcttaaaaaacaataaacaaacaaaagactctctcccactgccagggccccttgggaattcaggtgtggtcacagcatgggggaggggaggcctggaagaaagagccatggactttggtcccttcctgtaataacctcagaggcaaggcttccttatccttattttatagaagggtaaactgaggccacaggtgagtttgtttttggggtggagcttcaccatgggtgtcatcccagggcctttgtgtccttttgggtctgtggggatagacagcaatgactaaggccaggcaaggtggctcacacctgtaatcccagccctttgggaggctgaggtgggtggatcacttcaggtcaggagtttgagaacagcctggccaacatgttgaaaccctgtcattactaaaaatacaaaaaaatgagccgggtgtggtggcacacgcctgcaatcccagctactcaagaggctgaagcatgagaattgcttgaacccaggaggtggaggttgcagtgagccgagatcatgccactgcactccagcctgggtgacagagtgagaccctatctcaaaacaaaaacaaaaaacaatgactgagcccctctcctcacagaactgaagggcccttgctacctttaatctgggggttccagggtaacaggctgtggtccctctggaggcagccatgctgcaggctaaggaggggcgggggaggcacaaccctctcctgctttctcccaaggctctgtgctggcccggaacgtgtccacccggtcatgcccgccgcgcaccagccccgcagtggacttggaggaggaggaggaggagagctctgtggatggcaaagggtaggtgagggatgagtgggcagagagatacctggagggccccacggctgggtctcagatcagacattcaggaccagatgctctggcgccttcctcaagtaaggctgatgggcagacctcttcccacgcctgtggctgtcctgactccgggaagaggccacccagcctgggccagcctccagggtgcttgggatcctagcccacaccagaccaggtaccgttcgatgtgactcccgtgttggccaccagagggcgcacagccctatgcgggcctggccgggttgaatccacgcgggttacctgtcacctggggtgagccaagggcggggaggccacaggcccactcgccgcccacgctggcgagggccacccacacctccagcctctgccctcctcgcttccctgcagggaccggaagagcacaggcctgaaactctccaagaagaaagcaaggaggagacacacggatgtgaggagccccccagagccggcagatgcgggttccctacagcctgcgcccttccccgagcctgggccttcctccgggatgggggtggggaggtctgcatcccagggtgcagaggtctgggagatcgctggggttccctttcttgctggggttcccatccgagaccggagggtggggagggtggggaggagggttgggaaggagggtgggaaggagggtggggaggagggttgggaaggagggtgggaaggagggtggggaggagggcgggaatgagggcggtgaggagaagctcacagcccccacccccaccatcctcccaggacccaagcaaggaatgcttcactctgaaatttgacctgaatgtggacattgagacagagatcgtcccagccatgaagaagaagtcactggggtagggcttgatggggctcagggtggaagtgggactgggagtaggggtggccccatgttgcaggctccgggtctctgcaggtgtgacgtgtgtgtctgtgtggtggcccgtgagcgagcgcatccctgcgtgggcagacccgtgctggtgtgcacgccagtgtgagggagtgcggtggggtctgtgtacttgtgcattttaatcatgtatgcaggagccaggcctgcgtgtgggcaggcgtgtgacaggtctgccgtggtatgcagatgcgcctgtgtgagcacctctgcgggcaggtgtctgtggacctgcgtgtgatcccatgcgggcttcccttttccgttgggaaggtgggggcagctggggctgtgggtggggcgggggctcgtgggggcggggcccaagctgaagcgactggccgcctggttctaacacacatgcctcctgtcctgggggcagggaggtgctgctgcctgtatttgaaaggaagggcattgcgctgggcaaagtggacatctacctggaccagtccaacacacccctgtccctcaccttcgaggcctacaggttcgggggacactaccttcgtgtcaaaggtgagaagcagcctgggccaaatggggccgctgggactggcggagcctcctggagatgggcgcccttcccaggctcaggttcccattggtcgtgggcctgagcagcctcattaccatacaggtgtctctgctggatgctgctgggggaggggagggtgctggcagggcggggctgtcgggggagggcaggcaggccttggtgtggatcctccggggagagaggaccggggaccccctcctccaccagaccagggtactgaggatctctcgtggcccccacatgcagccccagccaagcctggagatgagggcaaggtggagcagggcatgaaggactccaagtccctgagtttgccgattctgcggccagctgggaccgggccccccgccctggagcgtgtggacgcccagagccgccgggagagcctggacatcttggtgaggaggagggggtgtgtcaggggagggggtgggaaggggcccaggctgggcccacagcccctcctcagaggcagtcaccctgggtctctcactgccccatcttggggttttaattgtcccttctggaaaatggggttggctgggagagtaggggaccctctctctctggatctagccatagcccaaggtgagggcttgtatctgagactcttctagtgccaggggtcagggaacctgtgtgtgcatgtgtgtgtgagagcacttgtacctggggctacagaccacccagagctgtgttccagagtgcatctgagtgtgtaactctgtgcttcatgcttgaagctgggggactgggggatgatagtctgggcgtatctgtgtctggaccttccagtctccagatatgtctgggtcccaggagaggggacaccccagggtagagatgcagagaccctcctccatcccaggctggcctgaggccctggaaacccgccctggggtggggccatgggggctggcagggggtcccggccctgaccacccttccctgaccaggcccctggccgccgccgcaagaacatgtcggagttcctgggggaggcgagcatccccgggcaggagccccccacgccctccagctgctctctgcccagcggcagcagtggcagcaccaacactggcgacagctggaagaaccgggcggccagtcgcttcagcggctttttcagctccggccccagcaccagcgcctttggccgggtatgtggccccatctgcccagggtcaggcagctggctggccatgacccctgaccctgaccagggtatctttccaggaggtagacaagatggagcagctggagggcaagctgcacacctacagcctcttcgggctgcccaggctgccccgggggctgcgcttcgaccatgactcctgggaggaggagtacgatgaagacgaggatgaggacaatgcctgcctgaggctggaggacagctggcgggagctcattgatgggcatgaggtgagtgcgggccacagtgctgctccctccttgtcccgaaaggaggacagccctcgggaggacccagtgatcagatgttccatgggacgccccaaagaggccactgttaccattagcccactttggagacactgaggctagatgaaaatggtgtgctgcttggctgttttaatggcagaggagggcccagatcttgggtgtcttaactgtgattactcatgtggtgtcaagggtgaccctgctcctcttgggacctccatgtccccattgggaaaatgagagttgcatgcaggttgcttatcctccccggccaccctaaggtgctccaggcctcgtgaatgacccatcctgccctccctctagaagctgacccggcggcagtgccaccagcaggaggcggtgtgggagctgctgcacacggaggcctcctacatcaggaaactgcgggtgatcatcaacgtgagtaggggctgcgctggtccccgtggccaccctgcccccctctttctgacagccctcagctgagtctgagcctttgcagaaggagcaggtgcctggcaatgaggtgggggcaggaaagtcagacaagggctgcgcccagggaggaggtgcctcctagaggaacctgggagggggcttcgggcaggtttgtcaggttcagctgaattagcacaggtgaggcctcattctttcactttcgttcagtggctgtttcccaacacttgctgtgtgctgggtgcccagcaggccacgccctggacgggacagagtgagctggcagtgtagggatttcggctcagggaggggagcacctaccctgggcttggagcttcctggagggaggaagcaccctcagaggtgaaatctggaggctaagccagggcagaggtggagaagggaattccaggcatggcttcaaagccagtctcccccgagcttccctccaggagggaccagggcagtgtgacctcgggagggctatgaggactgggtctttcctcagggtctggactacccaggtgcgaaggccaaagggtacagccttcttatccgtggctgctgtggggcctcctggaacggggaaggggaaggagtggcaggggagcctgaggctgggtggggccctagggctgagacagcctcccgaccccagtcacaccatcccctgatcccacagctgttcctgtgctgcctcctgaacctgcaagagtcagggctgctgtgtgaggtgcgctgggattcgggggcggcggcgggtgaggtaccaggaaggagggcgggacctggacctggggcggggctaacctggcggaggggcgtggccaaccgcacctcccgccgcgcccaggtggaggcggagcgcctgttcagcaacatcccggagatcgcgcagctgcaccgcaggctgtgggctagcgtgatggcgccggtgctggagaaggcgcggcgcacgcgagcgctgctacagcccggggacttcctcaaaggcttcaagatggtacgggcggggccgggcgcaggcgggggcactgaggcagggctggggcgccgaaaagcctccacggcccgatccggtctgcccagcatccccaacctcccccaggcccgtaaccgcacttgaccccttgtggccaagggtgaggaattacgaggcggtcgcccgggtttgagcctccacctgaccatctacccctgatccctggccacgggtggtcactttggctgaggctcagtttcctcatcaggaaacagggatcataagcttgctgcccccttggggtggtcgcccaagtgcagtaaggaagcgcttgcgcagcgcctggcgcgggccggcccgcagggagcgcgcggtaaccggcgccgtggttgttctgccccgggccagttcggctcgctcttcaagccctacatccgctactgcatggaggaggagggctgcatggagtacatgcgcggcctgctgcgcgacaacgacctcttccgggcctacatcacggtgagggcgcgcgtgccgtgggcgggggcgcaggaggacgggaccctggacggggccgggtggggcggggcctgccctgagcccgcccccactcccccaccgcagtgggcggagaagcacccacagtgccagaggctgaagctgagcgacatgctggccaaaccccaccagcggctcaccaagtacccgctgctgctcaagtcggtgctgaggaagaccgaggagccgcgcgccaaggaggccgtcgtcgccatggtaaccctgatggccagcgggagccgtcccccctgcgcggctctctgctccgtcatgaccctggacctgaagctccctcacctgcccctagatcggctccgtggagcgcttcatccaccacgtgaacgcgtgcatgcggcagcggcaggagcggcagcggctggcggccgtggtgagccgcatcgacgcctacgaggtggtggaaagcagcagcgacgaagtggacaaggtgggcgtgtgtgtctgcgggggttgccggctgggagagaggaaggcccagctggcaggcaggggctgtgctgggcatctcactgaggatgcctagctgagatgggagtcagtctctggcctcccctacgttcacgccatccgtccccagctcctgaaggaatttctgcacctggacttgacagcgcccatccctggcgcctccccggaggagacgcggcagctgctgctggaggggagcctgaggatgaaggaggggaaggacagcaaggtgattccagggccaccccacccctgtgccctgcccttcctagggacctcctgggccccagtcactggttctcagctctgcagtcccttcggtggttactcaagaaccagtgaccttgtcatagtgaatgacagttctctgcctgccattcacaaatccagcagtagggtcctagcccttgaaggcaccagttgtgcccatttgttggtgccacatgggttcctggtgggagggcagccatattccacaagtgggccaggaaccccagagccttgctactgtgccatggccccttcaggcatggggcaggctgagagcttgcacacggtgacttcaaagtcaccagtcttctttttaatgtaaacttgtattgagataagtcatcaacgtacatctcagtgaaagagaatcatcttcctcttcattttaattttacttgaaggttcatggtgggaggagtgtttgacaaaaaccgagtgctcccaggggaggctggtgccacagtccctggccctgaccctgctggcctctctggccaccccccctcctgccactgcagatggatgtgtactgcttcctcttcacggatctgctgttggtgaccaaagcagtgaagaaggcagagaggaccagggtcatcaggccacccctgctcgtggacaagattgtgtgccgggagctacgggaccctggtaaggagccctggtcccctgttcctggtcaggggctgtgatgggtgggggccatcgtctctgctgacactgacttgggccttccctaaccagggtccttcctccttatctacctgaatgagtttcacagtgctgtaggggcctacacgttccaggccagtggccaggccttgtgccgtggctgggtggacaccatttacaatgcccaggtgagtgcagagtagtgagtgggtgggcaaggcagattagggagatgctggtcacaacccattctgtcccatgtaccccaaccttgcctgcagaaccagctgcaacagctgcgtgcacaggagcccccaggcagtcagcagcccctgcagagcctggaagaggaggaggatgagcaggaggaggaagaggaggaggaggaggaggaggaggaaggcgaggacagtggcacttcagctgccagctcccctaccatcatgcggaaaagcagcggcagccccgactctcagcactggtacgtctgctcatgaccacccagcaggtcaaaccaggacaagtactctagcccaggactcctgaaggcccagccacgctcccttcctcccaatggcctcttgtcatgaacactgtgggagcggggctctgtctcccccagagtccgggtggggagggcagacacctttccatgtgctgccagccctgatccattcgtggtagctgcctggggtgctgtgctgaggatccttagggcagatccagccttggcagggaagagtgctgggctcgctactgaggtctgttgtgggcactggagctggaagatctgccacacctgccacatgctgccatctctgagcctccagccccaggagggcagagggtataaaccaccgtgcattgcccagcctggggctgcctcaggccatctaggtttcatggcctgggctgactctgctcctggccccacagtgcctcagatggctccacggagaccctggccatggttgtggtagagcctggggacacgctgtcctcccccgagttcgacagcggtcctttcagctcccagtctgatgagacctctctcagcaccactgcctcatctgccacgcccaccagtgagctgctgcccctgggtccggtggacggccgctcctgctccatggactctgcctacggcaccctctccccaacctccttacaagactttgtggccccaggcccaatggcagagctagtgcctcgggccccagagtccccacgagttccttcccctccaccctcgccccgtctccgccgccgcacccctgtccagctgttgagctgcccgccccacctgctcaagtctaagtccgaggccagcctcctccagctgctggcaggggctggcacccatgggacaccctctgcccccagccgcagcctgtcagagctctgcctggctgttccagccccaggtattaggactcagggctcccctcaggaagctgggcccagctgggattgccgaggggcccctagccctggcagcggtcctgggctagtcggctgcctggccggggaacctgcaggctcccacaggaagaggtgtggagacctgccctcgggggcctctcccagggtccagcctgagcccccaccaggggtctctgcccagcacaggaagctgaccctggcccagctctaccgaatcaggaccaccctgctgcttaactccacgctcactgcctcgtgagtggcctggactggggtagggcaggtggctcagggcactggcatgggggcccactcatgcctgggagcatcgcatttggggagggtcatggcggagggagcctgaaccctgcccagtgtctgggcgcagggggctgtggtgggcagcagtgaaggggcctgaggagtgccgtggggaagagagggtgaccagagccactctgaatggcgtcagccaaagaaggactctgtcccctccccaccctgtagggaggtctgagcagagggaggcccccaagagtgccattgaccaagagacagcagacagcctgcctcctggggcgtgccggcacctgcttcagctactgcctcctgtatgcatgagccggatgctgggcaggatccctgcctacgcccgggcccgatttgcgctttgccggactggatggagtggaggaggcccaggccacagtaccaccccacctgcccaggcagcccctcgtcacctactccccgaagttaccagctcagctcgagtcttcagggctgggctcctaggctgcccatcctacttctaccctcactggcctccagtgggattcactcctgccctgcccccaccttcccagtcccacaggccacccctggcttgggctgggttctgtgaagttacgtatttattgagcttttggttcttttataaagacttgtctagactcca

SEQ ID NO: 15734 - DNA, 53918 bp, Homo sapiens
aaactaaggccttcctggtagccaaggagcccagcagaggggctgctgctggctgctgggattgcagaggccggggtctctgtggtgttgctttcctggaaaggagggacggcacctccagggcagccagcagtgtgggagcccattccagggcgcaaatgggcactcaggaatggaaaatccaagaaggaaccaaccaccaacaaggaaatgcagtgtgagcggcggctgcgaagtctgtgccttcaaatatacagcgcccaggggacctgtgttggacggggagcaaattggcagggctgagagcgccttggttttctgtgcagacaggtccagctgcagaaattaagactggggctgagtcggggagaagccttccatgttgagatggcaactgggcaaagcaggacggagacctgtgtgtctgattagagaggcctgtggcattggcatgtggctggaggtccaggcagggtgccaccaccgcagaggtcaagcatgaattcagtcctgacaaaacatgggtctccacctcgaagctggctcagcctttgttcaggaaccggtgagtatgttttctatctcttttgtctagaaaggaggtttgaggacacagagtgaaaggaggggctttgcaggtcttggagggctccaaggactcacactcactgaattagtccggacggtttaagagccacttgcaggctggatccatttggtctcattcttccattaatcagtgagttaagccctccaagccctgcagtttgagccatcagctctgatttgagggcagaggagggggacttgctgctcagccatctaactcctgacagaagaaagacctagactccatatgccgaagggttgctgggcgcagtggctcacgcctgtaatcccagcactttgggaggccgaggcaggcggatcacaaggttaggagatcgagaccatcctggttaacacggtgaaaccccgtctctactaaaaatacaaaaaattagctgggcgtggtggcacgcacctgtagtcccagctctcgggaggctaaggcaggagaatggcgtgaacccgggaagcggagcttgcagtgagcagaaatcgtgccactgcagtccagcctgggcaacagagcaagactccgtctcaaacaaaaacaaaaacatatgccaaagggttgctctggtggcaggttggctttgctgctgtggctctcgtgttagaggagggttacctgtttcctcctctgtgacatagaaagtggggcaagaaagatgccccaaggcccttcagactgtcccattttgtgccttcaagttgcacgcccctggcaaggatggtctggaaccgttcccaaccttgtctttgtagctctcgggaagggccaggaaattcctcctgcacatccatattttcttttcttttttctttttcttttttttttttttttgggatggagtttcacttttgttgcccaggctggagtgcaatggtgcgatatggctcaccacaagctccgcctcctgggttcaagtgattctcctgcctcagcctcccgagtagctgggattacaggcatgcgccatcaagcccggctcattttgtggttttagtagagacggggtttctccatgttggttgggctggtcttgaactcccaacctcaggtgatctgcctgcctcggcctcccaaagtgctgggattacaggcgtgagccaccgcgtctggccctgcacatccatattttcaagtttacttttaatatccgccatgacacggccgggcgcagtggctcacacctgtaatcccagcactttgggaggctgaggcgggcggatcacaaggtcaggagatcaagaccatcctggctaacatggtgaaaccccgtctctactaaaaatacaaaaaatcagctgggcgtggtggcaggcgcctgtagtcccagctactcgggaggctgaggcaggagaatggtgtgaacctgggaggcggagcttgcagtgagccaagatggagccactgcactccagcctgggcgacagagcgagactctgtctcaaaaaaatatatgtatatatatatccgccatgacgcattttgggagtcgggggtcaggaatagcgttcatgaaatccagtaacattctcctacccgagttggagcctggtctgggaaacatcccggccccagcgggatagcctggcctggcctggcctcggggcatttgggccatggacccttctgtttgtcgtcagatctgagcctgttccaacctttatctctgtctccctgatggctggcccgacagatttatgaagctgacagcgagtcatggagaattcctcccagggccatcccctccccagcaaggaatctgagctgctgactttttcttcctttgctcacccccacaagctcatcccctgctagtattcagggaatatagagttatgtgagccacagtgacagcgacagcatgttgacatgtgagcccctagcactcacatagtaaaatggccacttaattaaataagcctggccctgcttatttactgaagggagattgcgtccaggtgtgggtgacactgggggttacagaccttttggagtgtcccctgtatcatacctaccccatgaacagcagagaatggtcacctattctcagcatatgcttggttgtatctttttttttttttttttttgagatggagtctcactctgtcacccaggctggagtgcagtggcgcgatctcggctcactgtaacctccgcctctcaggttcatgccattcttctgcctcagcctcccaagtagctgggaccacaggtgcccaccaccacacctggctaattttttgtatttttagtagagatggggtctcaggcgtgagctaccgcgcctggcctttttttttgtatttttagtggagatggggtttcaccatgttggccaggctggtctcaaactcctgacctcaagtgatccacccgtcttggcttcccagagtgctgagattataggtgtgagccaccttgcccagccacagaggtattacttttataagcagaacaaaagtgtacatgtgtgtgtgtgtgtgtgtgtatatatatatatatatgtgtatatatatatatatatatacacatatatacacacacatatatatatacacacacatatatacacatatatatacacacatatatatacacatatatataacacacacacatatatatacacatatatatatacacacacacatatatatacacacatatatatatatgccagtacaaaaaacttgccaatacataaaaacattcctcatcttttattttatatttttttgagacagagtctcactgtgttgcccaggctggagtgcagtggtgtgatctcggctcactgcaacccccacctcccgggttcaagcagttctcctgcctcagcctccccagtagctgggattacagatgcccgccaccacgtccagctaatttttgtatttttagtagagatggggtttcaccatgttggccaggctagtctggaactcctgacctcaggtgatccaccctcctcggcctccaaagtgttgggattgcaggcatgagtcactgcgcctggcctcctcatcctttttaatggcttcacgatatacatggatatgcctgaaattttaaaccaggcctctaatagcaaacttttggattgtttccaatatttcacctatttgttttttcttttgagacaaggtcttgctatatcgcttaggctggtctctgaaagtcctgggctcaagcaatcctcctgcctcagcctcctgaatagctgggtgtgtgccacgaagcccagcccagtttttcattcttgcaaatggtgccatagtggacattcttgtgtctgtgtctgtgtgcacttgtgaaagagcatctgtagagggaattcctaggacagtggaatttctgtgtggaaggctgtgagcaatttcattctgacatttccagattgtcatccagacagccacttattctcccaccagcagagtaagtggtcaccgtcttccatgtccatgtccctgagatatgaggggcatgactagtcaggtgactccttatgtggtcaccaggcatttccctcttgtccactcacattgctgaaatgccatggctcttggcagaggagcaggggcagcggtaggggactctggggtcatgcctccagaacttccgagggtggtgtccagaggatacactatattaaatttgcttatctttctggttagatttcccacttctaaagaccctcttacatagtctttttttttttaatttaattttttgctgagacagagtcttgctctgttgtccaggctggtttcaactcctggcctcaaatgattctcccacctcagccttcccaagtgctgggattataggtgtgaacaaccatgcccaacctcatacatttttttttttgagacagtgtctcactctgttacccaggctggagtgcagtggcaaaatcttggctcactacaacccccacctcctgggttcaagtgattctcctgtctcagcctccccaatagctgggactacaggcgcccgccaccacacccggctaatttttggtatttgtagtagagacggggtttcaccgtgttagccaggatggtctcaatctctcgacctcgtgatctgcctgcctcagcctcccaaagtgctgggattacaggcgtgagccaccacacccggcctcatccagcttttttagttgtcccaaatgggaaggtgggtctgatttattgactccgtcactgttggaagcagagttcctactgaaggctctaaatgttcaaagcatttagcacattgtctatttgtagctgttgttatatccaaaattcggtatgattttctttctttctttttattttatttttttattttttgatggagtcttgctctctcgccaggctggagtacagtggtaccatcttggttcactgcaacctctgcctcccaggttcaagcagttcccctgtctcagcctcctgaataactgggattaatgcctggctaattttttgtatttttaatagagttggggtttcactatgttggccaggctggtcttaaactcctgacctaaggtgatctacctgcctcagcctctccaagtgctgggattacaggcttgagccaccgcggctggccaattttctttttttttttttccttcaagatggagtcttgctctgtcacccaggctggagtgcagtggcatgatctcggctcgctgcaacctccgcctcccgggttcaagcaattctcatgcctcagcctcccgagtacctgggattacaggcacctgccaccatgcccagctaatttttgtatttttagtagagacaaggtttcaccatgttggccaggctgatctggaactcctgacctcgtgatctgcctgcctcagcctccgaaagtgctgggattataggcgtgagccaccacacccggccattttctttctttttctttttttttttgaggcagggtcttgctctgtcaccaaggctggagtgcagtggcacaatcacaactcactgcagccttgaccttctgggctcaagtcatcctcttccgtagcctcctgagtagctgggaccacaggcgcataccaccatgcccagctaatttttaaactttttgtagagacacggtctcactatgttgcccagcctggtctcaacctcccaggttccagagacccaccccagcctcctgagcagctgggaccacagctgagtgccaccatgcctggctaatttttaattttttttgtagagacaaggtctcagccatgttgtccagtctggtcttgaactctagggtcaaggagtcctcctgcctcagcttcccaaagtgctgagactgtagacgtgaacctccatacctgtccctgctttatgcttctcgagatgtaaatgaacaggatccaggcagaacccctccaggcccatatgggaggctctcaggaaacagcctcctctgtaatgccaagatgggttgagaccccatagctgccctgcacagaaactgcctctggaggctgggcctgtgtcctgggcttagcggggaagggcccttgacttctgtgggccaacagtcagacaaggcccatccgaggcagcctgggtctctgctgggcatgtccacagtgacagtagtgacagtttccaaccaacaggaccagtgtttcgacaatggggtagatggtttgaaatcctagctgttctggaagtccagcctgtcttttccgtggttgggagcccggcccaggagcctttgttccttggacagacttggccctcgagagggccccagtctctcagtttgtctggccaggtttaaaagtctgcagtggccagcagctggcagtcaggctggaatgtagctgtgctggcttggccgcagacagccccgaggaacagccttcatttccgcctcttcccctcacctcaggctgaaaaatccccggcaggtggcagctgctgggtcttagtctgagtctcagcttctccaaggggaccaggtttgaccccaggcgggcatccaggcatgtgggctgccctctgggcatggtcctacttggatgccagggagccctgccaccttgacacacagggtgaggtggagcccagctggaccaagccttggggtatttggaagtcagccctggtgagagatggttgattgcaaattgattctagttcaaatcaataagcatttccctggcacctgccctgggccaggctgggcctgggccctgcatccccgatagagtctagattctaagggctcccaggctagatggagcgaggggagctccacagcgggatccaggcgtcagtgagaggagctaccgattccaccaggaacagtgggtgggcggggccccagggtctaagtggccatgccgggggcaggcttttaatcaagacagtgacatttgcagacttgcgttctgttcttctgctgtgactgttggccactgtctctgagtttggaggggactctcctggattaatttattcacccccccatggccaccctgtgaggcctgtgaggcctacgctgtataaatgaggaaactgaggcccaacttgttcgagatggcacagccggcaggagctggagctgggatttgaacccggggagcccggctggttctggaggctgtgttggagggggtaaatgtgagacggggagggactgaggcagggcggtggtggcctgaggctgtgccagcgcagggcagggctgatggcactgaaagacatcctggagacagagcttagaacagtgtgggagctggtttgtggtcggcccgccccaggctgcagttgtcccgaggctgcagctggtggttgggtgggtgatgatggtccggccagatgctgggcagtgactgggcctcccaccctgctggtgagccgagtgggcctgagggccccactgtctggcttccctgccccccacacactcggtagcccggggaggggcccatgccagtgggctcgaaggtcagggaggtttgtccaggcctgaatggctcccagagtccaagtcagggggcacatctggggctgggagaagcccacttgagctcacgtggcctcagggcttgaacagtgctgagcaggaaggacaactcgctcggcctgggatgaccccacagcatgtggagctcaaatatctcggctgtgaaggaggagccaatggtatggagggtggtggacagaccctgcggcagcacccaaccccttccgagcgacatgggcaggtctccaggcgtcccgagcctccgcttcctcctctgtaaaacggggtgatggtgatccaatcacagggccactgggtagattaaaggagatgccaccttgaaggcccttggtccagagtcctggtataatacataggacaccggcagatgttagtgtccctgctgtaaggacagccagggaaagggggctgagagggtccctggcccagcaggagtctgttcctgagcacagggaagagagtagcacgggctccccggcttccaagggcctctcccctgcccggccctgggcttcctgccagcagaaccctctcccccttcctctattcaggccatagtggcagtcacacactcactctctgcagtgctgggggcagcctctctgggggggctgcagtcaggcagcctgcagtgcccactccaggcctggaggtgaagccactgcatggctctgccggcccagtcctcgctctgtgagccctgtcgtggccctgctgcctcagtcccccatctcacatgcctcagtcccagcgcctgggggccctgaggattggagaaaggcctgtctgggcagcacaggagtgtgtgggacccctctcggatccctcctgtcttgggggcggtgggcatcggcagctgctgggtgaccgccagcccccttcagacgtttctctcgggcttgccaggctccaagcggggtcctttcatacaggcagcctcatttaatcaccctagtcggggcttaggattgtctccattttacagaggaggaaacccaggctggaggagtcagtgaccgtccttgttggtggtgcctgtcctctttggtccatcccccaccccagcagcacccagggctggcacagggcccatcagagactgtggggaggggagggtgttgggggctaaggctgaggcctggttgaagctcaaggacgggctggccaggggccaggtggttgtggcccaggtttccaccagcatcttccaaacaaatggactggcagatgggctggggcactggacccacgcatctggccttcagaattgtttaacttttttttttttttgacacagtttcactcggtcgctgaggctggagtgtagtggcgcgatctcggctcactacaacttctgcctcccaggttcaagcgactctcctgcctcagcctcctgagtagctgagattacgggcacctgccaccacacttggctaatttttgtatttttagtagagacgggatgtcatcatgttggccaggctagtctcgaactcctgacctaaagtgatccccacccgccttggcctcccaaagtgctgggattgtaggcatgagccactgtgcccagcccagaattgtttaatttggaggaagggtctgtgctgcccgcaccacgccctgttcacccctcccacaggtgctgacactgggcccactgcttgctggctggtgggttggcctccgccccacctggcccccgcccccagggtcactatcaggtattggccctgtagggttctcagcctgtgcctccagagggcagaggcagattcttttcttttttggagacagagtctcattctgtcacccaggctagattgcagtggcatgatctcagctcactgcaacctctgcatcccaggttaaagcaattctctgcctcagcctcccaagtagttgggattacaggtgcctgccacccctcctggctaatttttgtatttttagtagagacggggtttcatcatcttggccaggctggtcttgaactcctgacctcgtgatccacctgccttggcctcccaaagtgctgggattacaggcgtgagccactgtgcccggccgggcagaggcagattcttctttttacttggcctggtggagcgtttggggagggcctggccagaagaacagagacaggagagccagagggcagggggagtggctagcgcccactctctccagattacataatggggctctgcagcctggcctgtgcagaaacactcacccacagcatggctgcctgggtgcttctcatgagagccgggtagctagaactgggcatggcggccccgcatgcacgcagctggctctccccggctgccctgggggtccagacaggcctcctcagacaccgggagaggaagggaggaatgtggttacctgcacctggggccctggggtccacaagaggccacagtgggccttgcctggggacggggaggaacggggctcttgttgggtacagggactccccaccaagtctatccctttggggtgagcactcaccctgcgccaggctccctgctaagccctgtgcgtgcagggtcttgtggagatgacaccctggggggctctctccttaacccattttacagatgtggaatcgggaagtgtcacggccgaggctgcccagcttgggaggcagaagcctaaccctgaaccaagccctcccctgccgggggctgccctcagaaaacccctgcagtgggaaggggtcatccagggtggttgaggggagaaaggatgttcaggggcccgtggagcccccagcctgtgagcttaggcaggaaaagtgccccagagcctacgtctcccgagtggccgtggcttcctggcgtgggggtcgatggccgggtcctgccacctgtttctcttcctcttttggccccttactcagcgagaccttgcgggggtggaccctgcttgggtcctccctcacttggcacttccgctctcaaggaaacagctgtagtttgcagaggactcgccccctccccatgtccaaggccattgccaggaacgggatgaagcgggcccttgtctttagcccctgtccctctgcctgtcctggttccagccccaggccaggggatgctcactggagcacagaaggaaccagaggtgggacgagaggcaaatcttagggtctccgggcccagggccacagctcccagccccaggggcagcccgcgtgagggcacaaaccaattgtctctgctcccctgggatcttcctgtccagaggccgtgaggcttccaggggactgagtcccccgagataggtctggggctgtgggagagcagccctccagctgagggcccgcctgcctctctcgggcctctagctccctgtctgtacccagcagtgacttcgagaggcgctacaggtgggtgaggagggccaggcctagagcggggtgggcagtgcggccagcagtgtgtgtaccgctctggggctcagccctggctctccctcttcctagctctgtgtggccctgggcaagttgcctgtcatggcctcagcttctccatctctgtggtggggacagtagcacctgctattggggatgaagtgtggattggagatgatgtgtgaatagtgcttgctcagtatggcattgggccatggtaagtggagagcctgcctgaggctgggcacacaacagaatgcaagacagacagctgtccctgaaggcaccaagagcaacccccgtgtttgtcagcggcatcgctcgtcagtcttgtttcctggttttccccagacccgaggaaaaggcccaggtgtgtctacctgccttggacagctgctgcctcagagagaggggctggcgctgcaccctcgagcactgtgggggtccgcttcactggcctgggggggcctcccctgacccactggggctgcctctgccttcctgcatcgggaggctgggtgggggaccctctagccttgtatggaaggagcgtgggagacagaggaggacagccgggcagcaggaacagcacaagcgaaggtgggaggtgggaggcaggaggcacatttggaggcagagggaacacagaagatgatgctccgtgtggtcaggatggagggtggagcccggcctcctcctcttggcatccagggctgcagcccctcaggagggttcagcctccgagcccgaaatggatgcctgggagtggggccccaggtgaccgctgcagcaggggcgtccccttgtgctcagcccacagttgagggtaggaaggagtctctgctgcacccaggcggggatgttctggggttggctgtcctaaaataataaccaggtgtggctcccaccaagcccagacaaagaggggccgaggctgggtaaaggctctaggacccaccccactggccctggcctctgctatggtgggtctgagacagagatggctggccaggccatggatggtcctattccctaagcctcagtctgacacccccaggcaggccacttgccacatgaacacgagccagggacacccccagctcctgtgggctcaggcccaggtcgtgtgggtgccagtgatgaaggccaagggcctgcgtttgtcctccctggccccgtgccggcgcgggaggggccggccaggcaggcatatggttcgaattattcaagccacctcttggcaccttagccctcagctgggggcgtgcaggctgcctggatggccactccagcaccccctgccacagccctggggtgacccctccatccccccgccccccggaaacagagccttctgctgccagctccctctgcctgggccttgggtctctgttgccaggcatctggtctgttaggagagccagctctgccctggctctgctccttcagacctggcaggctgggggggcacaggtggggtaagacagaggaggctcagcaaagcctggctggggagcccagtgcaagctgcccttggccccgttcaagtctggatttctgaagggctgccccatggccctctgatcacccccaccttctcccccagctgcttgttcaggtccccaagttggctttgaagctagacagtcttggggtcaaatacaagttctattccttgtaagctgagcctcagcttcctcatctgtgccatgaaggaagtgcccacacacgcagggaaagccacaatgaccctgctggggcacaggtcacgtggataccgtggcagaggtctctccacaggagggctgccataggctttgagttgctattttctagcttgaacattttgcagtttggacaacactctggaatcaactgaccagtggcttttcatttccccgcctgtccgctcgctttttcttcttctcatggttctttctgtgaagggtctgcacccccagccctctgacttcctccagctccacccgccgctcgggagcaatgaggctcccctgaggatgccagaggttcggctgcctagggctctatgcctgcgctgccattggtgtaggcgacatgatctgaaggaggaggcagcctggtgaagtgtggccagccccgaaagggagcccagagagcagagcccagacctcacaggcaggctgagggtgaggcctggcccacagctcctgccctgctggggggcctctgggggcctcggctcagtggaggtgagggacatgccttgagcttcctggggagggtccaggcaggagctggaatcatctctaggggcagcccacggcgtccccacaggtgcttctgttcctcactgagaaatcctgcagggttccactggggctgggagcggggtcacaggtcaggggtggggagccggaattgctcctcgggcagcacatttttcttctctggaaacctatcttagcaaagagaccacgaaacaatcgcactcttttccgggcctctgtcgtccccagacggccagcccgtctcctcggtgggggctccgagggggccgggaaggcgaaatttgtaaaatgtctgtaggaggggaagaaaggcgctttgtgtggggccggggccctggccattggtcagctctgaggcccccagccgctcccagaatgctccccttccagaggagggagcgcctgccagccgaggccagccccagtggtccctgaaaccccctgcgcccctgcactccctgcgtcccgtccccaggccacccagcctccgagggcgcgggccaggcggggcggcctcccctggcctcagcatgtttctctactggaggaagcggggcacctacgagctggaggccctgcccggcgacctggccgagctggagctggggacggtggagcgtttctcgtggagctccaccctggacatcatcgaggacctcgggggtaggtgcgaacccacctcccgggaggactttcagcaggctctggcaccgggcctgcccagccagggcctgtagcccattcacacacacatgctgctgacagtcacttgctccacggtggtgtgggggccagagccactcctgagagctgccgctggtgcaggagaggacccggaaatgaggaccctgggggccagagggcaggcaagcagctgaggaggctgtccttcctccagggctggcctggctgggcagcgtgggccctgcactgggcttcaggcctggcctctgcctctgctctcaccccgcccgcaagatcaggccatggtgttttctcagggctgggtggtgtaatgagatgttctggaacattcacgttccaggtcccaggacgtgggtcatttctccttttgtccccattttacagatgaggaaacagaggtacagggagtttaagcccctgaagaggcaggatgagctctcggggacgctgagccccgtggcttgtgtttagaggggtgggacgttggactgctcctgggggtgagaggttggggagctgtgaatgggaataatgatgccttgggggtcactgggaggctgagagcactaatggggatgacacacagggagcttcaaacagcggtggcagaggcagggcgcacctgtgctggctgtcggatgcccattctgtccgctcagctcagctggtcggcaccgtaggctggtcggcatcgtgggctggtcggtactgtaggctggtcggcacagtgggctgaccggcactgtgggctggggacctagctctgtcagggagctttggtgcagtgacagaaacttgagtccggtccgcagaagctaccggagcgctgatctccagctcccagcactgtggaactgtctggggccggggcctgggcctgggttctcttctccattagcctcatcctcgggcccaggagctggcctcccccaggccacaagcccagggagcaggagcctgtcctggatgagtctccccaggctggcgtggtccttccctgagcccatccgtgaggccagaggcagggagagtgacggttcagcctgcggtccacattgggaggcaagagggagcccgcagaccatacagcgaagggttttgaaaagggaggtgtaggctgggcacggtggctcatgcctgtaatcccagcactttgggaggccgaggcaggcggatcacgaggtcagggaatcgagaccagcctgactaacacggtgaaaccccgtctctactaaaaacacaaaaaattagctgggcgtggtggcgggcgcctgtagtcccagttactccggaggctgaggcaggagaatggcgtgaacccgggaggtgtagtttgcagtgagccaagattgtgccactgcactccagcatgggtgacagagcgagactccatctcaaaaaaaaaaaaaaagaaaaaaaaagagagaagggaagtgctgctcccaggagagaggacgatgccgggtgggcatgaaggccaggcgtccctgcctgtgaccagccccccactgtggaggagggggaatgtggctgcttgtcaggagaggcaggtacagtgtcccacaggccccagcaactccaggccccatcgggacgtgcgcagaaggcagggagggcaggacatgagaggggcggcccagctgcccagctggtggaggcagtggggatgcgggaggcagcacgggatgtgggggtggggtgaggaggagtgtggcagctgatgttgggggggcaaatctcccctccaccctcagccgggcactgtcctggagtcggagggtgggatcgggggcaggctgctctatttcttcacccggcagcttcctgcctacctgaggcaggtacggtgctacaggacccaacagagccagagacttgacccaggtcgtttagccacccagccccaagccagcagggccagccaatgggagcctgtgtcccacctctcgcccccactcagactgtgctccccttggcagggtggggcaaagtggggctgctcgccgtctgcagaggcaggccctccctgggctctcttagttgttctgtacatctcagtcatcctgctggtccctccccttgggatgccctcacggctcagatgcaggaatcacatctatgaagctgcctgtctctcctgcctctggggcaggcggctcctgcttctggggtttcacagctctggggccccttgatcacactggccacagagctaacgtagagagggcatacccagtgccaagtgctctttatttttctctttaagacagggtaggccgggcacggtggcttatgcctgtaatcccagcactttgctaggccgaggcgggtggatcacctaaggtcaggacttcaagaccaacctggccagcatggtgaaaccatgtgtctactaaaaaatacaaaaaattagccaggcatggtggcaggcacctgtaatcccagctacttgggaggctgaggcaggagaatcacttgaacccgggaggcagaggttcagtgagccgagatcataccattgcactccatcctgggtgacaagagcaaaactccatctgaaaaaaaaaaaaaaaaaagacagggttgtcttgctctgttacccaggctggagtgcagtggcgagatcacagctcactgcatctgacctgaagcagcactcctgcctcagcctcccaagcagctgggactgcaggtgcacaccaccaggccctgctggttttttaatgtttttgtagagatggagtctctctatgttgcccaggctggtcttgagcatctggactaaaatgatccttctgcctccttggcttcccaaagtgttgggattatgggtataagccaccatgtccagcctcaaagctctttaaaactaggctcctggaatatccatgcccactctctgagtcaaggccattcttggaatcccctttatcctggtgaggtgtggcgaggcctttgagatcccaagtggtggcacccagatgcaccatgcacaccctcagcctgagcaccagaactgagacctgttcacccgtgtgtgcctgccccagctctccccggggccggcagagaggcgccggggggctgcacacagcggctgggtcacagcacgtgaacaggtctcatgcatgagctgaggcggtcgggtgggtgagcctgggcacacggctgtctgtgtgggctctgtcctctgtgccagccagaccctggccggggcccatgcagggtgggccgatgccagccctgcctgtgatgggggtgggactggcgcttggagtgtgactgtcgggaattgggatctcatagctatttctgcagccccgctcctgttccgcccttggtcactctcggttcctctgaggaacctctggaggaagcccacggggggcagatgggcaggcgcccgcagtagcctcagccggaggaagtggccggctggccccaggcctgtgtgcagagctgtgtggacagtttcttgggccccaggaaggaatcctgaatgtgtcctcccacctcttcttactgagctcgagcagtgtgggtgggtagggctgtgttcagctctccggtccccggggactacgccagcggtggttctgggctgtaggcagaagcagtgtcctggccaaggtccatgcccctccctgcagctgggtccctacttcactgacctgccccaaggtgccccatggcgctttgggaaggggatcagaaacacatttccttcccaggcctccagtgacgctccaaccagtgtcctgcatagggagtggcggatgtcctgggaccagcagccatttacccaggacatgcccctctggcgtttggccaggtttgggacaaatcttgcccttccccaggctgctgcggctaagaggtccagccccagcatggcctgcagcagctgcccaggcatggaccggcgcccaggagggtggggctcacgcgggaggggacattcaaggccacagctgcttcctgagaggggcagcctttgcatggccaggcctgtggttgggaggtcgtgggcagggagggcctgttttcttgagacagaagggttcatcggagtggagggttcacaggtgaggggctaccctggagaaaatgagaacgaggtggttttccatgcacttgtgtcagcctgggaccagtggggaaaggggacactcatgtcatgatggggggaccaattcacgttttccagacagctaattgtgtcaggccccatgggagcactgtagcctggcggttaggagcacaggcttggaggcttacacactcacagcctcgttactctcattacttgtgtgaccttgggcaaatctctctaccctccacgcctcagtttcctcatctgtaaaatggggacaatgatcattcctctacacagagttagatggtgaaacgacaccatctatggacagcagagttcccagcaggtggttggcaagtgagagctgtggtcattgtgtgtcgttcctgaagccgtctgatggggaagacaggtcggtgttggttcaaaggttcaagacagtgggagtccagcaaggacacgttcacctggaactgggatatgtgacaatagggaggccttcctgaaggcagcagccttcaatctgggccttgaagagtgggcaggatggcagcagacagcgatgggaggatgctgggggagggcaaaggaatagcaccaagaagggctgggctggggtcagaagctcagttgtgtccggcaagtagcggagtgaggggcctgcggtggggcgacggagtggcgtggactgtgggggctggaagcatttgtgctgatccgaggcagacacagctcgggagctggagccgtccagaacatgggtccagagctgccgggctcctctggtttgtcaagagaagccagaaatatggacttttatgtgaaatctcctgacttttcaaagttggcaaccaatttaaattcttccgaaaccctgttctcagccaaacaaaacatgtctgccggccgttctgcccgcgccccgaggcccagttctggtagagatcatgttcaggacaaagcccaagtggcctcctgcgactgagacagggtcgggggagaactggcgagtaggctcctctgcctggccaagggccctggtctccctgcgacgggaggtgggggagccaggagggcagctgggctgttgcgcacgtggggaggcagtgtctggcatgcagtggcgggagctcagggttccaggtccgcctagggacgagtggagtgcagggttccaggtctgcctcaaggggggtagttcatggttccaggtctggctaggggtggggggagttcagggttccaggtttgcttagcggagggggtagttcagggttctaggtctgcttaggggaggggggagttcaagattccaggtctgcctggaggggaggttcagggttccaggtttgcttagcggaggggggagttcagggttccaggtctgcttagggtcgggctgaggtcggggagcagacaccgcttaggctggtccacataagaggggttgctacgaagaggcagggctcccaagggaagcccggggcaggcagaggaggccgcccccctgccaccccgagagctgcccactctcacaaagctgccttctcctgccctgtctgctctggggtgatttccactgaggggctgctcccctttttcctgctccccaacaatcttggggcatcgtacctatttggactgactctcagtggactcaagtctccagggcccagtagtagtcctgcctgtgggctcctatcaggaaggggatcggaatcatgtttccttcccaggcctgtctcaattcatagtctcaggagagcaaatctgactggctgagccaggctatgtagatggctcaacaactataatctcagcactttaggaggccaaggcaggaggatcccttgaagccaggagttcgagaccagcctgggaaacatagtgagacctccgttgctataaaaaaattaaaaagttagccaggtatggtggtgtgcaccggtggtcccagctactcggtaggctgacgtgggaagatcacttgtgcccaggaggtcgaggctgcagtgagccctgatcacaacactgcactccagcctgggtaacagagcaagaccctgtctcaaaaaataaattttaaattaaattaaattaagaaaaacccagctatgtccagggtacgctatcacctgatacagtatgtcccccttaccaggcccaccctttcctcgaaggctgtagatggggataggtcacctgcaggagagctcatgacaggcctatggtggggactgcttgtcctgacctcacccccaagccccacaggccccactctgggccctgagagctaccagggtcctgatggatttttcttcgtgtctgcagtctccaggagagaggagctcgcctacgcaatgcaggaagttgcagctttagagcagagcccagagggagctacctcccaggggagccaggaccaggggatcaggagtgtagggtctagaaggcagggtgagcacctggagcctgctgagaccaggggtcagaggccggagagttcaggcaggtagaccccagtgccaggaagtaccaggcaaaggacaaggaattccagaacccaagtggcatagaggccacaggatagtcaggcccgatggtggctgtgacctgagcagtcatggggggatctagggagctggtgaggcagacccagtggcagaagacatggcccggagccttcagaatacggggctacaatccagaggccctggggcaaagggtgtgagaatccaaccccaggctcagagttttgagaacgcaggggcctggaaactttctgggcggacagcagatgttgtcctgctcagctggagaagtcccaggctggacgcatgggaaactcccacaaagctggctgagggctccaggtccccgtggaaacacagatggcagaggagggcctgctggagtcatggcagacaaaagccccgaaccccactccaccctcaagtcagcttcctcccagcaggcagggacctcgccacagtcctcacagggccgtctcttgcctcggctgcctccacctccagcctagaggcaggacaggcatcgctggccccttggatggctgagagcagagactcggagagggaaatgagcacagtgtgggggtgaggctgggctgggcctgaggatcctgagagttcccgtaggctgtgcactgaggaggcccagggccccgggcagctgcttccctctcagcctggaggcccccggggtgcctgtggcagcccctcctcgagagccccctccccagggtcatgcagatgtgctgccccccaaagggctaccctgcccaccaggccccctgtgagctccccaagtcttgtcagggtcaccagtgagtccccagcacccagcttagagcttggctcatggggatcctcagaggatctttagtgtgtttgctgaatgaatccagagagctcaggagacccgggatccgtgctactttgctgtgccaggagtccttggggcaggcaccagtttctggtcacctgtgagtcccagggccggacccagcccatgtaaggagtccatgcagggaggctccagctgagaggccttccagtgaaggggtcagggaagtccacccttagcctttgggagagggacccggccctgctggaagctgcatcttctatacctaggtcttgtcggcgcaatgcctcctggtgccagtgtgcagggtgggctgggggtccagaggcaggctcaggagcactgagcccccgcagactcttggccacctctgcgaggctgtttctgtagggcaaagggtttgctatctcctgatgccatttacataaactacaggaccgggcagacgaatcgatgtgttggaagtcagggcggcggtgcccttggggggaccggttggcacgagggaggtggcgggggctggggactgggtggggacgctctgcagctcggtctgggcacaggttattttgtgaaagtttcctgaaaatgtgttgagctgtgctcacaggacaggtgcacttctctgtccgcgtttgcacttcaataaagtttaaaactgaaccagcagaggacatgcagcaagagccgtggcaggcgagtctctcccggtgacagccctcaccctgcgcggggcagcctccgtgttgccatggaaactgacctcggagacagcgattccgggctggggtgggggctctgcgtggctcccggcctgcattcctgcggacaggcaccctccgcgtggatggcaccctccaggacagagccgtgcgcgcttcctgagccgccccggtgcccgccctccgggaggtggaggcagcctccggaccgcagcgcgcaggggccggggagccggggagggaggggtgacaccgtcggcgccgaggcccggccgcgctcctgtccccccgccccccgcccccgaggcggggccgccgcggctcctccccgcccacctgccccgcccgcctcccgtgcgagggtccggcggcggcggctctgcggcctcccagtccccggcgtccccggcgcccccgcccgccgcccgccccccgcgcggcacggggcctgctccatgggtgagtgcaggcggggacccggcggacgcggggcggggtcctggggggccgggccggctcctaacctcctccggggagggcccgctccaggcaagggggtgggcgccgaccgggcttcgggccgctcgtacccaaactcggcccccaagtcggggcctgcctcggcagcaccccgcttctcctccctccccccgcctctcgctggttgcgccgctctgcccccaccgcggtgcactccagcccccaggaagagaggcagcttggagggggccaaattcagggtcaaagatgagtcttggggaacgggggtcgccccagaccttcgggggctcctctgtctctaaagggagcgatgcagggcgtaaggttctcagggatctgggatcttggagccccttccccccagcagccctgccgggaccccctgggaagtctggggccccaaaaggtcactgagcgctcccccacttgtcccccagactagagggacagagggagagagcagcgtatttccaaagatgttttctccccgtggaatctggataatttccctgaggactgcaggagaaaagggctctgcaaacggattcccgtgcagataagttggcatttaaaagagaaagggacgctgacctcttttgaagggaggactgaggagatcaccccacccctcctccggttgggaggccagtggggcccaggggagcctgggtgccccgctgactgatgccctctgctcctcccctgcagacgaccagagccccgctgaaaagaagggactgcgctgtcagaaccccgcctgcatggacaaggggcgggcggccaaggtagggaggctggagagcctggggaccctcgggggcagaggggccagggctctaactgccctttctatcccagcaccagctatccacagagccctggcacgggcgcggctggctgggctgggttcaagtgtaggtggggccacagtgtgtctggtttaggaggcagagggcctgcccccagctcaggaacagtggagtcgggggacttctacaagaacaggggggtggagtaccccaaagccctttgctgcactgtggtcctagcagccattctgaggtgacaggagctgtagccttatgtcacggatgaggaaactgaggcttagccaggggaagtggtctcccacggtgctggtccagtgcccagatggcacccttcctgttgaactcagccactcttcaggcctgggcatgggtctgagatgctttgggacttggcgagtgtgaccatggccctggggatgacaaaaggaggaaggggccagttgatcctggagtgccagggcttgggagctgggagtggggcgaagtataaatcagggataaagggggcaggaaggaggataatagtactggctgggcgcttctgcctgtgatgtgctgggcttagtgccacccgctttctgtgccatatgcactgattgcggcagctctgcagggaaggcatcgtcaccccgttttccagatgaagacaccaaggttcagagaggtccagtgacttggccaaggcccacagctcatgagagatggagccggggtttggagccaggttttgcccctcccagcatgcatttacatgacaatagtgacaactgcgcaacttagcatctggcgcaggcaccaggactcactgactcctcctccggccttctgagatggtcctgtccttattctcatttacagatggggaaactgaggctcactcagggacagactgctaggaagtgggagagctgggatttgaacccagtacccaggtctgtgtcataccagggcccgtgttgtcttccatcatgtgtctcagcactgccagctgcaggaaatgtaaaatgccaccccccaccccccgctcccctcccgcacctccacccagacacacacacactcgttctgcacaggagggccgtggtgagggaacagggagaactgctatggggcggggcggggagggggcggcctccagttgccgtggtcaccaggcaggggggcggtgtgatgtcagatacaatctgctggcacggatggtgcctggcattgggctctggtgttggctggttgcctctttcccagatgggggctcctggcaacaaattggcctcagctccccccaatatacatcctgccagaggcctgcggagccccgaggcttttgcctgacctgaaggggcggctggggcaataaggcacactgtcccagcccctcctctgggcagctgctctcagggggggtcctcaagctgctcaggcaggggcaggggtgggatggcccagccttcatagaggtgaggcctgggagaagagagctggtctcagagtgggtatggtccctctgcagcctccagacctcacctccagccctggcctgcctggaacttggcacagctgacattggcatcagctgatgagggtcacccagcgtgcacggggagagtctgggccctgtcactactgggacgccctttgggacaaatggcacagactcactgtaggggcagaaatgcctgaattatcagaggcatagagagccagtcagggagggcatcctggaggagggggcctttaatggatgtgaaaacatggatagacagaacagaggcaagggcagtccaggaagggagaggcagtggtggagaggaggtgcggggcactcagatttggtaagagaaacaaagaataacattgtcgatgatgataataataaccactactggctgggtgtggttgctcatacctgcgatcccagcactgtgagaggctgaggcaggaggactgctttagcccaggagtttgaggccaacctgggcaatatagggagacctctctctactaaaattaaaaaaaaggcctggcgtggtggctcacacctgtaaccccagcactttgggaggccaaggcgggcagattgcctgagctcaggagttcgagaccagcctggccaacatggcgaaaccccatctctactataaatataaaaattagctgggcatggtggtgggtgcctgtaattccagctactcgggaggctgaggcaggagaattgcctgaacctgggaggcagaggttgcagtgaactgagatcatgccattgcactccagcctgggcaacaagagcaagactccgtctaaaaaaaaaaaaaaaaaaaaaaaaaaaaaattagccaggtgtggtggtgggtacctgtaattccagctactggggagggtgaggtgggaggatcatttgagcctgggacattgaggctgcagtgagccgtgattgtgccactgcactgcagcctgggcaacagagcaagaccctgtctcaaaaataacaggccaggcgcaggggctcatgcctgtaatcccagcactttgggaggccaaggtgggcagatcacttgaggtcaggagttcgagactagtctgggcaacatggtgaaaccccatctctaccaaaaatataaaaaataattagccggacatggtggcacacacctgtaatcccagctacttaggaggctgaggcagaagaatcgcttggaccctggagaaggaggttgcagtgagctgagatcacgcaattgcactccagcctgggcaacagagcgagactctgtctcaaaaaacacccaataataataataataacaattattgctgaccgaacatgtttacatgccaggcggggcgttaggccctcctgcttgtctcagtgaagcttcttgagaccctcaggagaacagcgttattcttatgaccacatgacttgtaaggaaacggaggcccagagaggtagaggaacttgcccacatcacacagcatgatcgtcagagcctggcctgcgtgaggcttgtctgatcaagagccctattcttactctccaggatgtgactagcgttttgaaggagatgacttcatttattcatttaccagaccagctctgagcatctgtcggtgccaggcccagttctaggcccaggagatctccagagaacaaaggggatgccctcctggaggtgacattctagctgtgctgggaggaaggaagggaagtgaccctggctggccaaacttccccccaggctgccctggcaaaggaccaatttcaggcagggctggacccttcggcttctgggcccacccttgatgttttatttgaggctctcctgggtgctggagcttctgagatgaatttgccatctgtcccctacctcctgcccctggagttcccactgggaggagggctaaccaggatgggcttcctggaggcaactggagtcctgaggattaaagaggtactgagatggaggacagctgagtgagcagggggggacattgggggctataaggggcaagcgaggccagggggcacagggagaaggggacgggaggagggggaggcaggctgcactaggagcacctgcatgtccagatgaggggtctggactgtgtgtcatggagaccccaggagagaaatggcccctccccaggatgaagatatgtagagcagtccacacctctgagctccaggatcaaacctacttttttccagctgtgcgaccctggggaagtcactacacttctctgaaccccaggttcctcatctggaaaataacccggcagcgaggattaaaagaggcccatatataacatgcttagcatagagcctagcacagcgtaggtgtgcaaggtgtcctgggagtgggggtaacaaagtcacctctagactttgggtgtgccctccgtacctgccctgggatctgagacctccccaggctccatcccagcttcttgcacacaggtggagctgtgagtttggggagatggagaaaggccgggagatcaaggcagactaatgatattgtgggttccccctgccctcctgtgaggtggccacgggacagtgtgtggactccccagctccttgctgggctccactgggcactgttcgaggtctagtcagggcgtcccaggtcacaagggggcatggaggaggacacttgtggccctgggccacaggggacattgggcaccacatgtgagggtgtttatcatggaggaggtagtgattccagcagccgccattgatccagcacgtactgtatgccaggccctgccttagcgcctggcacagaaacctcatctggccgcctcccccgctgcggtggggcctaccccatctccgtttcctagagagggccctgcagagtggcgaggtaaaatgacttgccaagcaaggcaagatcaggactcaaaccaggcctctctgtcagagcctcccatttcctcagaactctcaggaggaaagggaggtgaatttttctgcacagctcccaaaggccttgacagggaggtggggttcagcacactacaggaaagagtttccagcagctggagctatccccgaagtggaggtagtgagcaccccatcactagacatatgcaagaagagacagaaagggaagcgtagaggggattgcagtgtggagtggaggttggatgggaggacttcagagttcccttgcagcttaacaatggcctgtgaggtggcagggatgagtcagggtatgcgtgtgtggagggaggggtggtgagatgaagaccagggagaggaaagggtggacctgaggcccccatggagaagggacgggcaggatgtgagtaatgggagaggcaatcacctattctcctgggcaatgctttgggggtgagcagcggcagaccaggatgccccagggaatggccaggtttgggccatctctggaagtgactggtccccggagagaggtggtggggctatctgcagctgaagaaacgggcagggccagagaaacaatgcaaggggactcctgggttttggctaagtagttttgggggagcaggtgaagacgtggggatccctggcccagccaggagctgccctagtataggcccagccccaagggttgtgtggggcagtctggaggttttggcctgggaaggggtcgggggaaggctgtataaaaagcttgaaagtgcggaacaggttggtggacctgaactccacctcctcgagtgggccccctgtatccacacccttcccagtcctgagcccagagttattctaaactcccgctgctgggagaggggaactgggaaccactaaatggcagaacagcacccttttccggccatatcacctgggccagaaaaaaaaaaaagagggggcccagagaaaagcgggctgtttctggggcaccgcggaggccgcagatcagaatccagctttttacaatagagcggaagcgaacctggctcagggcgattccggggcgggctaggcctgcgggtctctctgcctggtcccccggggcttttctgtcgcgcggaggcttcctgtcgcgggccctggtcccccctagcccccttccgggatgggcgagctcccgtcttcaagcccaagttaatgaccagggactttgaactttttggagatctgcaaagggctggcccctcggggacagtgacgccccccaccccctcccctgagcccggatcctggattaccccaagccaccgcccggcctccagccacctccctggctccggcgcggggcccttcctgggacccctcctctccccggtcccagccgggcggcgccgttggtacatcccggccggtccaggtggtagcgcccgcgcggctaccgtaattcccctacgtcccgcgccccagtttgcgctgagtcgactgagcccgtcccgcggctcccgtccccctctccccgcgcgccccatgaggctttggcagtctcggcccgagccttagagccttagacaccggggaggagaccctggtcctgttcctaggtgagtcgcggggaagtgggagctgcgctccggacggggggtgggactaggcgccaggacccccctaaaccgatggacagaacccggattcgagattcccacgtagtgccaggcctgtgggtgggtacagggtcctcaccagctgtatctccatttacgtgagggtggaatgggttcaagctcccgcccccatcacagtgtctctagggtgggtcggctcggagatagggccgtgaggagtctatgggaccctggccccggtatggggggtattggcggggcagggggatcctggaggggcccgggcgcgcggcgtggctgggaggctcagccgatcctccccatctggccagtcccggagtcggtcccaggcggaaaagccctctcgaggccggcagggggcgccagaggctgcgcctcgggcagtctgagcagacccaggcacccacttaggggtgggggatgcgggagacccgtgaatccggggaggccctggcctgccttggtggaagtctgggaaatggaggccaagaggtcccctgcagattccttagtaactcctcaagttgagggagctcgggggtattttaccattctcctgccctttagccggggtccgggcacacactaggacctggcagccatccccagatactgaattctatgccctcttggcacaggtgggcaaattgaggcccagtaggggaagggtgggggaacgtaggctccagaccaggtcttctgaagcccaggcaggtgccctctttcccccgctccctaccaaggaggcttctaagttgcaccggggaagggcttgctagtccaggtgctccgaagacacacgctggggtctggggctgggaactgcagaggctgggcaggaggggatgttcacagactgcagcccctccctctttctctagcactgggtcccagccttgggcatactagccaggaccgctccctggggaggaaggggccttcctggcttccagggcccgtgcggtgggcttagcctggggagaggttttctgtgtccctgccatctgcccggcacagggcagggccttaggtcaggctctgactccaggtgagcctcagaacccaaggggtgatgggtgaggcctgggcctaggggaaaggagggtgggtaggccgggtggagcgtagagagccgcctggcaaagccaccccgccctggctggcctgcccatgcatgcagtctccacccctggatttctaaggtgttgggtggggccttgggactagcaggctcccaggggagcttagccttggtgggaattcctggcaaggacatccctccagccagagagctcggactcctggttccaggcccgtctgctgtcggcagagcctggagctggccccagacctgcgtcctttcctggacagggaagtccctctcccacccagaccaggctggggccccagctcgttgtggggcagggatgcctgggggatccctggtttcccatctgcttttctggggctgggggaggtgatactgagggagaacagccgggtgcgggggtcctgccttggagactccattattcatcagcctccgcatctggtttctgggtatcagtttcaacaagccggccctgactcacaagcctggagctggggctgggctggggaggggctccctccccagggagttgggggccaggacttcttgggcctgcccctgagctgtttcagctccctgctgtggagaggaggtgggaatgcaggagcctgcccaggcccaccccactgccctggtacaggggctgggggctcctttctgctctgcactcttgcccctaaggaacagtcccccacccttgctgagtacccaggcagcagcctcactcagggatggccagggcccaggcactcaggtgacctctggtgatccgccctgacccagccctggtggtctccacttgatgcaacctggttaccccacaccggtgggctccccacaagctggctttgggatctgccgtgtcttcaggaaggcaatctccagggccctgttgcccaaaccaacattcagctgtcttcaggccccacgcctgccctgtgcctgaggcacccatttccctacgtagcagcagctggtgactttggggcaagtcagttgacacaggccttagtttctctatctgttaaatggggattgtaacagtatctcctcctaagagtctttgagaagagcgaatgggattcactgcctggaactcccacgatggggtggcacatggaatgctcagtgaaatgcagttatctgcctacaggacagtatgggggtggaggtctggggcaagaccacccgatttgaagtaggaactcacctgcccagggccagcaggcccaaggtcatggatactaggaggaggaagagaccttcggtctggcagtggggaaggctctgttgactgtcggccacaggaagggatatcctggccgagccctttcctgtccccatgtccttctgtggcatgaaggcccttctgccttcatctgttcactgatctcatccccaccaagcgcacctactgtgcaccaggactgttctaagtgccgaggacacagtgagatgcagacggccaaggcgctggcttctggagaggacagtctggtagggaagaatgatgataaaaaagtgaacaaagaaatgaattacaggtagtaataaacactaagaaggaaataatttaacttaaaggaattgagagtgggagggtaagggtggtttattttaagatgagggaaaaggacgtcttagaggtaacatttaagttggggcccggtgtcagctgtttcaagatagggtgcgtggaattccagacagaaaatacagaggagaaggccctgagcttggcgagctgtagggagagaaggaagaccggcaggtggaccctgtgcggaccagctgggagggaggcgggagcccggccatggtgggatttcactataagcaagatgggaagttttagttttcaaaactctgcctgttggccgggtgtggtggctcatgcctgtaatctcagcactttgggaggccaaggtgggggtggatcacttgagatcaggagttagtgaccagcctggtcaacatggcgaaaccccatctctactaaaatacaaaaagtagctgggtgtagtggcgggcgcctgtaatcccagctactggggaggctgaggcagaagaatcacttgaacctgggaggtggaggtcgtagtgagctgggatcatgccactgcactccaacgtgagtgacagagcaagattccgtctcaaaaacaaacaaacaaaaaacaaaaacacaactctgcctgtggtgtagacagtgggtgacctgggctttgggagtggagacagccctggaagtctcccagcctctaataaaacgctgctgccctcccaaagccatctcacggaccctggcccccttcccaccctctttccccatggaaccaggtggaggaggagcaattaggggtgggtgggctgatgacagacagcatggccacctcacccccatgggttctgaggagtgtcccaaggaggccatcccagaatcccagagccacagtctgagtttcagtcttgcctgtagacttttgtctctttatgtcactttatcccccacgccgtgaatggggctaatggtgcctgccctgccttcctgggaatcagtgtaaaagcgctttgacagccgtgtagtggtgactccagcaccagagtctgggcgtttgcgtcctctcaggctttgctgagtgccccctggcggtggggacctggcctagaactgcagggacctgggctgctgtgccatgtgggtcgccagggtttcctgatgcctccacctcacccagctcctgggggctgccaaggatagcctctcagagcagcccgccttctgcccacggccctttccagaggccaccggcctttggctctcggcctctgccgtacctgggcagtgagcagtcggtgtgagggggtgtccctggggctcaggctctcgggcaggggtctccaggttgatgggaggggctgagatgagagctggttgtgaggttggggtgggtgtgtgactggggctcaaagctggtgttggagcagagaggggtgtccctggggctagatggagagccggaccaaggaccctgaggggagtgtgccccatcctggcctcccccttctggtgcctgtattctaagagctcccttgctgggagtaagaaggggtcccctgggctgaggctccgaggcgggggtgggggtctccaggaggaagggaggagggaaggtacccttctggctgggagggaccgtgcgtgttggcgctgagggtgaggtggggaccacagcagagtgggcacccccagggctgggcggggatcgagtcacccaggggaggggctccacagtctccaaggtgggggggggtgtcaccagcgccccctgcctccagcattcaaggagctccccaggagaaagagcaagttctgaggagccctctgagcccggcattggtgttgaggagggagtcagagaagagaggggcccggggccgcgcagaggcgcagaggtgggggtaccccgggccaggcagaggtgggaaggtgggggtcccggggactgggcggaggcggggctgtgggggtcccccggccgggcagaggtaggggtgtggagtccccgggtctgggcagaggcggggaggcggggggtcgcccgggcaggcggaggcgggggtgtaggggttcccgggcggggaggcggggatccccggggctgggtggcgagggcccgggcgggagggaggtgtccgccttcctggggggctgggggctgttccgggcccggccctccccggggtccccgcgctcggcgggggcgggcgcggccgcacaatggcaggaagcggggctccgcgctttgtccggcgggcggcgcagaccgcggcttcctccggccgccatggggacaggacccggtgtctccggacgcctagcagcctccaggccgggcccggggctgcccctccgggactcggagccctcctgggccgggggtcgtgcccgcgacggtgatagccaggtacggggccgggacggggcgggaacggggctgggtgcccagttctcgcctgcagccgcccagtcctgtgcgggaggccagggagggggtgcccgtgactatgggccccgcggcccccaggggaaggatgcggcccatggcggccgagccccctacctgggcagctgcaccctggtgacggggacctcggactccggggtgtgtccccgccggctgagatgtccccgccaattcttggcgctttgtgtctggggccagctccggacacacctgtgggtcccgggccctatgctgggccgcccctctcctttccttcctctgccctggccctgcccacagcctcctcctaccccagaggcctctgtttctccttgtgcctctggccccagcccttgtgtgagggtggacgcctggttctctgtccccatcctcacatgcgtgtattccccaaagggcccccctctgttattttggctgcctggcgttagagggggtgggagctggctgttcccatgggtgggctctctcctcccttgggttgagacctgggaacattcccccccggaccctggtgtccctcctgcaggacagaggcaggacatggtgggcaggcaggcaggtgagggaggggcagttgggtctgagagaaggggctggagtctggcttcaagaaggggccattccgccctagtgctgggggagtcctgcctctggagggagctggggagactctggggtttgggggtgggacgtgaggcagaacggggagcagaaactgcaccagggagctctgcccaccccagcttctcagttgggctcatggttctcccggggggcttccagaacttcatcgtcaaccagatctgctcgacgaagtcggaaaccacctggttcagatcctggggctgagcctcactgtgcccccagtgcccctgagcctggggactgctgagaggagggaagcagatgaggtcagccgggcctgggcaccagcccctggcagcagctggaggagtcgagcagcctcagtgatggtagtggccacccagaccatcacagcagggaaactgatctcgaggctttcaagggatccagggtggggtgcgtcatagggctcagtccgtatttgttgaatactgactcttccgtaaggagcgaatcagggtatcaaatctgctgtctgtatattggattgatttaaaaacaagatggtggcacagagtcagacttggactggaagggtcccagagaccctcccagaactcctccgacctagcacggctccttccttgtcaccccctacctgcggtgagaccagggcttgggtcatgggcaggtctgccgccccagctggcactaggaaatctcaggaggcctggaagggattggagctgggagcctctgccatgctggctgggttcacagagggccagagggctgcggagcccgcagacggggggctcccaggaagaggggacaaggtggggcagggcccttccccagatcattctcatgaggagacacctgaagcttgggctcccagaagctgcaaagcctgatgtttctctcagcagtgcgctgtggattcagggtgagggtgtgggtagagccctggctgaggacagcttagtggtctctgtagtttttaaatttttttctgagacggggtctcactgtgtcgcccaggctggagtgcagcaatgtgatcatggctcactgcagcctcaacctcctgggctccagcaatcttcccacctcagcctcccaagtagctgggactacaagagagcgccaccacacccggctaattttgtttgttttttgtagaggcaggatctcactgtgtggcccgggctggagtttttgcactttgttttacgatagattaagacagaaaccagaaagagctgcaggggttgagggatcaatcccatcaccctcacttcaagccccacaagcacagttgaagatcactcctgaagggtgtagaagtgggggcacctggtgctcaaggctgccttcaggaatctgggtcatcctgtccccagccacctgcctggggcccagctccatgcagatcagcccctccctgagcacgtgggcctgcttggagtgccacctgccgactgccagtcctgtgccctgttccctttcctgtcagatggagacacggagggacacaagaaccaacagggcttgcatcaaactgagatagatttcctcctgtccccgtaatcccggctgacctgaggccagcctctcgctcctaagacacccatgagagggcgtgaatgtgggttaaaatctgggatccagtctgggtgccgtggctcacgcctgtaatcccagcacttggtgaggccgatgtgggtggatcacctgagggcaggtgttcaagaccagcctgaccaacaaggtgaaaccccgtctctactcaaaatccaaaaattacctgggtgtggtggcgtgtgcttgtagtcccagttacttgggaggctgaaacaggagaattgtctgaacccaggaggcggaggttgcagtgagccaagatcatgccactgctctccagcctgggcaacagagcgagactctatcgcaaaaaacataaataaatacataaataaataaataataatctgggatccagagccccacacacagtggcttcaagtcctagatccactggctgtgtgaccttagacaagtcatttcacctctctgagttttactttcctcttgtgtgaaacagggacaataacagcccttatcttatgggatgagatacacatgtaatgcccccagtgtggctccagacacatgacgaccacattaaaaacacactcagattcttcccggcctcctcctccctcctgtcactttctctgctatcctcaccacgcctatctcggaaatctctcatcgggctttcaccagccagaaactcttcagcgcctctctcctgccttaattcataaatgaaacaaggatttatggagcagctgggaccggaggtcaggcgctgaatcagacagagtaacatttctgtccttgcgaatgtgaccaggtgtggaggcagcagggtggaatatgtgacctgtcaggtgctggaaagtgctgaggacaggaaaggagcgtggagggcgaatgaggaggatgagaaggtgacttggggggaagctagcaggaggggagggaaggcagggagccatgcatttcaatatctggggaaaagcatctcagtccagggactggcagatgtcacagctcagaggtgggagctgccctgagggagtgtgtcccggaacgaccaggaggccagtgggtgaggggagtgagccaggatggaagagcaggacaggaggtccctgaatggggtggccttaaccctaaaaaaaaaaaaagtcaatgtcataaaagactgaaaaccctaaccttaacccttttggcttttttttttttttaagataatgtcttccctgtagcccaggctggagtgcagtggcgcaatctcagctcactgcaacctctgcctcctgagttcaaacaattctcctgcctcagcctcctgagtagctgggactacaggcgtgtgccaccatgcccggctaagtttttgtgtttttagtagagacggggtttcaccatgttagccaggatggtcttgatctcctgaccttgtgatccgcctgcctcagcctcccaaagtgctggggattacaggcatgagccaccgcgcctggcctttttatttacttatatatttatttatttatttatttatttatttatttatttattttgagacggagttttgccccaggctggagtgcgatggcacaatctcggctcactgcaacctctgcctcccgtattcaagcgattctcctgcttcagcctcccgcgtagctgggattacaggcatgcgccaccatgcccagctaattttgtatttttagtagagacagggtttcttccatgttggtcaggctggtctcgaactcccaacctcaggtgacccgcccgcctcggcctcccaaagtgctgggattacaggcatagccactgctcctggccccttttggcttttattcagagtgagatgggaacccttggagggttttgagtagatacagtgggactcctctttgaacagggcccactctagctgcacatggacaacatattgtgggggatgggggtagcagtgaggccagttttgaggccattgttgtcatctagctaaaaggtggctgggcagtggcacgcttatgagctgtggctgggttgaggccacagatactaaaggtggagccagcgggattttcgggctgaccagatgggggcataacagagaatgtcaagagtgaccccaagctgatatggtggctcacacctgtaatcccagcactaattccagcactttgggaggctgaggcgggcggatcagttgagcccaggagttcgagaccaggctgtgcaacatggcgaaatcctatctctactaaaaattagctgggtatggtggtacatgcctgtagtcccagctacttgggacggtgaggcaggagaatcacttgaacccaggaggtagaggttgcagtgagccgagattgcggcactgcactccagattgggtgacagagtgagaccctgtctcaaaaaaaaaaaggaaatcccccaccttgcagccatcagaagaatcaaataattgatttaggttaaaatcatctatgtatgctaaagctcttaggaccgcaagctcacatcaccatgcctggctaatttttttttttttggagacaaagtctcgctctgtcactcaggctggagtgcagtggtgtgatctcggctcactgcaacctctgcccccggttcaagcaattctcctgcctcagcctcctgagtagctgggactacaggcgtacgctgccacgactggctaatttttttgtattttagtagagacggggtttcaccgtgttgcccaggctgctatcgaactcctgagctcaggcaatccacccgcctcggcctcccaaagtgctaggattacaggcatgagccaccgtgcctggcaattttttatatttttagtagagatggggttttgtcatgttggccaggctggtcttgaactcctgacctcaactgattgagtgagattactggggaacaagacatctcaaagtgccatgccacagattacttattaattataggggaaaaagggactctacaaggtacagaggtccccagaggatccagcattacaggcaaatagcaagaacacacagctctgtggtgtccccgcctgaacgctcagtttgaaactttctgaggaccaccagggagatccacattgaggagctctgtgcgaggctgctggctcgaagacttccaaaatgtcaaggtcagccaggcacagtggctcatgcctataatcccagctctttgggaggtcaaggcgggcagattgcttgagcccaggagttcaagactagcctgggcaacatagtgagatctgtcactactaaaaataaaaaagttagttgggcgtagtggcatgcacctagtattcccagctactaaggaggctaaggcaggaggattacttgagtccgggaggttgaggttgcagtgagctgatcatgccatactactccagcctgggctacagagcgagaccctgtcttgaagaaaaaaaaaaagtcaatgtaataaaagaccacaaaaaacaaggctgggcacggtggctcacgcgtgtaatcccagcactttgggaggccgaggtgggcggatcacgaggtcaggagatcgagaccatcctggctaacacggtgaaaccccatctctaccaaaaatacaaaaaattagccgggcgtggtggcgggcgcctgtagtcccagctactcaggaggctgaggcaggagaatggtgtgaaccgaggaggcggagcttgcagtgagtcgagatcgcgccactgcactccagcctgggcgacagagcgagactccgtctcaaaaaaaaaaaaaaaaaaaaaaggataaacagacataaccaaatgccacgtgtgaaacttgattagttcctatatgaggaagtatatctgtaagaacgttatttagacacttgggaaaatgtcaatatagactatatatcaaggttcagtttcccaagtgcgacaattctatggggttttgtaggaaaactgtctttgttcttaggcagcagcatgatttctgccccaggggaggggggtgccgagaagagaatgggagagaagcagatgtggtagatatcaacttggggagtccagagggcatgtggatgtcatgtgctattcttataatttttggtaggtttgaaatattttaaaacaagtctgggcgcggtggctcacgcctgtaatcccagcactttgggaggccgaggcaggcggatcacctgagaccaggagttcaataccaacctggccaacatggtgaaactccgtctctactaaaaatacaaaaattagtcgggcgtggtggattgtgcctgtaatctcagctacttgggaggctgaggcaggagaatcacttgaacccgggaggcggaggatgcagtgagctgagatcgtgccattgcactccagcctgggcaacagagcgagaccccttctcagaaaaatttaaaaaaataaaaagaaaagaaatattttaaaacaaaacttgggaaaaataaagagagtgggaggagagaactaggaagtcgtgaatactgatacctgtttacagagtttagctgtgaagggaaagaaagaaagtcagccgtagctggagggtgaggtgaggcctctgtaaaatggagaaataaggctgggcgtggcagctcatgcctgtaatgccagcattttgggagaccaaggtgggcggatcacttgaggccaggagtttgagaccagcctgggcaacatggtgaaaccccgtctctacaaaaaatacaaacactcgcctatggtggtgtgtgcttctagtccaagctactcgggaggctgaggctcgaggatcacgtgagtctgggaggtcaaggctgcagtgagccatgattgtgccactgcactccctgtctcaaagaaagaaagaaaaaaaaagatggagaagccgggcgcggtggctcacgcctgtaatcccagcactttgggaggcccaggcgggctgttcacgaggtcaggaattcgagaccagtctggccaacacagtgaaaccctgtctctactaaaaatacaaaaaaaaaattagctgggcatggtggtgtgcgcctgtaatcccagctactggggaggctgaggcaggagaattgcgtgaaaccaggaggcggaggttgcagtgagccgagatcaagccattgcactccagtctgggtgacagaatgagactctgtctcagaaaaagaaaaaaaagaaaaagatggagaaataaccacgtgttggtgtggcagtgggggaaatgatccagcagaggggaaacttgatgatgtgggagaggggggactgctggggggcgtctcctcaccctggatcgagagatggagggcagttcattctaagtccctgcagcgctgggccggggtcgagggatgtggtggatctcgtggacctcctgaaggcttctgtccccaccccaggtatgtcaccacgccgactgccagcagctgcaccgccgggggcccctcaacctctgcgaggcctgtgacagcaagttccacagcaccatgcattatgatgggcatgtccgcttcgaccttcccccacaaggtgagcacaggcgggagccgcagctcggcccccagagctcctgtgtcagtgtttcagtaactgtcggaaacgtgctagggcgtcataaggacaagtcgactgtaaataatgaaacccgagtatgttacggttccttttgttccaaatgttttttagcaagagagaaagtccatgagcgtgccccttccagaggcaggcctttctctatctggtgctgtgctctcactggttctcacctcccccagctgcttttgcccctggcctgtggcccacacagagaaggcccctttctttctagttctgcctatcctcagggcaggggacttctggacaagtcctgcaagccaggctgtgggcctagcagaggcagtgtggagtgggggtggccaggtcaggaggcacttggagcaggaaataagaaattcctcttgctgagcagggacccagctcaggcccaccatcaactgcctatggaggagtggctcgcaggcacccaggcctggtgagaaatgccaacccccgagtcctttcccagctgatcagaggaacaaaaggattcttctggttgggcacggtggctcatgtctggaatacaaaaaatacaaaaattagccaggtgtggtggcacacacttgtggtcccagctgctcggaggctgaggtggaaggatcgcttgaaccccgacaatggaggctccagtgagccctgatcgtgccactgcactccagcctgagcgacagagcaagaccctgtcttaaaaaacaataaacaaacaaaagactctctcccactgccagggccccttgggaattcaggtgtggtcacagcatgggggaggggaggcctggaagaaagagccatggactttggtcccttcctgtaataacctcagaggcaaggcttccttatccttattttatagaagggtaaactgaggccacaggtgagtttgtttttggggtggagcttcaccatgggtgtcatcccagggcctttgtgtccttttgggtctgtggggatagacagcaatgactaaggccaggcaaggtggctcacacctgtaatcccagccctttgggaggctgaggtgggtggatcacttcaggtcaggagtttgagaacagcctggccaacatgttgaaaccctgtcattactaaaaatacaaaaaaatgagccgggtgtggtggcacacgcctgcaatcccagctactcaagaggctgaagcatgagaattgcttgaacccaggaggtggaggttgcagtgagccgagatcatgccactgcactccagcctgggtgacagagtgagaccctatctcaaaacaaaaacaaaaaacaatgactgagcccctctcctcacagaactgaagggcccttgctacctttaatctgggggttccagggtaacaggctgtggtccctctggaggcagccatgctgcaggctaaggaggggcgggggaggcacaaccctctcctgctttctcccaaggctctgtgctggcccggaacgtgtccacccggtcatgcccgccgcgcaccagccccgcagtggacttggaggaggaggaggaggagagctctgtggatggcaaagggtaggtgagggatgagtgggcagagagatacctggagggccccacggctgggtctcagatcagacattcaggaccagatgctctggcgccttcctcaagtaaggctgatgggcagacctcttcccacgcctgtggctgtcctgactccgggaagaggccacccagcctgggccagcctccagggtgcttgggatcctagcccacaccagaccaggtaccgttcgatgtgactcccgtgttggccaccagagggcgcacagccctatgcgggcctggccgggttgaatccacgcgggttacctgtcacctggggtgagccaagggcggggaggccacaggcccactcgccgcccacgctggcgagggccacccacacctccagcctctgccctcctcgcttccctgcagggaccggaagagcacaggcctgaaactctccaagaagaaagcaaggaggagacacacggatgtgaggagccccccagagccggcagatgcgggttccctacagcctgcgcccttccccgagcctgggccttcctccgggatgggggtggggaggtctgcatcccagggtgcagaggtctgggagatcgctggggttccctttcttgctggggttcccatccgagaccggagggtggggagggtggggaggagggttgggaaggagggtgggaaggagggtggggaggagggttgggaaggagggtgggaaggagggtggggaggagggcgggaatgagggcggtgaggagaagctcacagcccccacccccaccatcctcccaggacccaagcaaggaatgcttcactctgaaatttgacctgaatgtggacattgagacagagatcgtcccagccatgaagaagaagtcactggggtagggcttgatggggctcagggtggaagtgggactgggagtaggggtggccccatgttgcaggctccgggtctctgcaggtgtgacgtgtgtgtctgtgtggtggcccgtgagcgagcgcatccctgcgtgggcagacccgtgctggtgtgcacgccagtgtgagggagtgcggtggggtctgtgtacttgtgcattttaatcatgtatgcaggagccaggcctgcgtgtgggcaggcgtgtgacaggtctgccgtggtatgcagatgcgcctgtgtgagcacctctgcgggcaggtgtctgtggacctgcgtgtgatcccatgcgggcttcccttttccgttgggaaggtgggggcagctggggctgtgggtggggcgggggctcgtgggggcggggcccaagctgaagcgactggccgcctggttctaacacacatgcctcctgtcctgggggcagggaggtgctgctgcctgtatttgaaaggaagggcattgcgctgggcaaagtggacatctacctggaccagtccaacacacccctgtccctcaccttcgaggcctacaggttcgggggacactaccttcgtgtcaaaggtgagaagcagcctgggccaaatggggccgctgggactggcggagcctcctggagatgggcgcccttcccaggctcaggttcccattggtcgtgggcctgagcagcctcattaccatacaggtgtctctgctggatgctgctgggggaggggagggtgctggcagggcggggctgtcgggggagggcaggcaggccttggtgtggatcctccggggagagaggaccggggaccccctcctccaccagaccagggtactgaggatctctcgtggcccccacatgcagccccagccaagcctggagatgagggcaaggtggagcagggcatgaaggactccaagtccctgagtttgccgattctgcggccagctgggaccgggccccccgccctggagcgtgtggacgcccagagccgccgggagagcctggacatcttggtgaggaggagggggtgtgtcaggggagggggtgggaaggggcccaggctgggcccacagcccctcctcagaggcagtcaccctgggtctctcactgccccatcttggggttttaattgtcccttctggaaaatggggttggctgggagagtaggggaccctctctctctggatctagccatagcccaaggtgagggcttgtatctgagactcttctagtgccaggggtcagggaacctgtgtgtgcatgtgtgtgtgagagcacttgtacctggggctacagaccacccagagctgtgttccagagtgcatctgagtgtgtaactctgtgcttcatgcttgaagctgggggactgggggatgatagtctgggcgtatctgtgtctggaccttccagtctccagatatgtctgggtcccaggagaggggacaccccagggtagagatgcagagaccctcctccatcccaggctggcctgaggccctggaaacccgccctggggtggggccatgggggctggcagggggtcccggccctgaccacccttccctgaccaggcccctggccgccgccgcaagaacatgtcggagttcctgggggaggcgagcatccccgggcaggagccccccacgccctccagctgctctctgcccagcggcagcagtggcagcaccaacactggcgacagctggaagaaccgggcggccagtcgcttcagcggctttttcagctccggccccagcaccagcgcctttggccgggtatgtggccccatctgcccagggtcaggcagctggctggccatgacccctgaccctgaccagggtatctttccaggaggtagacaagatggagcagctggagggcaagctgcacacctacagcctcttcgggctgcccaggctgccccgggggctgcgcttcgaccatgactcctgggaggaggagtacgatgaagacgaggatgaggacaatgcctgcctgaggctggaggacagctggcgggagctcattgatgggcatgaggtgagtgcgggccacagtgctgctccctccttgtcccgaaaggaggacagccctcgggaggacccagtgatcagatgttccatgggacgccccaaagaggccactgttaccattagcccactttggagacactgaggctagatgaaaatggtgtgctgcttggctgttttaatggcagaggagggcccagatcttgggtgtcttaactgtgattactcatgtggtgtcaagggtgaccctgctcctcttgggacctccatgtccccattgggaaaatgagagttgcatgcaggttgcttatcctccccggccaccctaaggtgctccaggcctcgtgaatgacccatcctgccctccctctagaagctgacccggcggcagtgccaccagcaggaggcggtgtgggagctgctgcacacggaggcctcctacatcaggaaactgcgggtgatcatcaacgtgagtaggggctgcgctggtccccgtggccaccctgcccccctctttctgacagccctcagctgagtctgagcctttgcagaaggagcaggtgcctggcaatgaggtgggggcaggaaagtcagacaagggctgcgcccagggaggaggtgcctcctagaggaacctgggagggggcttcgggcaggtttgtcaggttcagctgaattagcacaggtgaggcctcattctttcactttcgttcagtggctgtttcccaacacttgctgtgtgctgggtgcccagcaggccacgccctggacgggacagagtgagctggcagtgtagggatttcggctcagggaggggagcacctaccctgggcttggagcttcctggagggaggaagcaccctcagaggtgaaatctggaggctaagccagggcagaggtggagaagggaattccaggcatggcttcaaagccagtctcccccgagcttccctccaggagggaccagggcagtgtgacctcgggagggctatgaggactgggtctttcctcagggtctggactacccaggtgcgaaggccaaagggtacagccttcttatccgtggctgctgtggggcctcctggaacggggaaggggaaggagtggcaggggagcctgaggctgggtggggccctagggctgagacagcctcccgaccccagtcacaccatcccctgatcccacagctgttcctgtgctgcctcctgaacctgcaagagtcagggctgctgtgtgaggtgcgctgggattcgggggcggcggcgggtgaggtaccaggaaggagggcgggacctggacctggggcggggctaacctggcggaggggcgtggccaaccgcacctcccgccgcgcccaggtggaggcggagcgcctgttcagcaacatcccggagatcgcgcagctgcaccgcaggctgtgggctagcgtgatggcgccggtgctggagaaggcgcggcgcacgcgagcgctgctacagcccggggacttcctcaaaggcttcaagatggtacgggcggggccgggcgcaggcgggggcactgaggcagggctggggcgccgaaaagcctccacggcccgatccggtctgcccagcatccccaacctcccccaggcccgtaaccgcacttgaccccttgtggccaagggtgaggaattacgaggcggtcgcccgggtttgagcctccacctgaccatctacccctgatccctggccacgggtggtcactttggctgaggctcagtttcctcatcaggaaacagggatcataagcttgctgcccccttggggtggtcgcccaagtgcagtaaggaagcgcttgcgcagcgcctggcgcgggccggcccgcagggagcgcgcggtaaccggcgccgtggttgttctgccccgggccagttcggctcgctcttcaagccctacatccgctactgcatggaggaggagggctgcatggagtacatgcgcggcctgctgcgcgacaacgacctcttccgggcctacatcacggtgagggcgcgcgtgccgtgggcgggggcgcaggaggacgggaccctggacggggccgggtggggcggggcctgccctgagcccgcccccactcccccaccgcagtgggcggagaagcacccacagtgccagaggctgaagctgagcgacatgctggccaaaccccaccagcggctcaccaagtacccgctgctgctcaagtcggtgctgaggaagaccgaggagccgcgcgccaaggaggccgtcgtcgccatggtaaccctgatggccagcgggagccgtcccccctgcgcggctctctgctccgtcatgaccctggacctgaagctccctcacctgcccctagatcggctccgtggagcgcttcatccaccacgtgaacgcgtgcatgcggcagcggcaggagcggcagcggctggcggccgtggtgagccgcatcgacgcctacgaggtggtggaaagcagcagcgacgaagtggacaaggtgggcgtgtgtgtctgcgggggttgccggctgggagagaggaaggcccagctggcaggcaggggctgtgctgggcatctcactgaggatgcctagctgagatgggagtcagtctctggcctcccctacgttcacgccatccgtccccagctcctgaaggaatttctgcacctggacttgacagcgcccatccctggcgcctccccggaggagacgcggcagctgctgctggaggggagcctgaggatgaaggaggggaaggacagcaaggtgattccagggccaccccacccctgtgccctgcccttcctagggacctcctgggccccagtcactggttctcagctctgcagtcccttcggtggttactcaagaaccagtgaccttgtcatagtgaatgacagttctctgcctgccattcacaaatccagcagtagggtcctagcccttgaaggcaccagttgtgcccatttgttggtgccacatgggttcctggtgggagggcagccatattccacaagtgggccaggaaccccagagccttgctactgtgccatggccccttcaggcatggggcaggctgagagcttgcacacggtgacttcaaagtcaccagtcttctttttaatgtaaacttgtattgagataagtcatcaacgtacatctcagtgaaagagaatcatcttcctcttcattttaattttacttgaaggttcatggtgggaggagtgtttgacaaaaaccgagtgctcccaggggaggctggtgccacagtccctggccctgaccctgctggcctctctggccaccccccctcctgccactgcagatggatgtgtactgcttcctcttcacggatctgctgttggtgaccaaagcagtgaagaaggcagagaggaccagggtcatcaggccacccctgctcgtggacaagattgtgtgccgggagctacgggaccctggtaaggagccctggtcccctgttcctggtcaggggctgtgatgggtgggggccatcgtctctgctgacactgacttgggccttccctaaccagggtccttcctccttatctacctgaatgagtttcacagtgctgtaggggcctacacgttccaggccagtggccaggccttgtgccgtggctgggtggacaccatttacaatgcccaggtgagtgcagagtagtgagtgggtgggcaaggcagattagggagatgctggtcacaacccattctgtcccatgtaccccaaccttgcctgcagaaccagctgcaacagctgcgtgcacaggagcccccaggcagtcagcagcccctgcagagcctggaagaggaggaggatgagcaggaggaggaagaggaggaggaggaggaggaggaggaaggcgaggacagtggcacttcagctgccagctcccctaccatcatgcggaaaagcagcggcagccccgactctcagcactggtacgtctgctcatgaccacccagcaggtcaaaccaggacaagtactctagcccaggactcctgaaggcccagccacgctcccttcctcccaatggcctcttgtcatgaacactgtgggagcggggctctgtctcccccagagtccgggtggggagggcagacacctttccatgtgctgccagccctgatccattcgtggtagctgcctggggtgctgtgctgaggatccttagggcagatccagccttggcagggaagagtgctgggctcgctactgaggtctgttgtgggcactggagctggaagatctgccacacctgccacatgctgccatctctgagcctccagccccaggagggcagagggtataaaccaccgtgcattgcccagcctggggctgcctcaggccatctaggtttcatggcctgggctgactctgctcctggccccacagtgcctcagatggctccacggagaccctggccatggttgtggtagagcctggggacacgctgtcctcccccgagttcgacagcggtcctttcagctcccagtctgatgagacctctctcagcaccactgcctcatctgccacgcccaccagtgagctgctgcccctgggtccggtggacggccgctcctgctccatggactctgcctacggcaccctctccccaacctccttacaagactttgtggccccaggcccaatggcagagctagtgcctcgggccccagagtccccacgagttccttcccctccaccctcgccccgtctccgccgccgcacccctgtccagctgttgagctgcccgccccacctgctcaagtctaagtccgaggccagcctcctccagctgctggcaggggctggcacccatgggacaccctctgcccccagccgcagcctgtcagagctctgcctggctgttccagccccaggtattaggactcagggctcccctcaggaagctgggcccagctgggattgccgaggggcccctagccctggcagcggtcctgggctagtcggctgcctggccggggaacctgcaggctcccacaggaagaggtgtggagacctgccctcgggggcctctcccagggtccagcctgagcccccaccaggggtctctgcccagcacaggaagctgaccctggcccagctctaccgaatcaggaccaccctgctgcttaactccacgctcactgcctcgtgagtggcctggactggggtagggcaggtggctcagggcactggcatgggggcccactcatgcctgggagcatcgcatttggggagggtcatggcggagggagcctgaaccctgcccagtgtctgggcgcagggggctgtggtgggcagcagtgaaggggcctgaggagtgccgtggggaagagagggtgaccagagccactctgaatggcgtcagccaaagaaggactctgtcccctccccaccctgtagggaggtctgagcagagggaggcccccaagagtgccattgaccaagagacagcagacagcctgcctcctggggcgtgccggcacctgcttcagctactgcctcctgtatgcatgagccggatgctgggcaggatccctgcctacgcccgggcccgatttgcgctttgccggactggatggagtggaggaggcccaggccacagtaccaccccacctgcccaggcagcccctcgtcacctactccccgaagttaccagctcagctcgagtcttcagggctgggctcctaggctgcccatcctacttctaccctcactggcctccagtgggattcactcctgccctgcccccaccttcccagtcccacaggccacccctggcttgggctgggttctgtgaagttacgtatttattgagcttttggttcttttataaagacttgtctagactccactgggaagagtcctttgctttggggcccagtgactcggggcacttgagttcagggcggcctccttgtgttcctgtgctcctccacttgccacggatgggccacggatggagcttgccatgggaagcactgggaagtaatggggtgtggggtgccaccagaccaacacccccagacttccccaccttcagccaccatcagagcctctccccaggtgccccccggggattcagggctgaatctgcccagttcccacactcaggccagccctcttgggaaggtgggtcctccatgggggtcccttcaggaactttttttttttttttaatacagagtctcactctgtcacctaggttggagtgcagtggtgtgatgtcggctcactgcaacctctgcctcccgggttcaaacgattctcctgccccagccactctagtagctggaactgcaggtgtgcaccaccacgccgggctagtttttgtattttaagtagagacggcatttcaccatattggtcaggctggtctcgaactcctgaccccaagtgttccgcccgcctctgcctcccatagtgctagaattacaggcctgagctactgcgcttggccccttgcggtacttttggcccaacctcctccatggctggggacgcggaggccgagagagaagtcacttgccctggctctaccttgaagtggttctcagggttggggcgagagtcggggtggggaccgagatgcagctctatcctgtgcccctggtcgcagcaggcagcccagcgcttcgcgtgttctacttggcctgtccgctgccgcctaatgagctcaggtctaggccgagcagagggggcacctggtcggactcggttgggctcgggcggccccgcctccccccgcccgccaggcgggcccttctcgacggcgcggggcgggccctgcgggcgcggggctgaaggcggaaccacgacgggcagagagcacggagccgggaagcccctgggcgcccgtcggagggctatggagcagcggccgc

SEQ ID NO: 15735 - DNA, 30269 bp, Homo sapiens
cccagtccccggcgtccccggcgcccccgcccgccgcccgccccccgcgcggcacggggcctgctccatgggtgagtgcaggcggggacccggcggacgcggggcggggtcctggggggccgggccggctcctaacctcctccggggagggcccgctccaggcaagggggtgggcgccgaccgggcttcgggccgctcgtacccaaactcggcccccaagtcggggcctgcctcggcagcaccccgcttctcctccctccccccgcctctcgctggttgcgccgctctgcccccaccgcggtgcactccagcccccaggaagagaggcagcttggagggggccaaattcagggtcaaagatgagtcttggggaacgggggtcgccccagaccttcgggggctcctctgtctctaaagggagcgatgcagggcgtaaggttctcagggatctgggatcttggagccccttccccccagcagccctgccgggaccccctgggaagtctggggccccaaaaggtcactgagcgctcccccacttgtcccccagactagagggacagagggagagagcagcgtatttccaaagatgttttctccccgtggaatctggataatttccctgaggactgcaggagaaaagggctctgcaaacggattcccgtgcagataagttggcatttaaaagagaaagggacgctgacctcttttgaagggaggactgaggagatcaccccacccctcctccggttgggaggccagtggggcccaggggagcctgggtgccccgctgactgatgccctctgctcctcccctgcagacgaccagagccccgctgaaaagaagggactgcgctgtcagaaccccgcctgcatggacaaggggcgggcggccaaggtagggaggctggagagcctggggaccctcgggggcagaggggccagggctctaactgccctttctatcccagcaccagctatccacagagccctggcacgggcgcggctggctgggctgggttcaagtgtaggtggggccacagtgtgtctggtttaggaggcagagggcctgcccccagctcaggaacagtggagtcgggggacttctacaagaacaggggggtggagtaccccaaagccctttgctgcactgtggtcctagcagccattctgaggtgacaggagctgtagccttatgtcacggatgaggaaactgaggcttagccaggggaagtggtctcccacggtgctggtccagtgcccagatggcacccttcctgttgaactcagccactcttcaggcctgggcatgggtctgagatgctttgggacttggcgagtgtgaccatggccctggggatgacaaaaggaggaaggggccagttgatcctggagtgccagggcttgggagctgggagtggggcgaagtataaatcagggataaagggggcaggaaggaggataatagtactggctgggcgcttctgcctgtgatgtgctgggcttagtgccacccgctttctgtgccatatgcactgattgcggcagctctgcagggaaggcatcgtcaccccgttttccagatgaagacaccaaggttcagagaggtccagtgacttggccaaggcccacagctcatgagagatggagccggggtttggagccaggttttgcccctcccagcatgcatttacatgacaatagtgacaactgcgcaacttagcatctggcgcaggcaccaggactcactgactcctcctccggccttctgagatggtcctgtccttattctcatttacagatggggaaactgaggctcactcagggacagactgctaggaagtgggagagctgggatttgaacccagtacccaggtctgtgtcataccagggcccgtgttgtcttccatcatgtgtctcagcactgccagctgcaggaaatgtaaaatgccaccccccaccccccgctcccctcccgcacctccacccagacacacacacactcgttctgcacaggagggccgtggtgagggaacagggagaactgctatggggcggggcggggagggggcggcctccagttgccgtggtcaccaggcaggggggcggtgtgatgtcagatacaatctgctggcacggatggtgcctggcattgggctctggtgttggctggttgcctctttcccagatgggggctcctggcaacaaattggcctcagctccccccaatatacatcctgccagaggcctgcggagccccgaggcttttgcctgacctgaaggggcggctggggcaataaggcacactgtcccagcccctcctctgggcagctgctctcagggggggtcctcaagctgctcaggcaggggcaggggtgggatggcccagccttcatagaggtgaggcctgggagaagagagctggtctcagagtgggtatggtccctctgcagcctccagacctcacctccagccctggcctgcctggaacttggcacagctgacattggcatcagctgatgagggtcacccagcgtgcacggggagagtctgggccctgtcactactgggacgccctttgggacaaatggcacagactcactgtaggggcagaaatgcctgaattatcagaggcatagagagccagtcagggagggcatcctggaggagggggcctttaatggatgtgaaaacatggatagacagaacagaggcaagggcagtccaggaagggagaggcagtggtggagaggaggtgcggggcactcagatttggtaagagaaacaaagaataacattgtcgatgatgataataataaccactactggctgggtgtggttgctcatacctgcgatcccagcactgtgagaggctgaggcaggaggactgctttagcccaggagtttgaggccaacctgggcaatatagggagacctctctctactaaaattaaaaaaaaggcctggcgtggtggctcacacctgtaaccccagcactttgggaggccaaggcgggcagattgcctgagctcaggagttcgagaccagcctggccaacatggcgaaaccccatctctactataaatataaaaattagctgggcatggtggtgggtgcctgtaattccagctactcgggaggctgaggcaggagaattgcctgaacctgggaggcagaggttgcagtgaactgagatcatgccattgcactccagcctgggcaacaagagcaagactccgtctaaaaaaaaaaaaaaaaaaaaaaaaaaaaaattagccaggtgtggtggtgggtacctgtaattccagctactggggagggtgaggtgggaggatcatttgagcctgggacattgaggctgcagtgagccgtgattgtgccactgcactgcagcctgggcaacagagcaagaccctgtctcaaaaataacaggccaggcgcaggggctcatgcctgtaatcccagcactttgggaggccaaggtgggcagatcacttgaggtcaggagttcgagactagtctgggcaacatggtgaaaccccatctctaccaaaaatataaaaaataattagccggacatggtggcacacacctgtaatcccagctacttaggaggctgaggcagaagaatcgcttggaccctggagaaggaggttgcagtgagctgagatcacgcaattgcactccagcctgggcaacagagcgagactctgtctcaaaaaacacccaataataataataataacaattattgctgaccgaacatgtttacatgccaggcggggcgttaggccctcctgcttgtctcagtgaagcttcttgagaccctcaggagaacagcgttattcttatgaccacatgacttgtaaggaaacggaggcccagagaggtagaggaacttgcccacatcacacagcatgatcgtcagagcctggcctgcgtgaggcttgtctgatcaagagccctattcttactctccaggatgtgactagcgttttgaaggagatgacttcatttattcatttaccagaccagctctgagcatctgtcggtgccaggcccagttctaggcccaggagatctccagagaacaaaggggatgccctcctggaggtgacattctagctgtgctgggaggaaggaagggaagtgaccctggctggccaaacttccccccaggctgccctggcaaaggaccaatttcaggcagggctggacccttcggcttctgggcccacccttgatgttttatttgaggctctcctgggtgctggagcttctgagatgaatttgccatctgtcccctacctcctgcccctggagttcccactgggaggagggctaaccaggatgggcttcctggaggcaactggagtcctgaggattaaagaggtactgagatggaggacagctgagtgagcagggggggacattgggggctataaggggcaagcgaggccagggggcacagggagaaggggacgggaggagggggaggcaggctgcactaggagcacctgcatgtccagatgaggggtctggactgtgtgtcatggagaccccaggagagaaatggcccctccccaggatgaagatatgtagagcagtccacacctctgagctccaggatcaaacctacttttttccagctgtgcgaccctggggaagtcactacacttctctgaaccccaggttcctcatctggaaaataacccggcagcgaggattaaaagaggcccatatataacatgcttagcatagagcctagcacagcgtaggtgtgcaaggtgtcctgggagtgggggtaacaaagtcacctctagactttgggtgtgccctccgtacctgccctgggatctgagacctccccaggctccatcccagcttcttgcacacaggtggagctgtgagtttggggagatggagaaaggccgggagatcaaggcagactaatgatattgtgggttccccctgccctcctgtgaggtggccacgggacagtgtgtggactccccagctccttgctgggctccactgggcactgttcgaggtctagtcagggcgtcccaggtcacaagggggcatggaggaggacacttgtggccctgggccacaggggacattgggcaccacatgtgagggtgtttatcatggaggaggtagtgattccagcagccgccattgatccagcacgtactgtatgccaggccctgccttagcgcctggcacagaaacctcatctggccgcctcccccgctgcggtggggcctaccccatctccgtttcctagagagggccctgcagagtggcgaggtaaaatgacttgccaagcaaggcaagatcaggactcaaaccaggcctctctgtcagagcctcccatttcctcagaactctcaggaggaaagggaggtgaatttttctgcacagctcccaaaggccttgacagggaggtggggttcagcacactacaggaaagagtttccagcagctggagctatccccgaagtggaggtagtgagcaccccatcactagacatatgcaagaagagacagaaagggaagcgtagaggggattgcagtgtggagtggaggttggatgggaggacttcagagttcccttgcagcttaacaatggcctgtgaggtggcagggatgagtcagggtatgcgtgtgtggagggaggggtggtgagatgaagaccagggagaggaaagggtggacctgaggcccccatggagaagggacgggcaggatgtgagtaatgggagaggcaatcacctattctcctgggcaatgctttgggggtgagcagcggcagaccaggatgccccagggaatggccaggtttgggccatctctggaagtgactggtccccggagagaggtggtggggctatctgcagctgaagaaacgggcagggccagagaaacaatgcaaggggactcctgggttttggctaagtagttttgggggagcaggtgaagacgtggggatccctggcccagccaggagctgccctagtataggcccagccccaagggttgtgtggggcagtctggaggttttggcctgggaaggggtcgggggaaggctgtataaaaagcttgaaagtgcggaacaggttggtggacctgaactccacctcctcgagtgggccccctgtatccacacccttcccagtcctgagcccagagttattctaaactcccgctgctgggagaggggaactgggaaccactaaatggcagaacagcacccttttccggccatatcacctgggccagaaaaaaaaaaaagagggggcccagagaaaagcgggctgtttctggggcaccgcggaggccgcagatcagaatccagctttttacaatagagcggaagcgaacctggctcagggcgattccggggcgggctaggcctgcgggtctctctgcctggtcccccggggcttttctgtcgcgcggaggcttcctgtcgcgggccctggtcccccctagcccccttccgggatgggcgagctcccgtcttcaagcccaagttaatgaccagggactttgaactttttggagatctgcaaagggctggcccctcggggacagtgacgccccccaccccctcccctgagcccggatcctggattaccccaagccaccgcccggcctccagccacctccctggctccggcgcggggcccttcctgggacccctcctctccccggtcccagccgggcggcgccgttggtacatcccggccggtccaggtggtagcgcccgcgcggctaccgtaattcccctacgtcccgcgccccagtttgcgctgagtcgactgagcccgtcccgcggctcccgtccccctctccccgcgcgccccatgaggctttggcagtctcggcccgagccttagagccttagacaccggggaggagaccctggtcctgttcctaggtgagtcgcggggaagtgggagctgcgctccggacggggggtgggactaggcgccaggacccccctaaaccgatggacagaacccggattcgagattcccacgtagtgccaggcctgtgggtgggtacagggtcctcaccagctgtatctccatttacgtgagggtggaatgggttcaagctcccgcccccatcacagtgtctctagggtgggtcggctcggagatagggccgtgaggagtctatgggaccctggccccggtatggggggtattggcggggcagggggatcctggaggggcccgggcgcgcggcgtggctgggaggctcagccgatcctccccatctggccagtcccggagtcggtcccaggcggaaaagccctctcgaggccggcagggggcgccagaggctgcgcctcgggcagtctgagcagacccaggcacccacttaggggtgggggatgcgggagacccgtgaatccggggaggccctggcctgccttggtggaagtctgggaaatggaggccaagaggtcccctgcagattccttagtaactcctcaagttgagggagctcgggggtattttaccattctcctgccctttagccggggtccgggcacacactaggacctggcagccatccccagatactgaattctatgccctcttggcacaggtgggcaaattgaggcccagtaggggaagggtgggggaacgtaggctccagaccaggtcttctgaagcccaggcaggtgccctctttcccccgctccctaccaaggaggcttctaagttgcaccggggaagggcttgctagtccaggtgctccgaagacacacgctggggtctggggctgggaactgcagaggctgggcaggaggggatgttcacagactgcagcccctccctctttctctagcactgggtcccagccttgggcatactagccaggaccgctccctggggaggaaggggccttcctggcttccagggcccgtgcggtgggcttagcctggggagaggttttctgtgtccctgccatctgcccggcacagggcagggccttaggtcaggctctgactccaggtgagcctcagaacccaaggggtgatgggtgaggcctgggcctaggggaaaggagggtgggtaggccgggtggagcgtagagagccgcctggcaaagccaccccgccctggctggcctgcccatgcatgcagtctccacccctggatttctaaggtgttgggtggggccttgggactagcaggctcccaggggagcttagccttggtgggaattcctggcaaggacatccctccagccagagagctcggactcctggttccaggcccgtctgctgtcggcagagcctggagctggccccagacctgcgtcctttcctggacagggaagtccctctcccacccagaccaggctggggccccagctcgttgtggggcagggatgcctgggggatccctggtttcccatctgcttttctggggctgggggaggtgatactgagggagaacagccgggtgcgggggtcctgccttggagactccattattcatcagcctccgcatctggtttctgggtatcagtttcaacaagccggccctgactcacaagcctggagctggggctgggctggggaggggctccctccccagggagttgggggccaggacttcttgggcctgcccctgagctgtttcagctccctgctgtggagaggaggtgggaatgcaggagcctgcccaggcccaccccactgccctggtacaggggctgggggctcctttctgctctgcactcttgcccctaaggaacagtcccccacccttgctgagtacccaggcagcagcctcactcagggatggccagggcccaggcactcaggtgacctctggtgatccgccctgacccagccctggtggtctccacttgatgcaacctggttaccccacaccggtgggctccccacaagctggctttgggatctgccgtgtcttcaggaaggcaatctccagggccctgttgcccaaaccaacattcagctgtcttcaggccccacgcctgccctgtgcctgaggcacccatttccctacgtagcagcagctggtgactttggggcaagtcagttgacacaggccttagtttctctatctgttaaatggggattgtaacagtatctcctcctaagagtctttgagaagagcgaatgggattcactgcctggaactcccacgatggggtggcacatggaatgctcagtgaaatgcagttatctgcctacaggacagtatgggggtggaggtctggggcaagaccacccgatttgaagtaggaactcacctgcccagggccagcaggcccaaggtcatggatactaggaggaggaagagaccttcggtctggcagtggggaaggctctgttgactgtcggccacaggaagggatatcctggccgagccctttcctgtccccatgtccttctgtggcatgaaggcccttctgccttcatctgttcactgatctcatccccaccaagcgcacctactgtgcaccaggactgttctaagtgccgaggacacagtgagatgcagacggccaaggcgctggcttctggagaggacagtctggtagggaagaatgatgataaaaaagtgaacaaagaaatgaattacaggtagtaataaacactaagaaggaaataatttaacttaaaggaattgagagtgggagggtaagggtggtttattttaagatgagggaaaaggacgtcttagaggtaacatttaagttggggcccggtgtcagctgtttcaagatagggtgcgtggaattccagacagaaaatacagaggagaaggccctgagcttggcgagctgtagggagagaaggaagaccggcaggtggaccctgtgcggaccagctgggagggaggcgggagcccggccatggtgggatttcactataagcaagatgggaagttttagttttcaaaactctgcctgttggccgggtgtggtggctcatgcctgtaatctcagcactttgggaggccaaggtgggggtggatcacttgagatcaggagttagtgaccagcctggtcaacatggcgaaaccccatctctactaaaatacaaaaagtagctgggtgtagtggcgggcgcctgtaatcccagctactggggaggctgaggcagaagaatcacttgaacctgggaggtggaggtcgtagtgagctgggatcatgccactgcactccaacgtgagtgacagagcaagattccgtctcaaaaacaaacaaacaaaaaacaaaaacacaactctgcctgtggtgtagacagtgggtgacctgggctttgggagtggagacagccctggaagtctcccagcctctaataaaacgctgctgccctcccaaagccatctcacggaccctggcccccttcccaccctctttccccatggaaccaggtggaggaggagcaattaggggtgggtgggctgatgacagacagcatggccacctcacccccatgggttctgaggagtgtcccaaggaggccatcccagaatcccagagccacagtctgagtttcagtcttgcctgtagacttttgtctctttatgtcactttatcccccacgccgtgaatggggctaatggtgcctgccctgccttcctgggaatcagtgtaaaagcgctttgacagccgtgtagtggtgactccagcaccagagtctgggcgtttgcgtcctctcaggctttgctgagtgccccctggcggtggggacctggcctagaactgcagggacctgggctgctgtgccatgtgggtcgccagggtttcctgatgcctccacctcacccagctcctgggggctgccaaggatagcctctcagagcagcccgccttctgcccacggccctttccagaggccaccggcctttggctctcggcctctgccgtacctgggcagtgagcagtcggtgtgagggggtgtccctggggctcaggctctcgggcaggggtctccaggttgatgggaggggctgagatgagagctggttgtgaggttggggtgggtgtgtgactggggctcaaagctggtgttggagcagagaggggtgtccctggggctagatggagagccggaccaaggaccctgaggggagtgtgccccatcctggcctcccccttctggtgcctgtattctaagagctcccttgctgggagtaagaaggggtcccctgggctgaggctccgaggcgggggtgggggtctccaggaggaagggaggagggaaggtacccttctggctgggagggaccgtgcgtgttggcgctgagggtgaggtggggaccacagcagagtgggcacccccagggctgggcggggatcgagtcacccaggggaggggctccacagtctccaaggtgggggggggtgtcaccagcgccccctgcctccagcattcaaggagctccccaggagaaagagcaagttctgaggagccctctgagcccggcattggtgttgaggagggagtcagagaagagaggggcccggggccgcgcagaggcgcagaggtgggggtaccccgggccaggcagaggtgggaaggtgggggtcccggggactgggcggaggcggggctgtgggggtcccccggccgggcagaggtaggggtgtggagtccccgggtctgggcagaggcggggaggcggggggtcgcccgggcaggcggaggcgggggtgtaggggttcccgggcggggaggcggggatccccggggctgggtggcgagggcccgggcgggagggaggtgtccgccttcctggggggctgggggctgttccgggcccggccctccccggggtccccgcgctcggcgggggcgggcgcggccgcacaatggcaggaagcggggctccgcgctttgtccggcgggcggcgcagaccgcggcttcctccggccgccatggggacaggacccggtgtctccggacgcctagcagcctccaggccgggcccggggctgcccctccgggactcggagccctcctgggccgggggtcgtgcccgcgacggtgatagccaggtacggggccgggacggggcgggaacggggctgggtgcccagttctcgcctgcagccgcccagtcctgtgcgggaggccagggagggggtgcccgtgactatgggccccgcggcccccaggggaaggatgcggcccatggcggccgagccccctacctgggcagctgcaccctggtgacggggacctcggactccggggtgtgtccccgccggctgagatgtccccgccaattcttggcgctttgtgtctggggccagctccggacacacctgtgggtcccgggccctatgctgggccgcccctctcctttccttcctctgccctggccctgcccacagcctcctcctaccccagaggcctctgtttctccttgtgcctctggccccagcccttgtgtgagggtggacgcctggttctctgtccccatcctcacatgcgtgtattccccaaagggcccccctctgttattttggctgcctggcgttagagggggtgggagctggctgttcccatgggtgggctctctcctcccttgggttgagacctgggaacattcccccccggaccctggtgtccctcctgcaggacagaggcaggacatggtgggcaggcaggcaggtgagggaggggcagttgggtctgagagaaggggctggagtctggcttcaagaaggggccattccgccctagtgctgggggagtcctgcctctggagggagctggggagactctggggtttgggggtgggacgtgaggcagaacggggagcagaaactgcaccagggagctctgcccaccccagcttctcagttgggctcatggttctcccggggggcttccagaacttcatcgtcaaccagatctgctcgacgaagtcggaaaccacctggttcagatcctggggctgagcctcactgtgcccccagtgcccctgagcctggggactgctgagaggagggaagcagatgaggtcagccgggcctgggcaccagcccctggcagcagctggaggagtcgagcagcctcagtgatggtagtggccacccagaccatcacagcagggaaactgatctcgaggctttcaagggatccagggtggggtgcgtcatagggctcagtccgtatttgttgaatactgactcttccgtaaggagcgaatcagggtatcaaatctgctgtctgtatattggattgatttaaaaacaagatggtggcacagagtcagacttggactggaagggtcccagagaccctcccagaactcctccgacctagcacggctccttccttgtcaccccctacctgcggtgagaccagggcttgggtcatgggcaggtctgccgccccagctggcactaggaaatctcaggaggcctggaagggattggagctgggagcctctgccatgctggctgggttcacagagggccagagggctgcggagcccgcagacggggggctcccaggaagaggggacaaggtggggcagggcccttccccagatcattctcatgaggagacacctgaagcttgggctcccagaagctgcaaagcctgatgtttctctcagcagtgcgctgtggattcagggtgagggtgtgggtagagccctggctgaggacagcttagtggtctctgtagtttttaaatttttttctgagacggggtctcactgtgtcgcccaggctggagtgcagcaatgtgatcatggctcactgcagcctcaacctcctgggctccagcaatcttcccacctcagcctcccaagtagctgggactacaagagagcgccaccacacccggctaattttgtttgttttttgtagaggcaggatctcactgtgtggcccgggctggagtttttgcactttgttttacgatagattaagacagaaaccagaaagagctgcaggggttgagggatcaatcccatcaccctcacttcaagccccacaagcacagttgaagatcactcctgaagggtgtagaagtgggggcacctggtgctcaaggctgccttcaggaatctgggtcatcctgtccccagccacctgcctggggcccagctccatgcagatcagcccctccctgagcacgtgggcctgcttggagtgccacctgccgactgccagtcctgtgccctgttccctttcctgtcagatggagacacggagggacacaagaaccaacagggcttgcatcaaactgagatagatttcctcctgtccccgtaatcccggctgacctgaggccagcctctcgctcctaagacacccatgagagggcgtgaatgtgggttaaaatctgggatccagtctgggtgccgtggctcacgcctgtaatcccagcacttggtgaggccgatgtgggtggatcacctgagggcaggtgttcaagaccagcctgaccaacaaggtgaaaccccgtctctactcaaaatccaaaaattacctgggtgtggtggcgtgtgcttgtagtcccagttacttgggaggctgaaacaggagaattgtctgaacccaggaggcggaggttgcagtgagccaagatcatgccactgctctccagcctgggcaacagagcgagactctatcgcaaaaaacataaataaatacataaataaataaataataatctgggatccagagccccacacacagtggcttcaagtcctagatccactggctgtgtgaccttagacaagtcatttcacctctctgagttttactttcctcttgtgtgaaacagggacaataacagcccttatcttatgggatgagatacacatgtaatgcccccagtgtggctccagacacatgacgaccacattaaaaacacactcagattcttcccggcctcctcctccctcctgtcactttctctgctatcctcaccacgcctatctcggaaatctctcatcgggctttcaccagccagaaactcttcagcgcctctctcctgccttaattcataaatgaaacaaggatttatggagcagctgggaccggaggtcaggcgctgaatcagacagagtaacatttctgtccttgcgaatgtgaccaggtgtggaggcagcagggtggaatatgtgacctgtcaggtgctggaaagtgctgaggacaggaaaggagcgtggagggcgaatgaggaggatgagaaggtgacttggggggaagctagcaggaggggagggaaggcagggagccatgcatttcaatatctggggaaaagcatctcagtccagggactggcagatgtcacagctcagaggtgggagctgccctgagggagtgtgtcccggaacgaccaggaggccagtgggtgaggggagtgagccaggatggaagagcaggacaggaggtccctgaatggggtggccttaaccctaaaaaaaaaaaaagtcaatgtcataaaagactgaaaaccctaaccttaacccttttggcttttttttttttttaagataatgtcttccctgtagcccaggctggagtgcagtggcgcaatctcagctcactgcaacctctgcctcctgagttcaaacaattctcctgcctcagcctcctgagtagctgggactacaggcgtgtgccaccatgcccggctaagtttttgtgtttttagtagagacggggtttcaccatgttagccaggatggtcttgatctcctgaccttgtgatccgcctgcctcagcctcccaaagtgctggggattacaggcatgagccaccgcgcctggcctttttatttacttatatatttatttatttatttatttatttatttatttatttattttgagacggagttttgccccaggctggagtgcgatggcacaatctcggctcactgcaacctctgcctcccgtattcaagcgattctcctgcttcagcctcccgcgtagctgggattacaggcatgcgccaccatgcccagctaattttgtatttttagtagagacagggtttcttccatgttggtcaggctggtctcgaactcccaacctcaggtgacccgcccgcctcggcctcccaaagtgctgggattacaggcatagccactgctcctggccccttttggcttttattcagagtgagatgggaacccttggagggttttgagtagatacagtgggactcctctttgaacagggcccactctagctgcacatggacaacatattgtgggggatgggggtagcagtgaggccagttttgaggccattgttgtcatctagctaaaaggtggctgggcagtggcacgcttatgagctgtggctgggttgaggccacagatactaaaggtggagccagcgggattttcgggctgaccagatgggggcataacagagaatgtcaagagtgaccccaagctgatatggtggctcacacctgtaatcccagcactaattccagcactttgggaggctgaggcgggcggatcagttgagcccaggagttcgagaccaggctgtgcaacatggcgaaatcctatctctactaaaaattagctgggtatggtggtacatgcctgtagtcccagctacttgggacggtgaggcaggagaatcacttgaacccaggaggtagaggttgcagtgagccgagattgcggcactgcactccagattgggtgacagagtgagaccctgtctcaaaaaaaaaaaggaaatcccccaccttgcagccatcagaagaatcaaataattgatttaggttaaaatcatctatgtatgctaaagctcttaggaccgcaagctcacatcaccatgcctggctaatttttttttttttggagacaaagtctcgctctgtcactcaggctggagtgcagtggtgtgatctcggctcactgcaacctctgcccccggttcaagcaattctcctgcctcagcctcctgagtagctgggactacaggcgtacgctgccacgactggctaatttttttgtattttagtagagacggggtttcaccgtgttgcccaggctgctatcgaactcctgagctcaggcaatccacccgcctcggcctcccaaagtgctaggattacaggcatgagccaccgtgcctggcaattttttatatttttagtagagatggggttttgtcatgttggccaggctggtcttgaactcctgacctcaactgattgagtgagattactggggaacaagacatctcaaagtgccatgccacagattacttattaattataggggaaaaagggactctacaaggtacagaggtccccagaggatccagcattacaggcaaatagcaagaacacacagctctgtggtgtccccgcctgaacgctcagtttgaaactttctgaggaccaccagggagatccacattgaggagctctgtgcgaggctgctggctcgaagacttccaaaatgtcaaggtcagccaggcacagtggctcatgcctataatcccagctctttgggaggtcaaggcgggcagattgcttgagcccaggagttcaagactagcctgggcaacatagtgagatctgtcactactaaaaataaaaaagttagttgggcgtagtggcatgcacctagtattcccagctactaaggaggctaaggcaggaggattacttgagtccgggaggttgaggttgcagtgagctgatcatgccatactactccagcctgggctacagagcgagaccctgtcttgaagaaaaaaaaaaagtcaatgtaataaaagaccacaaaaaacaaggctgggcacggtggctcacgcgtgtaatcccagcactttgggaggccgaggtgggcggatcacgaggtcaggagatcgagaccatcctggctaacacggtgaaaccccatctctaccaaaaatacaaaaaattagccgggcgtggtggcgggcgcctgtagtcccagctactcaggaggctgaggcaggagaatggtgtgaaccgaggaggcggagcttgcagtgagtcgagatcgcgccactgcactccagcctgggcgacagagcgagactccgtctcaaaaaaaaaaaaaaaaaaaaaaggataaacagacataaccaaatgccacgtgtgaaacttgattagttcctatatgaggaagtatatctgtaagaacgttatttagacacttgggaaaatgtcaatatagactatatatcaaggttcagtttcccaagtgcgacaattctatggggttttgtaggaaaactgtctttgttcttaggcagcagcatgatttctgccccaggggaggggggtgccgagaagagaatgggagagaagcagatgtggtagatatcaacttggggagtccagagggcatgtggatgtcatgtgctattcttataatttttggtaggtttgaaatattttaaaacaagtctgggcgcggtggctcacgcctgtaatcccagcactttgggaggccgaggcaggcggatcacctgagaccaggagttcaataccaacctggccaacatggtgaaactccgtctctactaaaaatacaaaaattagtcgggcgtggtggattgtgcctgtaatctcagctacttgggaggctgaggcaggagaatcacttgaacccgggaggcggaggatgcagtgagctgagatcgtgccattgcactccagcctgggcaacagagcgagaccccttctcagaaaaatttaaaaaaataaaaagaaaagaaatattttaaaacaaaacttgggaaaaataaagagagtgggaggagagaactaggaagtcgtgaatactgatacctgtttacagagtttagctgtgaagggaaagaaagaaagtcagccgtagctggagggtgaggtgaggcctctgtaaaatggagaaataaggctgggcgtggcagctcatgcctgtaatgccagcattttgggagaccaaggtgggcggatcacttgaggccaggagtttgagaccagcctgggcaacatggtgaaaccccgtctctacaaaaaatacaaacactcgcctatggtggtgtgtgcttctagtccaagctactcgggaggctgaggctcgaggatcacgtgagtctgggaggtcaaggctgcagtgagccatgattgtgccactgcactccctgtctcaaagaaagaaagaaaaaaaaagatggagaagccgggcgcggtggctcacgcctgtaatcccagcactttgggaggcccaggcgggctgttcacgaggtcaggaattcgagaccagtctggccaacacagtgaaaccctgtctctactaaaaatacaaaaaaaaaattagctgggcatggtggtgtgcgcctgtaatcccagctactggggaggctgaggcaggagaattgcgtgaaaccaggaggcggaggttgcagtgagccgagatcaagccattgcactccagtctgggtgacagaatgagactctgtctcagaaaaagaaaaaaaagaaaaagatggagaaataaccacgtgttggtgtggcagtgggggaaatgatccagcagaggggaaacttgatgatgtgggagaggggggactgctggggggcgtctcctcaccctggatcgagagatggagggcagttcattctaagtccctgcagcgctgggccggggtcgagggatgtggtggatctcgtggacctcctgaaggcttctgtccccaccccaggtatgtcaccacgccgactgccagcagctgcaccgccgggggcccctcaacctctgcgaggcctgtgacagcaagttccacagcaccatgcattatgatgggcatgtccgcttcgaccttcccccacaaggtgagcacaggcgggagccgcagctcggcccccagagctcctgtgtcagtgtttcagtaactgtcggaaacgtgctagggcgtcataaggacaagtcgactgtaaataatgaaacccgagtatgttacggttccttttgttccaaatgttttttagcaagagagaaagtccatgagcgtgccccttccagaggcaggcctttctctatctggtgctgtgctctcactggttctcacctcccccagctgcttttgcccctggcctgtggcccacacagagaaggcccctttctttctagttctgcctatcctcagggcaggggacttctggacaagtcctgcaagccaggctgtgggcctagcagaggcagtgtggagtgggggtggccaggtcaggaggcacttggagcaggaaataagaaattcctcttgctgagcagggacccagctcaggcccaccatcaactgcctatggaggagtggctcgcaggcacccaggcctggtgagaaatgccaacccccgagtcctttcccagctgatcagaggaacaaaaggattcttctggttgggcacggtggctcatgtctggaatacaaaaaatacaaaaattagccaggtgtggtggcacacacttgtggtcccagctgctcggaggctgaggtggaaggatcgcttgaaccccgacaatggaggctccagtgagccctgatcgtgccactgcactccagcctgagcgacagagcaagaccctgtcttaaaaaacaataaacaaacaaaagactctctcccactgccagggccccttgggaattcaggtgtggtcacagcatgggggaggggaggcctggaagaaagagccatggactttggtcccttcctgtaataacctcagaggcaaggcttccttatccttattttatagaagggtaaactgaggccacaggtgagtttgtttttggggtggagcttcaccatgggtgtcatcccagggcctttgtgtccttttgggtctgtggggatagacagcaatgactaaggccaggcaaggtggctcacacctgtaatcccagccctttgggaggctgaggtgggtggatcacttcaggtcaggagtttgagaacagcctggccaacatgttgaaaccctgtcattactaaaaatacaaaaaaatgagccgggtgtggtggcacacgcctgcaatcccagctactcaagaggctgaagcatgagaattgcttgaacccaggaggtggaggttgcagtgagccgagatcatgccactgcactccagcctgggtgacagagtgagaccctatctcaaaacaaaaacaaaaaacaatgactgagcccctctcctcacagaactgaagggcccttgctacctttaatctgggggttccagggtaacaggctgtggtccctctggaggcagccatgctgcaggctaaggaggggcgggggaggcacaaccctctcctgctttctcccaaggctctgtgctggcccggaacgtgtccacccggtcatgcccgccgcgcaccagccccgcagtggacttggaggaggaggaggaggagagctctgtggatggcaaagggtaggtgagggatgagtgggcagagagatacctggagggccccacggctgggtctcagatcagacattcaggaccagatgctctggcgccttcctcaagtaaggctgatgggcagacctcttcccacgcctgtggctgtcctgactccgggaagaggccacccagcctgggccagcctccagggtgcttgggatcctagcccacaccagaccaggtaccgttcgatgtgactcccgtgttggccaccagagggcgcacagccctatgcgggcctggccgggttgaatccacgcgggttacctgtcacctggggtgagccaagggcggggaggccacaggcccactcgccgcccacgctggcgagggccacccacacctccagcctctgccctcctcgcttccctgcagggaccggaagagcacaggcctgaaactctccaagaagaaagcaaggaggagacacacggatgtgaggagccccccagagccggcagatgcgggttccctacagcctgcgcccttccccgagcctgggccttcctccgggatgggggtggggaggtctgcatcccagggtgcagaggtctgggagatcgctggggttccctttcttgctggggttcccatccgagaccggagggtggggagggtggggaggagggttgggaaggagggtgggaaggagggtggggaggagggttgggaaggagggtgggaaggagggtggggaggagggcgggaatgagggcggtgaggagaagctcacagcccccacccccaccatcctcccaggacccaagcaaggaatgcttcactctgaaatttgacctgaatgtggacattgagacagagatcgtcccagccatgaagaagaagtcactggggtagggcttgatggggctcagggtggaagtgggactgggagtaggggtggccccatgttgcaggctccgggtctctgcaggtgtgacgtgtgtgtctgtgtggtggcccgtgagcgagcgcatccctgcgtgggcagacccgtgctggtgtgcacgccagtgtgagggagtgcggtggggtctgtgtacttgtgcattttaatcatgtatgcaggagccaggcctgcgtgtgggcaggcgtgtgacaggtctgccgtggtatgcagatgcgcctgtgtgagcacctctgcgggcaggtgtctgtggacctgcgtgtgatcccatgcgggcttcccttttccgttgggaaggtgggggcagctggggctgtgggtggggcgggggctcgtgggggcggggcccaagctgaagcgactggccgcctggttctaacacacatgcctcctgtcctgggggcagggaggtgctgctgcctgtatttgaaaggaagggcattgcgctgggcaaagtggacatctacctggaccagtccaacacacccctgtccctcaccttcgaggcctacaggttcgggggacactaccttcgtgtcaaaggtgagaagcagcctgggccaaatggggccgctgggactggcggagcctcctggagatgggcgcccttcccaggctcaggttcccattggtcgtgggcctgagcagcctcattaccatacaggtgtctctgctggatgctgctgggggaggggagggtgctggcagggcggggctgtcgggggagggcaggcaggccttggtgtggatcctccggggagagaggaccggggaccccctcctccaccagaccagggtactgaggatctctcgtggcccccacatgcagccccagccaagcctggagatgagggcaaggtggagcagggcatgaaggactccaagtccctgagtttgccgattctgcggccagctgggaccgggccccccgccctggagcgtgtggacgcccagagccgccgggagagcctggacatcttggtgaggaggagggggtgtgtcaggggagggggtgggaaggggcccaggctgggcccacagcccctcctcagaggcagtcaccctgggtctctcactgccccatcttggggttttaattgtcccttctggaaaatggggttggctgggagagtaggggaccctctctctctggatctagccatagcccaaggtgagggcttgtatctgagactcttctagtgccaggggtcagggaacctgtgtgtgcatgtgtgtgtgagagcacttgtacctggggctacagaccacccagagctgtgttccagagtgcatctgagtgtgtaactctgtgcttcatgcttgaagctgggggactgggggatgatagtctgggcgtatctgtgtctggaccttccagtctccagatatgtctgggtcccaggagaggggacaccccagggtagagatgcagagaccctcctccatcccaggctggcctgaggccctggaaacccgccctggggtggggccatgggggctggcagggggtcccggccctgaccacccttccctgaccaggcccctggccgccgccgcaagaacatgtcggagttcctgggggaggcgagcatccccgggcaggagccccccacgccctccagctgctctctgcccagcggcagcagtggcagcaccaacactggcgacagctggaagaaccgggcggccagtcgcttcagcggctttttcagctccggccccagcaccagcgcctttggccgggtatgtggccccatctgcccagggtcaggcagctggctggccatgacccctgaccctgaccagggtatctttccaggaggtagacaagatggagcagctggagggcaagctgcacacctacagcctcttcgggctgcccaggctgccccgggggctgcgcttcgaccatgactcctgggaggaggagtacgatgaagacgaggatgaggacaatgcctgcctgaggctggaggacagctggcgggagctcattgatgggcatgaggtgagtgcgggccacagtgctgctccctccttgtcccgaaaggaggacagccctcgggaggacccagtgatcagatgttccatgggacgccccaaagaggccactgttaccattagcccactttggagacactgaggctagatgaaaatggtgtgctgcttggctgttttaatggcagaggagggcccagatcttgggtgtcttaactgtgattactcatgtggtgtcaagggtgaccctgctcctcttgggacctccatgtccccattgggaaaatgagagttgcatgcaggttgcttatcctccccggccaccctaaggtgctccaggcctcgtgaatgacccatcctgccctccctctagaagctgacccggcggcagtgccaccagcaggaggcggtgtgggagctgctgcacacggaggcctcctacatcaggaaactgcgggtgatcatcaacgtgagtaggggctgcgctggtccccgtggccaccctgcccccctctttctgacagccctcagctgagtctgagcctttgcagaaggagcaggtgcctggcaatgaggtgggggcaggaaagtcagacaagggctgcgcccagggaggaggtgcctcctagaggaacctgggagggggcttcgggcaggtttgtcaggttcagctgaattagcacaggtgaggcctcattctttcactttcgttcagtggctgtttcccaacacttgctgtgtgctgggtgcccagcaggccacgccctggacgggacagagtgagctggcagtgtagggatttcggctcagggaggggagcacctaccctgggcttggagcttcctggagggaggaagcaccctcagaggtgaaatctggaggctaagccagggcagaggtggagaagggaattccaggcatggcttcaaagccagtctcccccgagcttccctccaggagggaccagggcagtgtgacctcgggagggctatgaggactgggtctttcctcagggtctggactacccaggtgcgaaggccaaagggtacagccttcttatccgtggctgctgtggggcctcctggaacggggaaggggaaggagtggcaggggagcctgaggctgggtggggccctagggctgagacagcctcccgaccccagtcacaccatcccctgatcccacagctgttcctgtgctgcctcctgaacctgcaagagtcagggctgctgtgtgaggtgcgctgggattcgggggcggcggcgggtgaggtaccaggaaggagggcgggacctggacctggggcggggctaacctggcggaggggcgtggccaaccgcacctcccgccgcgcccaggtggaggcggagcgcctgttcagcaacatcccggagatcgcgcagctgcaccgcaggctgtgggctagcgtgatggcgccggtgctggagaaggcgcggcgcacgcgagcgctgctacagcccggggacttcctcaaaggcttcaagatggtacgggcggggccgggcgcaggcgggggcactgaggcagggctggggcgccgaaaagcctccacggcccgatccggtctgcccagcatccccaacctcccccaggcccgtaaccgcacttgaccccttgtggccaagggtgaggaattacgaggcggtcgcccgggtttgagcctccacctgaccatctacccctgatccctggccacgggtggtcactttggctgaggctcagtttcctcatcaggaaacagggatcataagcttgctgcccccttggggtggtcgcccaagtgcagtaaggaagcgcttgcgcagcgcctggcgcgggccggcccgcagggagcgcgcggtaaccggcgccgtggttgttctgccccgggccagttcggctcgctcttcaagccctacatccgctactgcatggaggaggagggctgcatggagtacatgcgcggcctgctgcgcgacaacgacctcttccgggcctacatcacggtgagggcgcgcgtgccgtgggcgggggcgcaggaggacgggaccctggacggggccgggtggggcggggcctgccctgagcccgcccccactcccccaccgcagtgggcggagaagcacccacagtgccagaggctgaagctgagcgacatgctggccaaaccccaccagcggctcaccaagtacccgctgctgctcaagtcggtgctgaggaagaccgaggagccgcgcgccaaggaggccgtcgtcgccatggtaaccctgatggccagcgggagccgtcccccctgcgcggctctctgctccgtcatgaccctggacctgaagctccctcacctgcccctagatcggctccgtggagcgcttcatccaccacgtgaacgcgtgcatgcggcagcggcaggagcggcagcggctggcggccgtggtgagccgcatcgacgcctacgaggtggtggaaagcagcagcgacgaagtggacaaggtgggcgtgtgtgtctgcgggggttgccggctgggagagaggaaggcccagctggcaggcaggggctgtgctgggcatctcactgaggatgcctagctgagatgggagtcagtctctggcctcccctacgttcacgccatccgtccccagctcctgaaggaatttctgcacctggacttgacagcgcccatccctggcgcctccccggaggagacgcggcagctgctgctggaggggagcctgaggatgaaggaggggaaggacagcaaggtgattccagggccaccccacccctgtgccctgcccttcctagggacctcctgggccccagtcactggttctcagctctgcagtcccttcggtggttactcaagaaccagtgaccttgtcatagtgaatgacagttctctgcctgccattcacaaatccagcagtagggtcctagcccttgaaggcaccagttgtgcccatttgttggtgccacatgggttcctggtgggagggcagccatattccacaagtgggccaggaaccccagagccttgctactgtgccatggccccttcaggcatggggcaggctgagagcttgcacacggtgacttcaaagtcaccagtcttctttttaatgtaaacttgtattgagataagtcatcaacgtacatctcagtgaaagagaatcatcttcctcttcattttaattttacttgaaggttcatggtgggaggagtgtttgacaaaaaccgagtgctcccaggggaggctggtgccacagtccctggccctgaccctgctggcctctctggccaccccccctcctgccactgcagatggatgtgtactgcttcctcttcacggatctgctgttggtgaccaaagcagtgaagaaggcagagaggaccagggtcatcaggccacccctgctcgtggacaagattgtgtgccgggagctacgggaccctggtaaggagccctggtcccctgttcctggtcaggggctgtgatgggtgggggccatcgtctctgctgacactgacttgggccttccctaaccagggtccttcctccttatctacctgaatgagtttcacagtgctgtaggggcctacacgttccaggccagtggccaggccttgtgccgtggctgggtggacaccatttacaatgcccaggtgagtgcagagtagtgagtgggtgggcaaggcagattagggagatgctggtcacaacccattctgtcccatgtaccccaaccttgcctgcagaaccagctgcaacagctgcgtgcacaggagcccccaggcagtcagcagcccctgcagagcctggaagaggaggaggatgagcaggaggaggaagaggaggaggaggaggaggaggaggaaggcgaggacagtggcacttcagctgccagctcccctaccatcatgcggaaaagcagcggcagccccgactctcagcactggtacgtctgctcatgaccacccagcaggtcaaaccaggacaagtactctagcccaggactcctgaaggcccagccacgctcccttcctcccaatggcctcttgtcatgaacactgtgggagcggggctctgtctcccccagagtccgggtggggagggcagacacctttccatgtgctgccagccctgatccattcgtggtagctgcctggggtgctgtgctgaggatccttagggcagatccagccttggcagggaagagtgctgggctcgctactgaggtctgttgtgggcactggagctggaagatctgccacacctgccacatgctgccatctctgagcctccagccccaggagggcagagggtataaaccaccgtgcattgcccagcctggggctgcctcaggccatctaggtttcatggcctgggctgactctgctcctggccccacagtgcctcagatggctccacggagaccctggccatggttgtggtagagcctggggacacgctgtcctcccccgagttcgacagcggtcctttcagctcccagtctgatgagacctctctcagcaccactgcctcatctgccacgcccaccagtgagctgctgcccctgggtccggtggacggccgctcctgctccatggactctgcctacggcaccctctccccaacctccttacaagactttgtggccccaggcccaatggcagagctagtgcctcgggccccagagtccccacgagttccttcccctccaccctcgccccgtctccgccgccgcacccctgtccagctgttgagctgcccgccccacctgctcaagtctaagtccgaggccagcctcctccagctgctggcaggggctggcacccatgggacaccctctgcccccagccgcagcctgtcagagctctgcctggctgttccagccccaggtattaggactcagggctcccctcaggaagctgggcccagctgggattgccgaggggcccctagccctggcagcggtcctgggctagtcggctgcctggccggggaacctgcaggctcccacaggaagaggtgtggagacctgccctcgggggcctctcccagggtccagcctgagcccccaccaggggtctctgcccagcacaggaagctgaccctggcccagctctaccgaatcaggaccaccctgctgcttaactccacgctcactgcctcgtgagtggcctggactggggtagggcaggtggctcagggcactggcatgggggcccactcatgcctgggagcatcgcatttggggagggtcatggcggagggagcctgaaccctgcccagtgtctgggcgcagggggctgtggtgggcagcagtgaaggggcctgaggagtgccgtggggaagagagggtgaccagagccactctgaatggcgtcagccaaagaaggactctgtcccctccccaccctgtagggaggtctgagcagagggaggcccccaagagtgccattgaccaagagacagcagacagcctgcctcctggggcgtgccggcacctgcttcagctactgcctcctgtatgcatgagccggatgctgggcaggatccctgcctacgcccgggcccgatttgcgctttgccggactggatggagtggaggaggcccaggccacagtaccaccccacctgcccaggcagcccctcgtcacctactccccgaagttaccagctcagctcgagtcttcagggctgggctcctaggctgcccatcctacttctaccctcactggcctccagtgggattcactcctgccctgcccccaccttcccagtcccacaggccacccctggcttgggctgggttctgtgaagttacgtatttattgagcttttggttcttttataaagacttgtctagactcca

SEQ ID NO: 15736 - DNA, 31005 bp, Homo sapiens
accgcggtgcactccagcccccaggaagagaggcagcttggagggggccaaattcagggtcaaagatgagtcttggggaacgggggtcgccccagaccttcgggggctcctctgtctctaaagggagcgatgcagggcgtaaggttctcagggatctgggatcttggagccccttccccccagcagccctgccgggaccccctgggaagtctggggccccaaaaggtcactgagcgctcccccacttgtcccccagactagagggacagagggagagagcagcgtatttccaaagatgttttctccccgtggaatctggataatttccctgaggactgcaggagaaaagggctctgcaaacggattcccgtgcagataagttggcatttaaaagagaaagggacgctgacctcttttgaagggaggactgaggagatcaccccacccctcctccggttgggaggccagtggggcccaggggagcctgggtgccccgctgactgatgccctctgctcctcccctgcagacgaccagagccccgctgaaaagaagggactgcgctgtcagaaccccgcctgcatggacaaggggcgggcggccaaggtagggaggctggagagcctggggaccctcgggggcagaggggccagggctctaactgccctttctatcccagcaccagctatccacagagccctggcacgggcgcggctggctgggctgggttcaagtgtaggtggggccacagtgtgtctggtttaggaggcagagggcctgcccccagctcaggaacagtggagtcgggggacttctacaagaacaggggggtggagtaccccaaagccctttgctgcactgtggtcctagcagccattctgaggtgacaggagctgtagccttatgtcacggatgaggaaactgaggcttagccaggggaagtggtctcccacggtgctggtccagtgcccagatggcacccttcctgttgaactcagccactcttcaggcctgggcatgggtctgagatgctttgggacttggcgagtgtgaccatggccctggggatgacaaaaggaggaaggggccagttgatcctggagtgccagggcttgggagctgggagtggggcgaagtataaatcagggataaagggggcaggaaggaggataatagtactggctgggcgcttctgcctgtgatgtgctgggcttagtgccacccgctttctgtgccatatgcactgattgcggcagctctgcagggaaggcatcgtcaccccgttttccagatgaagacaccaaggttcagagaggtccagtgacttggccaaggcccacagctcatgagagatggagccggggtttggagccaggttttgcccctcccagcatgcatttacatgacaatagtgacaactgcgcaacttagcatctggcgcaggcaccaggactcactgactcctcctccggccttctgagatggtcctgtccttattctcatttacagatggggaaactgaggctcactcagggacagactgctaggaagtgggagagctgggatttgaacccagtacccaggtctgtgtcataccagggcccgtgttgtcttccatcatgtgtctcagcactgccagctgcaggaaatgtaaaatgccaccccccaccccccgctcccctcccgcacctccacccagacacacacacactcgttctgcacaggagggccgtggtgagggaacagggagaactgctatggggcggggcggggagggggcggcctccagttgccgtggtcaccaggcaggggggcggtgtgatgtcagatacaatctgctggcacggatggtgcctggcattgggctctggtgttggctggttgcctctttcccagatgggggctcctggcaacaaattggcctcagctccccccaatatacatcctgccagaggcctgcggagccccgaggcttttgcctgacctgaaggggcggctggggcaataaggcacactgtcccagcccctcctctgggcagctgctctcagggggggtcctcaagctgctcaggcaggggcaggggtgggatggcccagccttcatagaggtgaggcctgggagaagagagctggtctcagagtgggtatggtccctctgcagcctccagacctcacctccagccctggcctgcctggaacttggcacagctgacattggcatcagctgatgagggtcacccagcgtgcacggggagagtctgggccctgtcactactgggacgccctttgggacaaatggcacagactcactgtaggggcagaaatgcctgaattatcagaggcatagagagccagtcagggagggcatcctggaggagggggcctttaatggatgtgaaaacatggatagacagaacagaggcaagggcagtccaggaagggagaggcagtggtggagaggaggtgcggggcactcagatttggtaagagaaacaaagaataacattgtcgatgatgataataataaccactactggctgggtgtggttgctcatacctgcgatcccagcactgtgagaggctgaggcaggaggactgctttagcccaggagtttgaggccaacctgggcaatatagggagacctctctctactaaaattaaaaaaaaggcctggcgtggtggctcacacctgtaaccccagcactttgggaggccaaggcgggcagattgcctgagctcaggagttcgagaccagcctggccaacatggcgaaaccccatctctactataaatataaaaattagctgggcatggtggtgggtgcctgtaattccagctactcgggaggctgaggcaggagaattgcctgaacctgggaggcagaggttgcagtgaactgagatcatgccattgcactccagcctgggcaacaagagcaagactccgtctaaaaaaaaaaaaaaaaaaaaaaaaaaaaaattagccaggtgtggtggtgggtacctgtaattccagctactggggagggtgaggtgggaggatcatttgagcctgggacattgaggctgcagtgagccgtgattgtgccactgcactgcagcctgggcaacagagcaagaccctgtctcaaaaataacaggccaggcgcaggggctcatgcctgtaatcccagcactttgggaggccaaggtgggcagatcacttgaggtcaggagttcgagactagtctgggcaacatggtgaaaccccatctctaccaaaaatataaaaaataattagccggacatggtggcacacacctgtaatcccagctacttaggaggctgaggcagaagaatcgcttggaccctggagaaggaggttgcagtgagctgagatcacgcaattgcactccagcctgggcaacagagcgagactctgtctcaaaaaacacccaataataataataataacaattattgctgaccgaacatgtttacatgccaggcggggcgttaggccctcctgcttgtctcagtgaagcttcttgagaccctcaggagaacagcgttattcttatgaccacatgacttgtaaggaaacggaggcccagagaggtagaggaacttgcccacatcacacagcatgatcgtcagagcctggcctgcgtgaggcttgtctgatcaagagccctattcttactctccaggatgtgactagcgttttgaaggagatgacttcatttattcatttaccagaccagctctgagcatctgtcggtgccaggcccagttctaggcccaggagatctccagagaacaaaggggatgccctcctggaggtgacattctagctgtgctgggaggaaggaagggaagtgaccctggctggccaaacttccccccaggctgccctggcaaaggaccaatttcaggcagggctggacccttcggcttctgggcccacccttgatgttttatttgaggctctcctgggtgctggagcttctgagatgaatttgccatctgtcccctacctcctgcccctggagttcccactgggaggagggctaaccaggatgggcttcctggaggcaactggagtcctgaggattaaagaggtactgagatggaggacagctgagtgagcagggggggacattgggggctataaggggcaagcgaggccagggggcacagggagaaggggacgggaggagggggaggcaggctgcactaggagcacctgcatgtccagatgaggggtctggactgtgtgtcatggagaccccaggagagaaatggcccctccccaggatgaagatatgtagagcagtccacacctctgagctccaggatcaaacctacttttttccagctgtgcgaccctggggaagtcactacacttctctgaaccccaggttcctcatctggaaaataacccggcagcgaggattaaaagaggcccatatataacatgcttagcatagagcctagcacagcgtaggtgtgcaaggtgtcctgggagtgggggtaacaaagtcacctctagactttgggtgtgccctccgtacctgccctgggatctgagacctccccaggctccatcccagcttcttgcacacaggtggagctgtgagtttggggagatggagaaaggccgggagatcaaggcagactaatgatattgtgggttccccctgccctcctgtgaggtggccacgggacagtgtgtggactccccagctccttgctgggctccactgggcactgttcgaggtctagtcagggcgtcccaggtcacaagggggcatggaggaggacacttgtggccctgggccacaggggacattgggcaccacatgtgagggtgtttatcatggaggaggtagtgattccagcagccgccattgatccagcacgtactgtatgccaggccctgccttagcgcctggcacagaaacctcatctggccgcctcccccgctgcggtggggcctaccccatctccgtttcctagagagggccctgcagagtggcgaggtaaaatgacttgccaagcaaggcaagatcaggactcaaaccaggcctctctgtcagagcctcccatttcctcagaactctcaggaggaaagggaggtgaatttttctgcacagctcccaaaggccttgacagggaggtggggttcagcacactacaggaaagagtttccagcagctggagctatccccgaagtggaggtagtgagcaccccatcactagacatatgcaagaagagacagaaagggaagcgtagaggggattgcagtgtggagtggaggttggatgggaggacttcagagttcccttgcagcttaacaatggcctgtgaggtggcagggatgagtcagggtatgcgtgtgtggagggaggggtggtgagatgaagaccagggagaggaaagggtggacctgaggcccccatggagaagggacgggcaggatgtgagtaatgggagaggcaatcacctattctcctgggcaatgctttgggggtgagcagcggcagaccaggatgccccagggaatggccaggtttgggccatctctggaagtgactggtccccggagagaggtggtggggctatctgcagctgaagaaacgggcagggccagagaaacaatgcaaggggactcctgggttttggctaagtagttttgggggagcaggtgaagacgtggggatccctggcccagccaggagctgccctagtataggcccagccccaagggttgtgtggggcagtctggaggttttggcctgggaaggggtcgggggaaggctgtataaaaagcttgaaagtgcggaacaggttggtggacctgaactccacctcctcgagtgggccccctgtatccacacccttcccagtcctgagcccagagttattctaaactcccgctgctgggagaggggaactgggaaccactaaatggcagaacagcacccttttccggccatatcacctgggccagaaaaaaaaaaaagagggggcccagagaaaagcgggctgtttctggggcaccgcggaggccgcagatcagaatccagctttttacaatagagcggaagcgaacctggctcagggcgattccggggcgggctaggcctgcgggtctctctgcctggtcccccggggcttttctgtcgcgcggaggcttcctgtcgcgggccctggtcccccctagcccccttccgggatgggcgagctcccgtcttcaagcccaagttaatgaccagggactttgaactttttggagatctgcaaagggctggcccctcggggacagtgacgccccccaccccctcccctgagcccggatcctggattaccccaagccaccgcccggcctccagccacctccctggctccggcgcggggcccttcctgggacccctcctctccccggtcccagccgggcggcgccgttggtacatcccggccggtccaggtggtagcgcccgcgcggctaccgtaattcccctacgtcccgcgccccagtttgcgctgagtcgactgagcccgtcccgcggctcccgtccccctctccccgcgcgccccatgaggctttggcagtctcggcccgagccttagagccttagacaccggggaggagaccctggtcctgttcctaggtgagtcgcggggaagtgggagctgcgctccggacggggggtgggactaggcgccaggacccccctaaaccgatggacagaacccggattcgagattcccacgtagtgccaggcctgtgggtgggtacagggtcctcaccagctgtatctccatttacgtgagggtggaatgggttcaagctcccgcccccatcacagtgtctctagggtgggtcggctcggagatagggccgtgaggagtctatgggaccctggccccggtatggggggtattggcggggcagggggatcctggaggggcccgggcgcgcggcgtggctgggaggctcagccgatcctccccatctggccagtcccggagtcggtcccaggcggaaaagccctctcgaggccggcagggggcgccagaggctgcgcctcgggcagtctgagcagacccaggcacccacttaggggtgggggatgcgggagacccgtgaatccggggaggccctggcctgccttggtggaagtctgggaaatggaggccaagaggtcccctgcagattccttagtaactcctcaagttgagggagctcgggggtattttaccattctcctgccctttagccggggtccgggcacacactaggacctggcagccatccccagatactgaattctatgccctcttggcacaggtgggcaaattgaggcccagtaggggaagggtgggggaacgtaggctccagaccaggtcttctgaagcccaggcaggtgccctctttcccccgctccctaccaaggaggcttctaagttgcaccggggaagggcttgctagtccaggtgctccgaagacacacgctggggtctggggctgggaactgcagaggctgggcaggaggggatgttcacagactgcagcccctccctctttctctagcactgggtcccagccttgggcatactagccaggaccgctccctggggaggaaggggccttcctggcttccagggcccgtgcggtgggcttagcctggggagaggttttctgtgtccctgccatctgcccggcacagggcagggccttaggtcaggctctgactccaggtgagcctcagaacccaaggggtgatgggtgaggcctgggcctaggggaaaggagggtgggtaggccgggtggagcgtagagagccgcctggcaaagccaccccgccctggctggcctgcccatgcatgcagtctccacccctggatttctaaggtgttgggtggggccttgggactagcaggctcccaggggagcttagccttggtgggaattcctggcaaggacatccctccagccagagagctcggactcctggttccaggcccgtctgctgtcggcagagcctggagctggccccagacctgcgtcctttcctggacagggaagtccctctcccacccagaccaggctggggccccagctcgttgtggggcagggatgcctgggggatccctggtttcccatctgcttttctggggctgggggaggtgatactgagggagaacagccgggtgcgggggtcctgccttggagactccattattcatcagcctccgcatctggtttctgggtatcagtttcaacaagccggccctgactcacaagcctggagctggggctgggctggggaggggctccctccccagggagttgggggccaggacttcttgggcctgcccctgagctgtttcagctccctgctgtggagaggaggtgggaatgcaggagcctgcccaggcccaccccactgccctggtacaggggctgggggctcctttctgctctgcactcttgcccctaaggaacagtcccccacccttgctgagtacccaggcagcagcctcactcagggatggccagggcccaggcactcaggtgacctctggtgatccgccctgacccagccctggtggtctccacttgatgcaacctggttaccccacaccggtgggctccccacaagctggctttgggatctgccgtgtcttcaggaaggcaatctccagggccctgttgcccaaaccaacattcagctgtcttcaggccccacgcctgccctgtgcctgaggcacccatttccctacgtagcagcagctggtgactttggggcaagtcagttgacacaggccttagtttctctatctgttaaatggggattgtaacagtatctcctcctaagagtctttgagaagagcgaatgggattcactgcctggaactcccacgatggggtggcacatggaatgctcagtgaaatgcagttatctgcctacaggacagtatgggggtggaggtctggggcaagaccacccgatttgaagtaggaactcacctgcccagggccagcaggcccaaggtcatggatactaggaggaggaagagaccttcggtctggcagtggggaaggctctgttgactgtcggccacaggaagggatatcctggccgagccctttcctgtccccatgtccttctgtggcatgaaggcccttctgccttcatctgttcactgatctcatccccaccaagcgcacctactgtgcaccaggactgttctaagtgccgaggacacagtgagatgcagacggccaaggcgctggcttctggagaggacagtctggtagggaagaatgatgataaaaaagtgaacaaagaaatgaattacaggtagtaataaacactaagaaggaaataatttaacttaaaggaattgagagtgggagggtaagggtggtttattttaagatgagggaaaaggacgtcttagaggtaacatttaagttggggcccggtgtcagctgtttcaagatagggtgcgtggaattccagacagaaaatacagaggagaaggccctgagcttggcgagctgtagggagagaaggaagaccggcaggtggaccctgtgcggaccagctgggagggaggcgggagcccggccatggtgggatttcactataagcaagatgggaagttttagttttcaaaactctgcctgttggccgggtgtggtggctcatgcctgtaatctcagcactttgggaggccaaggtgggggtggatcacttgagatcaggagttagtgaccagcctggtcaacatggcgaaaccccatctctactaaaatacaaaaagtagctgggtgtagtggcgggcgcctgtaatcccagctactggggaggctgaggcagaagaatcacttgaacctgggaggtggaggtcgtagtgagctgggatcatgccactgcactccaacgtgagtgacagagcaagattccgtctcaaaaacaaacaaacaaaaaacaaaaacacaactctgcctgtggtgtagacagtgggtgacctgggctttgggagtggagacagccctggaagtctcccagcctctaataaaacgctgctgccctcccaaagccatctcacggaccctggcccccttcccaccctctttccccatggaaccaggtggaggaggagcaattaggggtgggtgggctgatgacagacagcatggccacctcacccccatgggttctgaggagtgtcccaaggaggccatcccagaatcccagagccacagtctgagtttcagtcttgcctgtagacttttgtctctttatgtcactttatcccccacgccgtgaatggggctaatggtgcctgccctgccttcctgggaatcagtgtaaaagcgctttgacagccgtgtagtggtgactccagcaccagagtctgggcgtttgcgtcctctcaggctttgctgagtgccccctggcggtggggacctggcctagaactgcagggacctgggctgctgtgccatgtgggtcgccagggtttcctgatgcctccacctcacccagctcctgggggctgccaaggatagcctctcagagcagcccgccttctgcccacggccctttccagaggccaccggcctttggctctcggcctctgccgtacctgggcagtgagcagtcggtgtgagggggtgtccctggggctcaggctctcgggcaggggtctccaggttgatgggaggggctgagatgagagctggttgtgaggttggggtgggtgtgtgactggggctcaaagctggtgttggagcagagaggggtgtccctggggctagatggagagccggaccaaggaccctgaggggagtgtgccccatcctggcctcccccttctggtgcctgtattctaagagctcccttgctgggagtaagaaggggtcccctgggctgaggctccgaggcgggggtgggggtctccaggaggaagggaggagggaaggtacccttctggctgggagggaccgtgcgtgttggcgctgagggtgaggtggggaccacagcagagtgggcacccccagggctgggcggggatcgagtcacccaggggaggggctccacagtctccaaggtgggggggggtgtcaccagcgccccctgcctccagcattcaaggagctccccaggagaaagagcaagttctgaggagccctctgagcccggcattggtgttgaggagggagtcagagaagagaggggcccggggccgcgcagaggcgcagaggtgggggtaccccgggccaggcagaggtgggaaggtgggggtcccggggactgggcggaggcggggctgtgggggtcccccggccgggcagaggtaggggtgtggagtccccgggtctgggcagaggcggggaggcggggggtcgcccgggcaggcggaggcgggggtgtaggggttcccgggcggggaggcggggatccccggggctgggtggcgagggcccgggcgggagggaggtgtccgccttcctggggggctgggggctgttccgggcccggccctccccggggtccccgcgctcggcgggggcgggcgcggccgcacaatggcaggaagcggggctccgcgctttgtccggcgggcggcgcagaccgcggcttcctccggccgccatggggacaggacccggtgtctccggacgcctagcagcctccaggccgggcccggggctgcccctccgggactcggagccctcctgggccgggggtcgtgcccgcgacggtgatagccaggtacggggccgggacggggcgggaacggggctgggtgcccagttctcgcctgcagccgcccagtcctgtgcgggaggccagggagggggtgcccgtgactatgggccccgcggcccccaggggaaggatgcggcccatggcggccgagccccctacctgggcagctgcaccctggtgacggggacctcggactccggggtgtgtccccgccggctgagatgtccccgccaattcttggcgctttgtgtctggggccagctccggacacacctgtgggtcccgggccctatgctgggccgcccctctcctttccttcctctgccctggccctgcccacagcctcctcctaccccagaggcctctgtttctccttgtgcctctggccccagcccttgtgtgagggtggacgcctggttctctgtccccatcctcacatgcgtgtattccccaaagggcccccctctgttattttggctgcctggcgttagagggggtgggagctggctgttcccatgggtgggctctctcctcccttgggttgagacctgggaacattcccccccggaccctggtgtccctcctgcaggacagaggcaggacatggtgggcaggcaggcaggtgagggaggggcagttgggtctgagagaaggggctggagtctggcttcaagaaggggccattccgccctagtgctgggggagtcctgcctctggagggagctggggagactctggggtttgggggtgggacgtgaggcagaacggggagcagaaactgcaccagggagctctgcccaccccagcttctcagttgggctcatggttctcccggggggcttccagaacttcatcgtcaaccagatctgctcgacgaagtcggaaaccacctggttcagatcctggggctgagcctcactgtgcccccagtgcccctgagcctggggactgctgagaggagggaagcagatgaggtcagccgggcctgggcaccagcccctggcagcagctggaggagtcgagcagcctcagtgatggtagtggccacccagaccatcacagcagggaaactgatctcgaggctttcaagggatccagggtggggtgcgtcatagggctcagtccgtatttgttgaatactgactcttccgtaaggagcgaatcagggtatcaaatctgctgtctgtatattggattgatttaaaaacaagatggtggcacagagtcagacttggactggaagggtcccagagaccctcccagaactcctccgacctagcacggctccttccttgtcaccccctacctgcggtgagaccagggcttgggtcatgggcaggtctgccgccccagctggcactaggaaatctcaggaggcctggaagggattggagctgggagcctctgccatgctggctgggttcacagagggccagagggctgcggagcccgcagacggggggctcccaggaagaggggacaaggtggggcagggcccttccccagatcattctcatgaggagacacctgaagcttgggctcccagaagctgcaaagcctgatgtttctctcagcagtgcgctgtggattcagggtgagggtgtgggtagagccctggctgaggacagcttagtggtctctgtagtttttaaatttttttctgagacggggtctcactgtgtcgcccaggctggagtgcagcaatgtgatcatggctcactgcagcctcaacctcctgggctccagcaatcttcccacctcagcctcccaagtagctgggactacaagagagcgccaccacacccggctaattttgtttgttttttgtagaggcaggatctcactgtgtggcccgggctggagtttttgcactttgttttacgatagattaagacagaaaccagaaagagctgcaggggttgagggatcaatcccatcaccctcacttcaagccccacaagcacagttgaagatcactcctgaagggtgtagaagtgggggcacctggtgctcaaggctgccttcaggaatctgggtcatcctgtccccagccacctgcctggggcccagctccatgcagatcagcccctccctgagcacgtgggcctgcttggagtgccacctgccgactgccagtcctgtgccctgttccctttcctgtcagatggagacacggagggacacaagaaccaacagggcttgcatcaaactgagatagatttcctcctgtccccgtaatcccggctgacctgaggccagcctctcgctcctaagacacccatgagagggcgtgaatgtgggttaaaatctgggatccagtctgggtgccgtggctcacgcctgtaatcccagcacttggtgaggccgatgtgggtggatcacctgagggcaggtgttcaagaccagcctgaccaacaaggtgaaaccccgtctctactcaaaatccaaaaattacctgggtgtggtggcgtgtgcttgtagtcccagttacttgggaggctgaaacaggagaattgtctgaacccaggaggcggaggttgcagtgagccaagatcatgccactgctctccagcctgggcaacagagcgagactctatcgcaaaaaacataaataaatacataaataaataaataataatctgggatccagagccccacacacagtggcttcaagtcctagatccactggctgtgtgaccttagacaagtcatttcacctctctgagttttactttcctcttgtgtgaaacagggacaataacagcccttatcttatgggatgagatacacatgtaatgcccccagtgtggctccagacacatgacgaccacattaaaaacacactcagattcttcccggcctcctcctccctcctgtcactttctctgctatcctcaccacgcctatctcggaaatctctcatcgggctttcaccagccagaaactcttcagcgcctctctcctgccttaattcataaatgaaacaaggatttatggagcagctgggaccggaggtcaggcgctgaatcagacagagtaacatttctgtccttgcgaatgtgaccaggtgtggaggcagcagggtggaatatgtgacctgtcaggtgctggaaagtgctgaggacaggaaaggagcgtggagggcgaatgaggaggatgagaaggtgacttggggggaagctagcaggaggggagggaaggcagggagccatgcatttcaatatctggggaaaagcatctcagtccagggactggcagatgtcacagctcagaggtgggagctgccctgagggagtgtgtcccggaacgaccaggaggccagtgggtgaggggagtgagccaggatggaagagcaggacaggaggtccctgaatggggtggccttaaccctaaaaaaaaaaaaagtcaatgtcataaaagactgaaaaccctaaccttaacccttttggcttttttttttttttaagataatgtcttccctgtagcccaggctggagtgcagtggcgcaatctcagctcactgcaacctctgcctcctgagttcaaacaattctcctgcctcagcctcctgagtagctgggactacaggcgtgtgccaccatgcccggctaagtttttgtgtttttagtagagacggggtttcaccatgttagccaggatggtcttgatctcctgaccttgtgatccgcctgcctcagcctcccaaagtgctggggattacaggcatgagccaccgcgcctggcctttttatttacttatatatttatttatttatttatttatttatttatttatttattttgagacggagttttgccccaggctggagtgcgatggcacaatctcggctcactgcaacctctgcctcccgtattcaagcgattctcctgcttcagcctcccgcgtagctgggattacaggcatgcgccaccatgcccagctaattttgtatttttagtagagacagggtttcttccatgttggtcaggctggtctcgaactcccaacctcaggtgacccgcccgcctcggcctcccaaagtgctgggattacaggcatagccactgctcctggccccttttggcttttattcagagtgagatgggaacccttggagggttttgagtagatacagtgggactcctctttgaacagggcccactctagctgcacatggacaacatattgtgggggatgggggtagcagtgaggccagttttgaggccattgttgtcatctagctaaaaggtggctgggcagtggcacgcttatgagctgtggctgggttgaggccacagatactaaaggtggagccagcgggattttcgggctgaccagatgggggcataacagagaatgtcaagagtgaccccaagctgatatggtggctcacacctgtaatcccagcactaattccagcactttgggaggctgaggcgggcggatcagttgagcccaggagttcgagaccaggctgtgcaacatggcgaaatcctatctctactaaaaattagctgggtatggtggtacatgcctgtagtcccagctacttgggacggtgaggcaggagaatcacttgaacccaggaggtagaggttgcagtgagccgagattgcggcactgcactccagattgggtgacagagtgagaccctgtctcaaaaaaaaaaaggaaatcccccaccttgcagccatcagaagaatcaaataattgatttaggttaaaatcatctatgtatgctaaagctcttaggaccgcaagctcacatcaccatgcctggctaatttttttttttttggagacaaagtctcgctctgtcactcaggctggagtgcagtggtgtgatctcggctcactgcaacctctgcccccggttcaagcaattctcctgcctcagcctcctgagtagctgggactacaggcgtacgctgccacgactggctaatttttttgtattttagtagagacggggtttcaccgtgttgcccaggctgctatcgaactcctgagctcaggcaatccacccgcctcggcctcccaaagtgctaggattacaggcatgagccaccgtgcctggcaattttttatatttttagtagagatggggttttgtcatgttggccaggctggtcttgaactcctgacctcaactgattgagtgagattactggggaacaagacatctcaaagtgccatgccacagattacttattaattataggggaaaaagggactctacaaggtacagaggtccccagaggatccagcattacaggcaaatagcaagaacacacagctctgtggtgtccccgcctgaacgctcagtttgaaactttctgaggaccaccagggagatccacattgaggagctctgtgcgaggctgctggctcgaagacttccaaaatgtcaaggtcagccaggcacagtggctcatgcctataatcccagctctttgggaggtcaaggcgggcagattgcttgagcccaggagttcaagactagcctgggcaacatagtgagatctgtcactactaaaaataaaaaagttagttgggcgtagtggcatgcacctagtattcccagctactaaggaggctaaggcaggaggattacttgagtccgggaggttgaggttgcagtgagctgatcatgccatactactccagcctgggctacagagcgagaccctgtcttgaagaaaaaaaaaaagtcaatgtaataaaagaccacaaaaaacaaggctgggcacggtggctcacgcgtgtaatcccagcactttgggaggccgaggtgggcggatcacgaggtcaggagatcgagaccatcctggctaacacggtgaaaccccatctctaccaaaaatacaaaaaattagccgggcgtggtggcgggcgcctgtagtcccagctactcaggaggctgaggcaggagaatggtgtgaaccgaggaggcggagcttgcagtgagtcgagatcgcgccactgcactccagcctgggcgacagagcgagactccgtctcaaaaaaaaaaaaaaaaaaaaaaggataaacagacataaccaaatgccacgtgtgaaacttgattagttcctatatgaggaagtatatctgtaagaacgttatttagacacttgggaaaatgtcaatatagactatatatcaaggttcagtttcccaagtgcgacaattctatggggttttgtaggaaaactgtctttgttcttaggcagcagcatgatttctgccccaggggaggggggtgccgagaagagaatgggagagaagcagatgtggtagatatcaacttggggagtccagagggcatgtggatgtcatgtgctattcttataatttttggtaggtttgaaatattttaaaacaagtctgggcgcggtggctcacgcctgtaatcccagcactttgggaggccgaggcaggcggatcacctgagaccaggagttcaataccaacctggccaacatggtgaaactccgtctctactaaaaatacaaaaattagtcgggcgtggtggattgtgcctgtaatctcagctacttgggaggctgaggcaggagaatcacttgaacccgggaggcggaggatgcagtgagctgagatcgtgccattgcactccagcctgggcaacagagcgagaccccttctcagaaaaatttaaaaaaataaaaagaaaagaaatattttaaaacaaaacttgggaaaaataaagagagtgggaggagagaactaggaagtcgtgaatactgatacctgtttacagagtttagctgtgaagggaaagaaagaaagtcagccgtagctggagggtgaggtgaggcctctgtaaaatggagaaataaggctgggcgtggcagctcatgcctgtaatgccagcattttgggagaccaaggtgggcggatcacttgaggccaggagtttgagaccagcctgggcaacatggtgaaaccccgtctctacaaaaaatacaaacactcgcctatggtggtgtgtgcttctagtccaagctactcgggaggctgaggctcgaggatcacgtgagtctgggaggtcaaggctgcagtgagccatgattgtgccactgcactccctgtctcaaagaaagaaagaaaaaaaaagatggagaagccgggcgcggtggctcacgcctgtaatcccagcactttgggaggcccaggcgggctgttcacgaggtcaggaattcgagaccagtctggccaacacagtgaaaccctgtctctactaaaaatacaaaaaaaaaattagctgggcatggtggtgtgcgcctgtaatcccagctactggggaggctgaggcaggagaattgcgtgaaaccaggaggcggaggttgcagtgagccgagatcaagccattgcactccagtctgggtgacagaatgagactctgtctcagaaaaagaaaaaaaagaaaaagatggagaaataaccacgtgttggtgtggcagtgggggaaatgatccagcagaggggaaacttgatgatgtgggagaggggggactgctggggggcgtctcctcaccctggatcgagagatggagggcagttcattctaagtccctgcagcgctgggccggggtcgagggatgtggtggatctcgtggacctcctgaaggcttctgtccccaccccaggtatgtcaccacgccgactgccagcagctgcaccgccgggggcccctcaacctctgcgaggcctgtgacagcaagttccacagcaccatgcattatgatgggcatgtccgcttcgaccttcccccacaaggtgagcacaggcgggagccgcagctcggcccccagagctcctgtgtcagtgtttcagtaactgtcggaaacgtgctagggcgtcataaggacaagtcgactgtaaataatgaaacccgagtatgttacggttccttttgttccaaatgttttttagcaagagagaaagtccatgagcgtgccccttccagaggcaggcctttctctatctggtgctgtgctctcactggttctcacctcccccagctgcttttgcccctggcctgtggcccacacagagaaggcccctttctttctagttctgcctatcctcagggcaggggacttctggacaagtcctgcaagccaggctgtgggcctagcagaggcagtgtggagtgggggtggccaggtcaggaggcacttggagcaggaaataagaaattcctcttgctgagcagggacccagctcaggcccaccatcaactgcctatggaggagtggctcgcaggcacccaggcctggtgagaaatgccaacccccgagtcctttcccagctgatcagaggaacaaaaggattcttctggttgggcacggtggctcatgtctggaatacaaaaaatacaaaaattagccaggtgtggtggcacacacttgtggtcccagctgctcggaggctgaggtggaaggatcgcttgaaccccgacaatggaggctccagtgagccctgatcgtgccactgcactccagcctgagcgacagagcaagaccctgtcttaaaaaacaataaacaaacaaaagactctctcccactgccagggccccttgggaattcaggtgtggtcacagcatgggggaggggaggcctggaagaaagagccatggactttggtcccttcctgtaataacctcagaggcaaggcttccttatccttattttatagaagggtaaactgaggccacaggtgagtttgtttttggggtggagcttcaccatgggtgtcatcccagggcctttgtgtccttttgggtctgtggggatagacagcaatgactaaggccaggcaaggtggctcacacctgtaatcccagccctttgggaggctgaggtgggtggatcacttcaggtcaggagtttgagaacagcctggccaacatgttgaaaccctgtcattactaaaaatacaaaaaaatgagccgggtgtggtggcacacgcctgcaatcccagctactcaagaggctgaagcatgagaattgcttgaacccaggaggtggaggttgcagtgagccgagatcatgccactgcactccagcctgggtgacagagtgagaccctatctcaaaacaaaaacaaaaaacaatgactgagcccctctcctcacagaactgaagggcccttgctacctttaatctgggggttccagggtaacaggctgtggtccctctggaggcagccatgctgcaggctaaggaggggcgggggaggcacaaccctctcctgctttctcccaaggctctgtgctggcccggaacgtgtccacccggtcatgcccgccgcgcaccagccccgcagtggacttggaggaggaggaggaggagagctctgtggatggcaaagggtaggtgagggatgagtgggcagagagatacctggagggccccacggctgggtctcagatcagacattcaggaccagatgctctggcgccttcctcaagtaaggctgatgggcagacctcttcccacgcctgtggctgtcctgactccgggaagaggccacccagcctgggccagcctccagggtgcttgggatcctagcccacaccagaccaggtaccgttcgatgtgactcccgtgttggccaccagagggcgcacagccctatgcgggcctggccgggttgaatccacgcgggttacctgtcacctggggtgagccaagggcggggaggccacaggcccactcgccgcccacgctggcgagggccacccacacctccagcctctgccctcctcgcttccctgcagggaccggaagagcacaggcctgaaactctccaagaagaaagcaaggaggagacacacggatgtgaggagccccccagagccggcagatgcgggttccctacagcctgcgcccttccccgagcctgggccttcctccgggatgggggtggggaggtctgcatcccagggtgcagaggtctgggagatcgctggggttccctttcttgctggggttcccatccgagaccggagggtggggagggtggggaggagggttgggaaggagggtgggaaggagggtggggaggagggttgggaaggagggtgggaaggagggtggggaggagggcgggaatgagggcggtgaggagaagctcacagcccccacccccaccatcctcccaggacccaagcaaggaatgcttcactctgaaatttgacctgaatgtggacattgagacagagatcgtcccagccatgaagaagaagtcactggggtagggcttgatggggctcagggtggaagtgggactgggagtaggggtggccccatgttgcaggctccgggtctctgcaggtgtgacgtgtgtgtctgtgtggtggcccgtgagcgagcgcatccctgcgtgggcagacccgtgctggtgtgcacgccagtgtgagggagtgcggtggggtctgtgtacttgtgcattttaatcatgtatgcaggagccaggcctgcgtgtgggcaggcgtgtgacaggtctgccgtggtatgcagatgcgcctgtgtgagcacctctgcgggcaggtgtctgtggacctgcgtgtgatcccatgcgggcttcccttttccgttgggaaggtgggggcagctggggctgtgggtggggcgggggctcgtgggggcggggcccaagctgaagcgactggccgcctggttctaacacacatgcctcctgtcctgggggcagggaggtgctgctgcctgtatttgaaaggaagggcattgcgctgggcaaagtggacatctacctggaccagtccaacacacccctgtccctcaccttcgaggcctacaggttcgggggacactaccttcgtgtcaaaggtgagaagcagcctgggccaaatggggccgctgggactggcggagcctcctggagatgggcgcccttcccaggctcaggttcccattggtcgtgggcctgagcagcctcattaccatacaggtgtctctgctggatgctgctgggggaggggagggtgctggcagggcggggctgtcgggggagggcaggcaggccttggtgtggatcctccggggagagaggaccggggaccccctcctccaccagaccagggtactgaggatctctcgtggcccccacatgcagccccagccaagcctggagatgagggcaaggtggagcagggcatgaaggactccaagtccctgagtttgccgattctgcggccagctgggaccgggccccccgccctggagcgtgtggacgcccagagccgccgggagagcctggacatcttggtgaggaggagggggtgtgtcaggggagggggtgggaaggggcccaggctgggcccacagcccctcctcagaggcagtcaccctgggtctctcactgccccatcttggggttttaattgtcccttctggaaaatggggttggctgggagagtaggggaccctctctctctggatctagccatagcccaaggtgagggcttgtatctgagactcttctagtgccaggggtcagggaacctgtgtgtgcatgtgtgtgtgagagcacttgtacctggggctacagaccacccagagctgtgttccagagtgcatctgagtgtgtaactctgtgcttcatgcttgaagctgggggactgggggatgatagtctgggcgtatctgtgtctggaccttccagtctccagatatgtctgggtcccaggagaggggacaccccagggtagagatgcagagaccctcctccatcccaggctggcctgaggccctggaaacccgccctggggtggggccatgggggctggcagggggtcccggccctgaccacccttccctgaccaggcccctggccgccgccgcaagaacatgtcggagttcctgggggaggcgagcatccccgggcaggagccccccacgccctccagctgctctctgcccagcggcagcagtggcagcaccaacactggcgacagctggaagaaccgggcggccagtcgcttcagcggctttttcagctccggccccagcaccagcgcctttggccgggtatgtggccccatctgcccagggtcaggcagctggctggccatgacccctgaccctgaccagggtatctttccaggaggtagacaagatggagcagctggagggcaagctgcacacctacagcctcttcgggctgcccaggctgccccgggggctgcgcttcgaccatgactcctgggaggaggagtacgatgaagacgaggatgaggacaatgcctgcctgaggctggaggacagctggcgggagctcattgatgggcatgaggtgagtgcgggccacagtgctgctccctccttgtcccgaaaggaggacagccctcgggaggacccagtgatcagatgttccatgggacgccccaaagaggccactgttaccattagcccactttggagacactgaggctagatgaaaatggtgtgctgcttggctgttttaatggcagaggagggcccagatcttgggtgtcttaactgtgattactcatgtggtgtcaagggtgaccctgctcctcttgggacctccatgtccccattgggaaaatgagagttgcatgcaggttgcttatcctccccggccaccctaaggtgctccaggcctcgtgaatgacccatcctgccctccctctagaagctgacccggcggcagtgccaccagcaggaggcggtgtgggagctgctgcacacggaggcctcctacatcaggaaactgcgggtgatcatcaacgtgagtaggggctgcgctggtccccgtggccaccctgcccccctctttctgacagccctcagctgagtctgagcctttgcagaaggagcaggtgcctggcaatgaggtgggggcaggaaagtcagacaagggctgcgcccagggaggaggtgcctcctagaggaacctgggagggggcttcgggcaggtttgtcaggttcagctgaattagcacaggtgaggcctcattctttcactttcgttcagtggctgtttcccaacacttgctgtgtgctgggtgcccagcaggccacgccctggacgggacagagtgagctggcagtgtagggatttcggctcagggaggggagcacctaccctgggcttggagcttcctggagggaggaagcaccctcagaggtgaaatctggaggctaagccagggcagaggtggagaagggaattccaggcatggcttcaaagccagtctcccccgagcttccctccaggagggaccagggcagtgtgacctcgggagggctatgaggactgggtctttcctcagggtctggactacccaggtgcgaaggccaaagggtacagccttcttatccgtggctgctgtggggcctcctggaacggggaaggggaaggagtggcaggggagcctgaggctgggtggggccctagggctgagacagcctcccgaccccagtcacaccatcccctgatcccacagctgttcctgtgctgcctcctgaacctgcaagagtcagggctgctgtgtgaggtgcgctgggattcgggggcggcggcgggtgaggtaccaggaaggagggcgggacctggacctggggcggggctaacctggcggaggggcgtggccaaccgcacctcccgccgcgcccaggtggaggcggagcgcctgttcagcaacatcccggagatcgcgcagctgcaccgcaggctgtgggctagcgtgatggcgccggtgctggagaaggcgcggcgcacgcgagcgctgctacagcccggggacttcctcaaaggcttcaagatggtacgggcggggccgggcgcaggcgggggcactgaggcagggctggggcgccgaaaagcctccacggcccgatccggtctgcccagcatccccaacctcccccaggcccgtaaccgcacttgaccccttgtggccaagggtgaggaattacgaggcggtcgcccgggtttgagcctccacctgaccatctacccctgatccctggccacgggtggtcactttggctgaggctcagtttcctcatcaggaaacagggatcataagcttgctgcccccttggggtggtcgcccaagtgcagtaaggaagcgcttgcgcagcgcctggcgcgggccggcccgcagggagcgcgcggtaaccggcgccgtggttgttctgccccgggccagttcggctcgctcttcaagccctacatccgctactgcatggaggaggagggctgcatggagtacatgcgcggcctgctgcgcgacaacgacctcttccgggcctacatcacggtgagggcgcgcgtgccgtgggcgggggcgcaggaggacgggaccctggacggggccgggtggggcggggcctgccctgagcccgcccccactcccccaccgcagtgggcggagaagcacccacagtgccagaggctgaagctgagcgacatgctggccaaaccccaccagcggctcaccaagtacccgctgctgctcaagtcggtgctgaggaagaccgaggagccgcgcgccaaggaggccgtcgtcgccatggtaaccctgatggccagcgggagccgtcccccctgcgcggctctctgctccgtcatgaccctggacctgaagctccctcacctgcccctagatcggctccgtggagcgcttcatccaccacgtgaacgcgtgcatgcggcagcggcaggagcggcagcggctggcggccgtggtgagccgcatcgacgcctacgaggtggtggaaagcagcagcgacgaagtggacaaggtgggcgtgtgtgtctgcgggggttgccggctgggagagaggaaggcccagctggcaggcaggggctgtgctgggcatctcactgaggatgcctagctgagatgggagtcagtctctggcctcccctacgttcacgccatccgtccccagctcctgaaggaatttctgcacctggacttgacagcgcccatccctggcgcctccccggaggagacgcggcagctgctgctggaggggagcctgaggatgaaggaggggaaggacagcaaggtgattccagggccaccccacccctgtgccctgcccttcctagggacctcctgggccccagtcactggttctcagctctgcagtcccttcggtggttactcaagaaccagtgaccttgtcatagtgaatgacagttctctgcctgccattcacaaatccagcagtagggtcctagcccttgaaggcaccagttgtgcccatttgttggtgccacatgggttcctggtgggagggcagccatattccacaagtgggccaggaaccccagagccttgctactgtgccatggccccttcaggcatggggcaggctgagagcttgcacacggtgacttcaaagtcaccagtcttctttttaatgtaaacttgtattgagataagtcatcaacgtacatctcagtgaaagagaatcatcttcctcttcattttaattttacttgaaggttcatggtgggaggagtgtttgacaaaaaccgagtgctcccaggggaggctggtgccacagtccctggccctgaccctgctggcctctctggccaccccccctcctgccactgcagatggatgtgtactgcttcctcttcacggatctgctgttggtgaccaaagcagtgaagaaggcagagaggaccagggtcatcaggccacccctgctcgtggacaagattgtgtgccgggagctacgggaccctggtaaggagccctggtcccctgttcctggtcaggggctgtgatgggtgggggccatcgtctctgctgacactgacttgggccttccctaaccagggtccttcctccttatctacctgaatgagtttcacagtgctgtaggggcctacacgttccaggccagtggccaggccttgtgccgtggctgggtggacaccatttacaatgcccaggtgagtgcagagtagtgagtgggtgggcaaggcagattagggagatgctggtcacaacccattctgtcccatgtaccccaaccttgcctgcagaaccagctgcaacagctgcgtgcacaggagcccccaggcagtcagcagcccctgcagagcctggaagaggaggaggatgagcaggaggaggaagaggaggaggaggaggaggaggaggaaggcgaggacagtggcacttcagctgccagctcccctaccatcatgcggaaaagcagcggcagccccgactctcagcactggtacgtctgctcatgaccacccagcaggtcaaaccaggacaagtactctagcccaggactcctgaaggcccagccacgctcccttcctcccaatggcctcttgtcatgaacactgtgggagcggggctctgtctcccccagagtccgggtggggagggcagacacctttccatgtgctgccagccctgatccattcgtggtagctgcctggggtgctgtgctgaggatccttagggcagatccagccttggcagggaagagtgctgggctcgctactgaggtctgttgtgggcactggagctggaagatctgccacacctgccacatgctgccatctctgagcctccagccccaggagggcagagggtataaaccaccgtgcattgcccagcctggggctgcctcaggccatctaggtttcatggcctgggctgactctgctcctggccccacagtgcctcagatggctccacggagaccctggccatggttgtggtagagcctggggacacgctgtcctcccccgagttcgacagcggtcctttcagctcccagtctgatgagacctctctcagcaccactgcctcatctgccacgcccaccagtgagctgctgcccctgggtccggtggacggccgctcctgctccatggactctgcctacggcaccctctccccaacctccttacaagactttgtggccccaggcccaatggcagagctagtgcctcgggccccagagtccccacgagttccttcccctccaccctcgccccgtctccgccgccgcacccctgtccagctgttgagctgcccgccccacctgctcaagtctaagtccgaggccagcctcctccagctgctggcaggggctggcacccatgggacaccctctgcccccagccgcagcctgtcagagctctgcctggctgttccagccccaggtattaggactcagggctcccctcaggaagctgggcccagctgggattgccgaggggcccctagccctggcagcggtcctgggctagtcggctgcctggccggggaacctgcaggctcccacaggaagaggtgtggagacctgccctcgggggcctctcccagggtccagcctgagcccccaccaggggtctctgcccagcacaggaagctgaccctggcccagctctaccgaatcaggaccaccctgctgcttaactccacgctcactgcctcgtgagtggcctggactggggtagggcaggtggctcagggcactggcatgggggcccactcatgcctgggagcatcgcatttggggagggtcatggcggagggagcctgaaccctgcccagtgtctgggcgcagggggctgtggtgggcagcagtgaaggggcctgaggagtgccgtggggaagagagggtgaccagagccactctgaatggcgtcagccaaagaaggactctgtcccctccccaccctgtagggaggtctgagcagagggaggcccccaagagtgccattgaccaagagacagcagacagcctgcctcctggggcgtgccggcacctgcttcagctactgcctcctgtatgcatgagccggatgctgggcaggatccctgcctacgcccgggcccgatttgcgctttgccggactggatggagtggaggaggcccaggccacagtaccaccccacctgcccaggcagcccctcgtcacctactccccgaagttaccagctcagctcgagtcttcagggctgggctcctaggctgcccatcctacttctaccctcactggcctccagtgggattcactcctgccctgcccccaccttcccagtcccacaggccacccctggcttgggctgggttctgtgaagttacgtatttattgagcttttggttcttttataaagacttgtctagactccactgggaagagtcctttgctttggggcccagtgactcggggcacttgagttcagggcggcctccttgtgttcctgtgctcctccacttgccacggatgggccacggatggagcttgccatgggaagcactgggaagtaatggggtgtggggtgccaccagaccaacacccccagacttccccaccttcagccaccatcagagcctctccccaggtgccccccggggattcagggctgaatctgcccagttcccacactcaggccagccctcttgggaaggtgggtcctccatgggggtcccttcaggaactttttttttttttttaatacagagtctcactctgtcacctaggttggagtgcagtggtgtgatgtcggctcactgcaacctctgcctcccgggttcaaacgattctcctgccccagccactctagtagctggaactgcaggtgtgcaccaccacgccgggctagtttttgtattttaagtagagacggcatttcaccatattggtcaggctggtctcgaactcctgaccccaagtgttccgcccgcctctgcctcccatagtgctagaattacaggcctgagctactgcgcttggccccttgcggtacttttggcccaacctcctccatggctggggacgcggaggccgagagagaagtcacttgccctggctctaccttgaagtggttctcagggttggggcgagagtcggggtggggaccgagatgcagctctatcctgtgcccctggtcgcagcaggcagcccagcgcttcgcgtgttctacttggcctgtccgctgccgcctaatgagctcaggtctaggccgagcagagggggcacctggtcggactcggttgggctcgggcggccccgcctccccccgcccgccaggcgggcccttctcgacggcgcggggcgggccctgcgggcgcggggctgaaggcggaaccacgacgggcagagagcacggagccgggaagcccctgggcgcccgtcggagggctatggagcagcggccgc

SEQ ID NO: 15737 - DNA, 39653 bp, Homo sapiens
atgtttctctactggaggaagcggggcacctacgagctggaggccctgcccggcgacctggccgagctggagctggggacggtggagcgtttctcgtggagctccaccctggacatcatcgaggacctcgggggtaggtgcgaacccacctcccgggaggactttcagcaggctctggcaccgggcctgcccagccagggcctgtagcccattcacacacacatgctgctgacagtcacttgctccacggtggtgtgggggccagagccactcctgagagctgccgctggtgcaggagaggacccggaaatgaggaccctgggggccagagggcaggcaagcagctgaggaggctgtccttcctccagggctggcctggctgggcagcgtgggccctgcactgggcttcaggcctggcctctgcctctgctctcaccccgcccgcaagatcaggccatggtgttttctcagggctgggtggtgtaatgagatgttctggaacattcacgttccaggtcccaggacgtgggtcatttctccttttgtccccattttacagatgaggaaacagaggtacagggagtttaagcccctgaagaggcaggatgagctctcggggacgctgagccccgtggcttgtgtttagaggggtgggacgttggactgctcctgggggtgagaggttggggagctgtgaatgggaataatgatgccttgggggtcactgggaggctgagagcactaatggggatgacacacagggagcttcaaacagcggtggcagaggcagggcgcacctgtgctggctgtcggatgcccattctgtccgctcagctcagctggtcggcaccgtaggctggtcggcatcgtgggctggtcggtactgtaggctggtcggcacagtgggctgaccggcactgtgggctggggacctagctctgtcagggagctttggtgcagtgacagaaacttgagtccggtccgcagaagctaccggagcgctgatctccagctcccagcactgtggaactgtctggggccggggcctgggcctgggttctcttctccattagcctcatcctcgggcccaggagctggcctcccccaggccacaagcccagggagcaggagcctgtcctggatgagtctccccaggctggcgtggtccttccctgagcccatccgtgaggccagaggcagggagagtgacggttcagcctgcggtccacattgggaggcaagagggagcccgcagaccatacagcgaagggttttgaaaagggaggtgtaggctgggcacggtggctcatgcctgtaatcccagcactttgggaggccgaggcaggcggatcacgaggtcagggaatcgagaccagcctgactaacacggtgaaaccccgtctctactaaaaacacaaaaaattagctgggcgtggtggcgggcgcctgtagtcccagttactccggaggctgaggcaggagaatggcgtgaacccgggaggtgtagtttgcagtgagccaagattgtgccactgcactccagcatgggtgacagagcgagactccatctcaaaaaaaaaaaaaaagaaaaaaaaagagagaagggaagtgctgctcccaggagagaggacgatgccgggtgggcatgaaggccaggcgtccctgcctgtgaccagccccccactgtggaggagggggaatgtggctgcttgtcaggagaggcaggtacagtgtcccacaggccccagcaactccaggccccatcgggacgtgcgcagaaggcagggagggcaggacatgagaggggcggcccagctgcccagctggtggaggcagtggggatgcgggaggcagcacgggatgtgggggtggggtgaggaggagtgtggcagctgatgttgggggggcaaatctcccctccaccctcagccgggcactgtcctggagtcggagggtgggatcgggggcaggctgctctatttcttcacccggcagcttcctgcctacctgaggcaggtacggtgctacaggacccaacagagccagagacttgacccaggtcgtttagccacccagccccaagccagcagggccagccaatgggagcctgtgtcccacctctcgcccccactcagactgtgctccccttggcagggtggggcaaagtggggctgctcgccgtctgcagaggcaggccctccctgggctctcttagttgttctgtacatctcagtcatcctgctggtccctccccttgggatgccctcacggctcagatgcaggaatcacatctatgaagctgcctgtctctcctgcctctggggcaggcggctcctgcttctggggtttcacagctctggggccccttgatcacactggccacagagctaacgtagagagggcatacccagtgccaagtgctctttatttttctctttaagacagggtaggccgggcacggtggcttatgcctgtaatcccagcactttgctaggccgaggcgggtggatcacctaaggtcaggacttcaagaccaacctggccagcatggtgaaaccatgtgtctactaaaaaatacaaaaaattagccaggcatggtggcaggcacctgtaatcccagctacttgggaggctgaggcaggagaatcacttgaacccgggaggcagaggttcagtgagccgagatcataccattgcactccatcctgggtgacaagagcaaaactccatctgaaaaaaaaaaaaaaaaaagacagggttgtcttgctctgttacccaggctggagtgcagtggcgagatcacagctcactgcatctgacctgaagcagcactcctgcctcagcctcccaagcagctgggactgcaggtgcacaccaccaggccctgctggttttttaatgtttttgtagagatggagtctctctatgttgcccaggctggtcttgagcatctggactaaaatgatccttctgcctccttggcttcccaaagtgttgggattatgggtataagccaccatgtccagcctcaaagctctttaaaactaggctcctggaatatccatgcccactctctgagtcaaggccattcttggaatcccctttatcctggtgaggtgtggcgaggcctttgagatcccaagtggtggcacccagatgcaccatgcacaccctcagcctgagcaccagaactgagacctgttcacccgtgtgtgcctgccccagctctccccggggccggcagagaggcgccggggggctgcacacagcggctgggtcacagcacgtgaacaggtctcatgcatgagctgaggcggtcgggtgggtgagcctgggcacacggctgtctgtgtgggctctgtcctctgtgccagccagaccctggccggggcccatgcagggtgggccgatgccagccctgcctgtgatgggggtgggactggcgcttggagtgtgactgtcgggaattgggatctcatagctatttctgcagccccgctcctgttccgcccttggtcactctcggttcctctgaggaacctctggaggaagcccacggggggcagatgggcaggcgcccgcagtagcctcagccggaggaagtggccggctggccccaggcctgtgtgcagagctgtgtggacagtttcttgggccccaggaaggaatcctgaatgtgtcctcccacctcttcttactgagctcgagcagtgtgggtgggtagggctgtgttcagctctccggtccccggggactacgccagcggtggttctgggctgtaggcagaagcagtgtcctggccaaggtccatgcccctccctgcagctgggtccctacttcactgacctgccccaaggtgccccatggcgctttgggaaggggatcagaaacacatttccttcccaggcctccagtgacgctccaaccagtgtcctgcatagggagtggcggatgtcctgggaccagcagccatttacccaggacatgcccctctggcgtttggccaggtttgggacaaatcttgcccttccccaggctgctgcggctaagaggtccagccccagcatggcctgcagcagctgcccaggcatggaccggcgcccaggagggtggggctcacgcgggaggggacattcaaggccacagctgcttcctgagaggggcagcctttgcatggccaggcctgtggttgggaggtcgtgggcagggagggcctgttttcttgagacagaagggttcatcggagtggagggttcacaggtgaggggctaccctggagaaaatgagaacgaggtggttttccatgcacttgtgtcagcctgggaccagtggggaaaggggacactcatgtcatgatggggggaccaattcacgttttccagacagctaattgtgtcaggccccatgggagcactgtagcctggcggttaggagcacaggcttggaggcttacacactcacagcctcgttactctcattacttgtgtgaccttgggcaaatctctctaccctccacgcctcagtttcctcatctgtaaaatggggacaatgatcattcctctacacagagttagatggtgaaacgacaccatctatggacagcagagttcccagcaggtggttggcaagtgagagctgtggtcattgtgtgtcgttcctgaagccgtctgatggggaagacaggtcggtgttggttcaaaggttcaagacagtgggagtccagcaaggacacgttcacctggaactgggatatgtgacaatagggaggccttcctgaaggcagcagccttcaatctgggccttgaagagtgggcaggatggcagcagacagcgatgggaggatgctgggggagggcaaaggaatagcaccaagaagggctgggctggggtcagaagctcagttgtgtccggcaagtagcggagtgaggggcctgcggtggggcgacggagtggcgtggactgtgggggctggaagcatttgtgctgatccgaggcagacacagctcgggagctggagccgtccagaacatgggtccagagctgccgggctcctctggtttgtcaagagaagccagaaatatggacttttatgtgaaatctcctgacttttcaaagttggcaaccaatttaaattcttccgaaaccctgttctcagccaaacaaaacatgtctgccggccgttctgcccgcgccccgaggcccagttctggtagagatcatgttcaggacaaagcccaagtggcctcctgcgactgagacagggtcgggggagaactggcgagtaggctcctctgcctggccaagggccctggtctccctgcgacgggaggtgggggagccaggagggcagctgggctgttgcgcacgtggggaggcagtgtctggcatgcagtggcgggagctcagggttccaggtccgcctagggacgagtggagtgcagggttccaggtctgcctcaaggggggtagttcatggttccaggtctggctaggggtggggggagttcagggttccaggtttgcttagcggagggggtagttcagggttctaggtctgcttaggggaggggggagttcaagattccaggtctgcctggaggggaggttcagggttccaggtttgcttagcggaggggggagttcagggttccaggtctgcttagggtcgggctgaggtcggggagcagacaccgcttaggctggtccacataagaggggttgctacgaagaggcagggctcccaagggaagcccggggcaggcagaggaggccgcccccctgccaccccgagagctgcccactctcacaaagctgccttctcctgccctgtctgctctggggtgatttccactgaggggctgctcccctttttcctgctccccaacaatcttggggcatcgtacctatttggactgactctcagtggactcaagtctccagggcccagtagtagtcctgcctgtgggctcctatcaggaaggggatcggaatcatgtttccttcccaggcctgtctcaattcatagtctcaggagagcaaatctgactggctgagccaggctatgtagatggctcaacaactataatctcagcactttaggaggccaaggcaggaggatcccttgaagccaggagttcgagaccagcctgggaaacatagtgagacctccgttgctataaaaaaattaaaaagttagccaggtatggtggtgtgcaccggtggtcccagctactcggtaggctgacgtgggaagatcacttgtgcccaggaggtcgaggctgcagtgagccctgatcacaacactgcactccagcctgggtaacagagcaagaccctgtctcaaaaaataaattttaaattaaattaaattaagaaaaacccagctatgtccagggtacgctatcacctgatacagtatgtcccccttaccaggcccaccctttcctcgaaggctgtagatggggataggtcacctgcaggagagctcatgacaggcctatggtggggactgcttgtcctgacctcacccccaagccccacaggccccactctgggccctgagagctaccagggtcctgatggatttttcttcgtgtctgcagtctccaggagagaggagctcgcctacgcaatgcaggaagttgcagctttagagcagagcccagagggagctacctcccaggggagccaggaccaggggatcaggagtgtagggtctagaaggcagggtgagcacctggagcctgctgagaccaggggtcagaggccggagagttcaggcaggtagaccccagtgccaggaagtaccaggcaaaggacaaggaattccagaacccaagtggcatagaggccacaggatagtcaggcccgatggtggctgtgacctgagcagtcatggggggatctagggagctggtgaggcagacccagtggcagaagacatggcccggagccttcagaatacggggctacaatccagaggccctggggcaaagggtgtgagaatccaaccccaggctcagagttttgagaacgcaggggcctggaaactttctgggcggacagcagatgttgtcctgctcagctggagaagtcccaggctggacgcatgggaaactcccacaaagctggctgagggctccaggtccccgtggaaacacagatggcagaggagggcctgctggagtcatggcagacaaaagccccgaaccccactccaccctcaagtcagcttcctcccagcaggcagggacctcgccacagtcctcacagggccgtctcttgcctcggctgcctccacctccagcctagaggcaggacaggcatcgctggccccttggatggctgagagcagagactcggagagggaaatgagcacagtgtgggggtgaggctgggctgggcctgaggatcctgagagttcccgtaggctgtgcactgaggaggcccagggccccgggcagctgcttccctctcagcctggaggcccccggggtgcctgtggcagcccctcctcgagagccccctccccagggtcatgcagatgtgctgccccccaaagggctaccctgcccaccaggccccctgtgagctccccaagtcttgtcagggtcaccagtgagtccccagcacccagcttagagcttggctcatggggatcctcagaggatctttagtgtgtttgctgaatgaatccagagagctcaggagacccgggatccgtgctactttgctgtgccaggagtccttggggcaggcaccagtttctggtcacctgtgagtcccagggccggacccagcccatgtaaggagtccatgcagggaggctccagctgagaggccttccagtgaaggggtcagggaagtccacccttagcctttgggagagggacccggccctgctggaagctgcatcttctatacctaggtcttgtcggcgcaatgcctcctggtgccagtgtgcagggtgggctgggggtccagaggcaggctcaggagcactgagcccccgcagactcttggccacctctgcgaggctgtttctgtagggcaaagggtttgctatctcctgatgccatttacataaactacaggaccgggcagacgaatcgatgtgttggaagtcagggcggcggtgcccttggggggaccggttggcacgagggaggtggcgggggctggggactgggtggggacgctctgcagctcggtctgggcacaggttattttgtgaaagtttcctgaaaatgtgttgagctgtgctcacaggacaggtgcacttctctgtccgcgtttgcacttcaataaagtttaaaactgaaccagcagaggacatgcagcaagagccgtggcaggcgagtctctcccggtgacagccctcaccctgcgcggggcagcctccgtgttgccatggaaactgacctcggagacagcgattccgggctggggtgggggctctgcgtggctcccggcctgcattcctgcggacaggcaccctccgcgtggatggcaccctccaggacagagccgtgcgcgcttcctgagccgccccggtgcccgccctccgggaggtggaggcagcctccggaccgcagcgcgcaggggccggggagccggggagggaggggtgacaccgtcggcgccgaggcccggccgcgctcctgtccccccgccccccgcccccgaggcggggccgccgcggctcctccccgcccacctgccccgcccgcctcccgtgcgagggtccggcggcggcggctctgcggcctcccagtccccggcgtccccggcgcccccgcccgccgcccgccccccgcgcggcacggggcctgctccatgggtgagtgcaggcggggacccggcggacgcggggcggggtcctggggggccgggccggctcctaacctcctccggggagggcccgctccaggcaagggggtgggcgccgaccgggcttcgggccgctcgtacccaaactcggcccccaagtcggggcctgcctcggcagcaccccgcttctcctccctccccccgcctctcgctggttgcgccgctctgcccccaccgcggtgcactccagcccccaggaagagaggcagcttggagggggccaaattcagggtcaaagatgagtcttggggaacgggggtcgccccagaccttcgggggctcctctgtctctaaagggagcgatgcagggcgtaaggttctcagggatctgggatcttggagccccttccccccagcagccctgccgggaccccctgggaagtctggggccccaaaaggtcactgagcgctcccccacttgtcccccagactagagggacagagggagagagcagcgtatttccaaagatgttttctccccgtggaatctggataatttccctgaggactgcaggagaaaagggctctgcaaacggattcccgtgcagataagttggcatttaaaagagaaagggacgctgacctcttttgaagggaggactgaggagatcaccccacccctcctccggttgggaggccagtggggcccaggggagcctgggtgccccgctgactgatgccctctgctcctcccctgcagacgaccagagccccgctgaaaagaagggactgcgctgtcagaaccccgcctgcatggacaaggggcgggcggccaaggtagggaggctggagagcctggggaccctcgggggcagaggggccagggctctaactgccctttctatcccagcaccagctatccacagagccctggcacgggcgcggctggctgggctgggttcaagtgtaggtggggccacagtgtgtctggtttaggaggcagagggcctgcccccagctcaggaacagtggagtcgggggacttctacaagaacaggggggtggagtaccccaaagccctttgctgcactgtggtcctagcagccattctgaggtgacaggagctgtagccttatgtcacggatgaggaaactgaggcttagccaggggaagtggtctcccacggtgctggtccagtgcccagatggcacccttcctgttgaactcagccactcttcaggcctgggcatgggtctgagatgctttgggacttggcgagtgtgaccatggccctggggatgacaaaaggaggaaggggccagttgatcctggagtgccagggcttgggagctgggagtggggcgaagtataaatcagggataaagggggcaggaaggaggataatagtactggctgggcgcttctgcctgtgatgtgctgggcttagtgccacccgctttctgtgccatatgcactgattgcggcagctctgcagggaaggcatcgtcaccccgttttccagatgaagacaccaaggttcagagaggtccagtgacttggccaaggcccacagctcatgagagatggagccggggtttggagccaggttttgcccctcccagcatgcatttacatgacaatagtgacaactgcgcaacttagcatctggcgcaggcaccaggactcactgactcctcctccggccttctgagatggtcctgtccttattctcatttacagatggggaaactgaggctcactcagggacagactgctaggaagtgggagagctgggatttgaacccagtacccaggtctgtgtcataccagggcccgtgttgtcttccatcatgtgtctcagcactgccagctgcaggaaatgtaaaatgccaccccccaccccccgctcccctcccgcacctccacccagacacacacacactcgttctgcacaggagggccgtggtgagggaacagggagaactgctatggggcggggcggggagggggcggcctccagttgccgtggtcaccaggcaggggggcggtgtgatgtcagatacaatctgctggcacggatggtgcctggcattgggctctggtgttggctggttgcctctttcccagatgggggctcctggcaacaaattggcctcagctccccccaatatacatcctgccagaggcctgcggagccccgaggcttttgcctgacctgaaggggcggctggggcaataaggcacactgtcccagcccctcctctgggcagctgctctcagggggggtcctcaagctgctcaggcaggggcaggggtgggatggcccagccttcatagaggtgaggcctgggagaagagagctggtctcagagtgggtatggtccctctgcagcctccagacctcacctccagccctggcctgcctggaacttggcacagctgacattggcatcagctgatgagggtcacccagcgtgcacggggagagtctgggccctgtcactactgggacgccctttgggacaaatggcacagactcactgtaggggcagaaatgcctgaattatcagaggcatagagagccagtcagggagggcatcctggaggagggggcctttaatggatgtgaaaacatggatagacagaacagaggcaagggcagtccaggaagggagaggcagtggtggagaggaggtgcggggcactcagatttggtaagagaaacaaagaataacattgtcgatgatgataataataaccactactggctgggtgtggttgctcatacctgcgatcccagcactgtgagaggctgaggcaggaggactgctttagcccaggagtttgaggccaacctgggcaatatagggagacctctctctactaaaattaaaaaaaaggcctggcgtggtggctcacacctgtaaccccagcactttgggaggccaaggcgggcagattgcctgagctcaggagttcgagaccagcctggccaacatggcgaaaccccatctctactataaatataaaaattagctgggcatggtggtgggtgcctgtaattccagctactcgggaggctgaggcaggagaattgcctgaacctgggaggcagaggttgcagtgaactgagatcatgccattgcactccagcctgggcaacaagagcaagactccgtctaaaaaaaaaaaaaaaaaaaaaaaaaaaaaattagccaggtgtggtggtgggtacctgtaattccagctactggggagggtgaggtgggaggatcatttgagcctgggacattgaggctgcagtgagccgtgattgtgccactgcactgcagcctgggcaacagagcaagaccctgtctcaaaaataacaggccaggcgcaggggctcatgcctgtaatcccagcactttgggaggccaaggtgggcagatcacttgaggtcaggagttcgagactagtctgggcaacatggtgaaaccccatctctaccaaaaatataaaaaataattagccggacatggtggcacacacctgtaatcccagctacttaggaggctgaggcagaagaatcgcttggaccctggagaaggaggttgcagtgagctgagatcacgcaattgcactccagcctgggcaacagagcgagactctgtctcaaaaaacacccaataataataataataacaattattgctgaccgaacatgtttacatgccaggcggggcgttaggccctcctgcttgtctcagtgaagcttcttgagaccctcaggagaacagcgttattcttatgaccacatgacttgtaaggaaacggaggcccagagaggtagaggaacttgcccacatcacacagcatgatcgtcagagcctggcctgcgtgaggcttgtctgatcaagagccctattcttactctccaggatgtgactagcgttttgaaggagatgacttcatttattcatttaccagaccagctctgagcatctgtcggtgccaggcccagttctaggcccaggagatctccagagaacaaaggggatgccctcctggaggtgacattctagctgtgctgggaggaaggaagggaagtgaccctggctggccaaacttccccccaggctgccctggcaaaggaccaatttcaggcagggctggacccttcggcttctgggcccacccttgatgttttatttgaggctctcctgggtgctggagcttctgagatgaatttgccatctgtcccctacctcctgcccctggagttcccactgggaggagggctaaccaggatgggcttcctggaggcaactggagtcctgaggattaaagaggtactgagatggaggacagctgagtgagcagggggggacattgggggctataaggggcaagcgaggccagggggcacagggagaaggggacgggaggagggggaggcaggctgcactaggagcacctgcatgtccagatgaggggtctggactgtgtgtcatggagaccccaggagagaaatggcccctccccaggatgaagatatgtagagcagtccacacctctgagctccaggatcaaacctacttttttccagctgtgcgaccctggggaagtcactacacttctctgaaccccaggttcctcatctggaaaataacccggcagcgaggattaaaagaggcccatatataacatgcttagcatagagcctagcacagcgtaggtgtgcaaggtgtcctgggagtgggggtaacaaagtcacctctagactttgggtgtgccctccgtacctgccctgggatctgagacctccccaggctccatcccagcttcttgcacacaggtggagctgtgagtttggggagatggagaaaggccgggagatcaaggcagactaatgatattgtgggttccccctgccctcctgtgaggtggccacgggacagtgtgtggactccccagctccttgctgggctccactgggcactgttcgaggtctagtcagggcgtcccaggtcacaagggggcatggaggaggacacttgtggccctgggccacaggggacattgggcaccacatgtgagggtgtttatcatggaggaggtagtgattccagcagccgccattgatccagcacgtactgtatgccaggccctgccttagcgcctggcacagaaacctcatctggccgcctcccccgctgcggtggggcctaccccatctccgtttcctagagagggccctgcagagtggcgaggtaaaatgacttgccaagcaaggcaagatcaggactcaaaccaggcctctctgtcagagcctcccatttcctcagaactctcaggaggaaagggaggtgaatttttctgcacagctcccaaaggccttgacagggaggtggggttcagcacactacaggaaagagtttccagcagctggagctatccccgaagtggaggtagtgagcaccccatcactagacatatgcaagaagagacagaaagggaagcgtagaggggattgcagtgtggagtggaggttggatgggaggacttcagagttcccttgcagcttaacaatggcctgtgaggtggcagggatgagtcagggtatgcgtgtgtggagggaggggtggtgagatgaagaccagggagaggaaagggtggacctgaggcccccatggagaagggacgggcaggatgtgagtaatgggagaggcaatcacctattctcctgggcaatgctttgggggtgagcagcggcagaccaggatgccccagggaatggccaggtttgggccatctctggaagtgactggtccccggagagaggtggtggggctatctgcagctgaagaaacgggcagggccagagaaacaatgcaaggggactcctgggttttggctaagtagttttgggggagcaggtgaagacgtggggatccctggcccagccaggagctgccctagtataggcccagccccaagggttgtgtggggcagtctggaggttttggcctgggaaggggtcgggggaaggctgtataaaaagcttgaaagtgcggaacaggttggtggacctgaactccacctcctcgagtgggccccctgtatccacacccttcccagtcctgagcccagagttattctaaactcccgctgctgggagaggggaactgggaaccactaaatggcagaacagcacccttttccggccatatcacctgggccagaaaaaaaaaaaagagggggcccagagaaaagcgggctgtttctggggcaccgcggaggccgcagatcagaatccagctttttacaatagagcggaagcgaacctggctcagggcgattccggggcgggctaggcctgcgggtctctctgcctggtcccccggggcttttctgtcgcgcggaggcttcctgtcgcgggccctggtcccccctagcccccttccgggatgggcgagctcccgtcttcaagcccaagttaatgaccagggactttgaactttttggagatctgcaaagggctggcccctcggggacagtgacgccccccaccccctcccctgagcccggatcctggattaccccaagccaccgcccggcctccagccacctccctggctccggcgcggggcccttcctgggacccctcctctccccggtcccagccgggcggcgccgttggtacatcccggccggtccaggtggtagcgcccgcgcggctaccgtaattcccctacgtcccgcgccccagtttgcgctgagtcgactgagcccgtcccgcggctcccgtccccctctccccgcgcgccccatgaggctttggcagtctcggcccgagccttagagccttagacaccggggaggagaccctggtcctgttcctaggtgagtcgcggggaagtgggagctgcgctccggacggggggtgggactaggcgccaggacccccctaaaccgatggacagaacccggattcgagattcccacgtagtgccaggcctgtgggtgggtacagggtcctcaccagctgtatctccatttacgtgagggtggaatgggttcaagctcccgcccccatcacagtgtctctagggtgggtcggctcggagatagggccgtgaggagtctatgggaccctggccccggtatggggggtattggcggggcagggggatcctggaggggcccgggcgcgcggcgtggctgggaggctcagccgatcctccccatctggccagtcccggagtcggtcccaggcggaaaagccctctcgaggccggcagggggcgccagaggctgcgcctcgggcagtctgagcagacccaggcacccacttaggggtgggggatgcgggagacccgtgaatccggggaggccctggcctgccttggtggaagtctgggaaatggaggccaagaggtcccctgcagattccttagtaactcctcaagttgagggagctcgggggtattttaccattctcctgccctttagccggggtccgggcacacactaggacctggcagccatccccagatactgaattctatgccctcttggcacaggtgggcaaattgaggcccagtaggggaagggtgggggaacgtaggctccagaccaggtcttctgaagcccaggcaggtgccctctttcccccgctccctaccaaggaggcttctaagttgcaccggggaagggcttgctagtccaggtgctccgaagacacacgctggggtctggggctgggaactgcagaggctgggcaggaggggatgttcacagactgcagcccctccctctttctctagcactgggtcccagccttgggcatactagccaggaccgctccctggggaggaaggggccttcctggcttccagggcccgtgcggtgggcttagcctggggagaggttttctgtgtccctgccatctgcccggcacagggcagggccttaggtcaggctctgactccaggtgagcctcagaacccaaggggtgatgggtgaggcctgggcctaggggaaaggagggtgggtaggccgggtggagcgtagagagccgcctggcaaagccaccccgccctggctggcctgcccatgcatgcagtctccacccctggatttctaaggtgttgggtggggccttgggactagcaggctcccaggggagcttagccttggtgggaattcctggcaaggacatccctccagccagagagctcggactcctggttccaggcccgtctgctgtcggcagagcctggagctggccccagacctgcgtcctttcctggacagggaagtccctctcccacccagaccaggctggggccccagctcgttgtggggcagggatgcctgggggatccctggtttcccatctgcttttctggggctgggggaggtgatactgagggagaacagccgggtgcgggggtcctgccttggagactccattattcatcagcctccgcatctggtttctgggtatcagtttcaacaagccggccctgactcacaagcctggagctggggctgggctggggaggggctccctccccagggagttgggggccaggacttcttgggcctgcccctgagctgtttcagctccctgctgtggagaggaggtgggaatgcaggagcctgcccaggcccaccccactgccctggtacaggggctgggggctcctttctgctctgcactcttgcccctaaggaacagtcccccacccttgctgagtacccaggcagcagcctcactcagggatggccagggcccaggcactcaggtgacctctggtgatccgccctgacccagccctggtggtctccacttgatgcaacctggttaccccacaccggtgggctccccacaagctggctttgggatctgccgtgtcttcaggaaggcaatctccagggccctgttgcccaaaccaacattcagctgtcttcaggccccacgcctgccctgtgcctgaggcacccatttccctacgtagcagcagctggtgactttggggcaagtcagttgacacaggccttagtttctctatctgttaaatggggattgtaacagtatctcctcctaagagtctttgagaagagcgaatgggattcactgcctggaactcccacgatggggtggcacatggaatgctcagtgaaatgcagttatctgcctacaggacagtatgggggtggaggtctggggcaagaccacccgatttgaagtaggaactcacctgcccagggccagcaggcccaaggtcatggatactaggaggaggaagagaccttcggtctggcagtggggaaggctctgttgactgtcggccacaggaagggatatcctggccgagccctttcctgtccccatgtccttctgtggcatgaaggcccttctgccttcatctgttcactgatctcatccccaccaagcgcacctactgtgcaccaggactgttctaagtgccgaggacacagtgagatgcagacggccaaggcgctggcttctggagaggacagtctggtagggaagaatgatgataaaaaagtgaacaaagaaatgaattacaggtagtaataaacactaagaaggaaataatttaacttaaaggaattgagagtgggagggtaagggtggtttattttaagatgagggaaaaggacgtcttagaggtaacatttaagttggggcccggtgtcagctgtttcaagatagggtgcgtggaattccagacagaaaatacagaggagaaggccctgagcttggcgagctgtagggagagaaggaagaccggcaggtggaccctgtgcggaccagctgggagggaggcgggagcccggccatggtgggatttcactataagcaagatgggaagttttagttttcaaaactctgcctgttggccgggtgtggtggctcatgcctgtaatctcagcactttgggaggccaaggtgggggtggatcacttgagatcaggagttagtgaccagcctggtcaacatggcgaaaccccatctctactaaaatacaaaaagtagctgggtgtagtggcgggcgcctgtaatcccagctactggggaggctgaggcagaagaatcacttgaacctgggaggtggaggtcgtagtgagctgggatcatgccactgcactccaacgtgagtgacagagcaagattccgtctcaaaaacaaacaaacaaaaaacaaaaacacaactctgcctgtggtgtagacagtgggtgacctgggctttgggagtggagacagccctggaagtctcccagcctctaataaaacgctgctgccctcccaaagccatctcacggaccctggcccccttcccaccctctttccccatggaaccaggtggaggaggagcaattaggggtgggtgggctgatgacagacagcatggccacctcacccccatgggttctgaggagtgtcccaaggaggccatcccagaatcccagagccacagtctgagtttcagtcttgcctgtagacttttgtctctttatgtcactttatcccccacgccgtgaatggggctaatggtgcctgccctgccttcctgggaatcagtgtaaaagcgctttgacagccgtgtagtggtgactccagcaccagagtctgggcgtttgcgtcctctcaggctttgctgagtgccccctggcggtggggacctggcctagaactgcagggacctgggctgctgtgccatgtgggtcgccagggtttcctgatgcctccacctcacccagctcctgggggctgccaaggatagcctctcagagcagcccgccttctgcccacggccctttccagaggccaccggcctttggctctcggcctctgccgtacctgggcagtgagcagtcggtgtgagggggtgtccctggggctcaggctctcgggcaggggtctccaggttgatgggaggggctgagatgagagctggttgtgaggttggggtgggtgtgtgactggggctcaaagctggtgttggagcagagaggggtgtccctggggctagatggagagccggaccaaggaccctgaggggagtgtgccccatcctggcctcccccttctggtgcctgtattctaagagctcccttgctgggagtaagaaggggtcccctgggctgaggctccgaggcgggggtgggggtctccaggaggaagggaggagggaaggtacccttctggctgggagggaccgtgcgtgttggcgctgagggtgaggtggggaccacagcagagtgggcacccccagggctgggcggggatcgagtcacccaggggaggggctccacagtctccaaggtgggggggggtgtcaccagcgccccctgcctccagcattcaaggagctccccaggagaaagagcaagttctgaggagccctctgagcccggcattggtgttgaggagggagtcagagaagagaggggcccggggccgcgcagaggcgcagaggtgggggtaccccgggccaggcagaggtgggaaggtgggggtcccggggactgggcggaggcggggctgtgggggtcccccggccgggcagaggtaggggtgtggagtccccgggtctgggcagaggcggggaggcggggggtcgcccgggcaggcggaggcgggggtgtaggggttcccgggcggggaggcggggatccccggggctgggtggcgagggcccgggcgggagggaggtgtccgccttcctggggggctgggggctgttccgggcccggccctccccggggtccccgcgctcggcgggggcgggcgcggccgcacaatggcaggaagcggggctccgcgctttgtccggcgggcggcgcagaccgcggcttcctccggccgccatggggacaggacccggtgtctccggacgcctagcagcctccaggccgggcccggggctgcccctccgggactcggagccctcctgggccgggggtcgtgcccgcgacggtgatagccaggtacggggccgggacggggcgggaacggggctgggtgcccagttctcgcctgcagccgcccagtcctgtgcgggaggccagggagggggtgcccgtgactatgggccccgcggcccccaggggaaggatgcggcccatggcggccgagccccctacctgggcagctgcaccctggtgacggggacctcggactccggggtgtgtccccgccggctgagatgtccccgccaattcttggcgctttgtgtctggggccagctccggacacacctgtgggtcccgggccctatgctgggccgcccctctcctttccttcctctgccctggccctgcccacagcctcctcctaccccagaggcctctgtttctccttgtgcctctggccccagcccttgtgtgagggtggacgcctggttctctgtccccatcctcacatgcgtgtattccccaaagggcccccctctgttattttggctgcctggcgttagagggggtgggagctggctgttcccatgggtgggctctctcctcccttgggttgagacctgggaacattcccccccggaccctggtgtccctcctgcaggacagaggcaggacatggtgggcaggcaggcaggtgagggaggggcagttgggtctgagagaaggggctggagtctggcttcaagaaggggccattccgccctagtgctgggggagtcctgcctctggagggagctggggagactctggggtttgggggtgggacgtgaggcagaacggggagcagaaactgcaccagggagctctgcccaccccagcttctcagttgggctcatggttctcccggggggcttccagaacttcatcgtcaaccagatctgctcgacgaagtcggaaaccacctggttcagatcctggggctgagcctcactgtgcccccagtgcccctgagcctggggactgctgagaggagggaagcagatgaggtcagccgggcctgggcaccagcccctggcagcagctggaggagtcgagcagcctcagtgatggtagtggccacccagaccatcacagcagggaaactgatctcgaggctttcaagggatccagggtggggtgcgtcatagggctcagtccgtatttgttgaatactgactcttccgtaaggagcgaatcagggtatcaaatctgctgtctgtatattggattgatttaaaaacaagatggtggcacagagtcagacttggactggaagggtcccagagaccctcccagaactcctccgacctagcacggctccttccttgtcaccccctacctgcggtgagaccagggcttgggtcatgggcaggtctgccgccccagctggcactaggaaatctcaggaggcctggaagggattggagctgggagcctctgccatgctggctgggttcacagagggccagagggctgcggagcccgcagacggggggctcccaggaagaggggacaaggtggggcagggcccttccccagatcattctcatgaggagacacctgaagcttgggctcccagaagctgcaaagcctgatgtttctctcagcagtgcgctgtggattcagggtgagggtgtgggtagagccctggctgaggacagcttagtggtctctgtagtttttaaatttttttctgagacggggtctcactgtgtcgcccaggctggagtgcagcaatgtgatcatggctcactgcagcctcaacctcctgggctccagcaatcttcccacctcagcctcccaagtagctgggactacaagagagcgccaccacacccggctaattttgtttgttttttgtagaggcaggatctcactgtgtggcccgggctggagtttttgcactttgttttacgatagattaagacagaaaccagaaagagctgcaggggttgagggatcaatcccatcaccctcacttcaagccccacaagcacagttgaagatcactcctgaagggtgtagaagtgggggcacctggtgctcaaggctgccttcaggaatctgggtcatcctgtccccagccacctgcctggggcccagctccatgcagatcagcccctccctgagcacgtgggcctgcttggagtgccacctgccgactgccagtcctgtgccctgttccctttcctgtcagatggagacacggagggacacaagaaccaacagggcttgcatcaaactgagatagatttcctcctgtccccgtaatcccggctgacctgaggccagcctctcgctcctaagacacccatgagagggcgtgaatgtgggttaaaatctgggatccagtctgggtgccgtggctcacgcctgtaatcccagcacttggtgaggccgatgtgggtggatcacctgagggcaggtgttcaagaccagcctgaccaacaaggtgaaaccccgtctctactcaaaatccaaaaattacctgggtgtggtggcgtgtgcttgtagtcccagttacttgggaggctgaaacaggagaattgtctgaacccaggaggcggaggttgcagtgagccaagatcatgccactgctctccagcctgggcaacagagcgagactctatcgcaaaaaacataaataaatacataaataaataaataataatctgggatccagagccccacacacagtggcttcaagtcctagatccactggctgtgtgaccttagacaagtcatttcacctctctgagttttactttcctcttgtgtgaaacagggacaataacagcccttatcttatgggatgagatacacatgtaatgcccccagtgtggctccagacacatgacgaccacattaaaaacacactcagattcttcccggcctcctcctccctcctgtcactttctctgctatcctcaccacgcctatctcggaaatctctcatcgggctttcaccagccagaaactcttcagcgcctctctcctgccttaattcataaatgaaacaaggatttatggagcagctgggaccggaggtcaggcgctgaatcagacagagtaacatttctgtccttgcgaatgtgaccaggtgtggaggcagcagggtggaatatgtgacctgtcaggtgctggaaagtgctgaggacaggaaaggagcgtggagggcgaatgaggaggatgagaaggtgacttggggggaagctagcaggaggggagggaaggcagggagccatgcatttcaatatctggggaaaagcatctcagtccagggactggcagatgtcacagctcagaggtgggagctgccctgagggagtgtgtcccggaacgaccaggaggccagtgggtgaggggagtgagccaggatggaagagcaggacaggaggtccctgaatggggtggccttaaccctaaaaaaaaaaaaagtcaatgtcataaaagactgaaaaccctaaccttaacccttttggcttttttttttttttaagataatgtcttccctgtagcccaggctggagtgcagtggcgcaatctcagctcactgcaacctctgcctcctgagttcaaacaattctcctgcctcagcctcctgagtagctgggactacaggcgtgtgccaccatgcccggctaagtttttgtgtttttagtagagacggggtttcaccatgttagccaggatggtcttgatctcctgaccttgtgatccgcctgcctcagcctcccaaagtgctggggattacaggcatgagccaccgcgcctggcctttttatttacttatatatttatttatttatttatttatttatttatttatttattttgagacggagttttgccccaggctggagtgcgatggcacaatctcggctcactgcaacctctgcctcccgtattcaagcgattctcctgcttcagcctcccgcgtagctgggattacaggcatgcgccaccatgcccagctaattttgtatttttagtagagacagggtttcttccatgttggtcaggctggtctcgaactcccaacctcaggtgacccgcccgcctcggcctcccaaagtgctgggattacaggcatagccactgctcctggccccttttggcttttattcagagtgagatgggaacccttggagggttttgagtagatacagtgggactcctctttgaacagggcccactctagctgcacatggacaacatattgtgggggatgggggtagcagtgaggccagttttgaggccattgttgtcatctagctaaaaggtggctgggcagtggcacgcttatgagctgtggctgggttgaggccacagatactaaaggtggagccagcgggattttcgggctgaccagatgggggcataacagagaatgtcaagagtgaccccaagctgatatggtggctcacacctgtaatcccagcactaattccagcactttgggaggctgaggcgggcggatcagttgagcccaggagttcgagaccaggctgtgcaacatggcgaaatcctatctctactaaaaattagctgggtatggtggtacatgcctgtagtcccagctacttgggacggtgaggcaggagaatcacttgaacccaggaggtagaggttgcagtgagccgagattgcggcactgcactccagattgggtgacagagtgagaccctgtctcaaaaaaaaaaaggaaatcccccaccttgcagccatcagaagaatcaaataattgatttaggttaaaatcatctatgtatgctaaagctcttaggaccgcaagctcacatcaccatgcctggctaatttttttttttttggagacaaagtctcgctctgtcactcaggctggagtgcagtggtgtgatctcggctcactgcaacctctgcccccggttcaagcaattctcctgcctcagcctcctgagtagctgggactacaggcgtacgctgccacgactggctaatttttttgtattttagtagagacggggtttcaccgtgttgcccaggctgctatcgaactcctgagctcaggcaatccacccgcctcggcctcccaaagtgctaggattacaggcatgagccaccgtgcctggcaattttttatatttttagtagagatggggttttgtcatgttggccaggctggtcttgaactcctgacctcaactgattgagtgagattactggggaacaagacatctcaaagtgccatgccacagattacttattaattataggggaaaaagggactctacaaggtacagaggtccccagaggatccagcattacaggcaaatagcaagaacacacagctctgtggtgtccccgcctgaacgctcagtttgaaactttctgaggaccaccagggagatccacattgaggagctctgtgcgaggctgctggctcgaagacttccaaaatgtcaaggtcagccaggcacagtggctcatgcctataatcccagctctttgggaggtcaaggcgggcagattgcttgagcccaggagttcaagactagcctgggcaacatagtgagatctgtcactactaaaaataaaaaagttagttgggcgtagtggcatgcacctagtattcccagctactaaggaggctaaggcaggaggattacttgagtccgggaggttgaggttgcagtgagctgatcatgccatactactccagcctgggctacagagcgagaccctgtcttgaagaaaaaaaaaaagtcaatgtaataaaagaccacaaaaaacaaggctgggcacggtggctcacgcgtgtaatcccagcactttgggaggccgaggtgggcggatcacgaggtcaggagatcgagaccatcctggctaacacggtgaaaccccatctctaccaaaaatacaaaaaattagccgggcgtggtggcgggcgcctgtagtcccagctactcaggaggctgaggcaggagaatggtgtgaaccgaggaggcggagcttgcagtgagtcgagatcgcgccactgcactccagcctgggcgacagagcgagactccgtctcaaaaaaaaaaaaaaaaaaaaaaggataaacagacataaccaaatgccacgtgtgaaacttgattagttcctatatgaggaagtatatctgtaagaacgttatttagacacttgggaaaatgtcaatatagactatatatcaaggttcagtttcccaagtgcgacaattctatggggttttgtaggaaaactgtctttgttcttaggcagcagcatgatttctgccccaggggaggggggtgccgagaagagaatgggagagaagcagatgtggtagatatcaacttggggagtccagagggcatgtggatgtcatgtgctattcttataatttttggtaggtttgaaatattttaaaacaagtctgggcgcggtggctcacgcctgtaatcccagcactttgggaggccgaggcaggcggatcacctgagaccaggagttcaataccaacctggccaacatggtgaaactccgtctctactaaaaatacaaaaattagtcgggcgtggtggattgtgcctgtaatctcagctacttgggaggctgaggcaggagaatcacttgaacccgggaggcggaggatgcagtgagctgagatcgtgccattgcactccagcctgggcaacagagcgagaccccttctcagaaaaatttaaaaaaataaaaagaaaagaaatattttaaaacaaaacttgggaaaaataaagagagtgggaggagagaactaggaagtcgtgaatactgatacctgtttacagagtttagctgtgaagggaaagaaagaaagtcagccgtagctggagggtgaggtgaggcctctgtaaaatggagaaataaggctgggcgtggcagctcatgcctgtaatgccagcattttgggagaccaaggtgggcggatcacttgaggccaggagtttgagaccagcctgggcaacatggtgaaaccccgtctctacaaaaaatacaaacactcgcctatggtggtgtgtgcttctagtccaagctactcgggaggctgaggctcgaggatcacgtgagtctgggaggtcaaggctgcagtgagccatgattgtgccactgcactccctgtctcaaagaaagaaagaaaaaaaaagatggagaagccgggcgcggtggctcacgcctgtaatcccagcactttgggaggcccaggcgggctgttcacgaggtcaggaattcgagaccagtctggccaacacagtgaaaccctgtctctactaaaaatacaaaaaaaaaattagctgggcatggtggtgtgcgcctgtaatcccagctactggggaggctgaggcaggagaattgcgtgaaaccaggaggcggaggttgcagtgagccgagatcaagccattgcactccagtctgggtgacagaatgagactctgtctcagaaaaagaaaaaaaagaaaaagatggagaaataaccacgtgttggtgtggcagtgggggaaatgatccagcagaggggaaacttgatgatgtgggagaggggggactgctggggggcgtctcctcaccctggatcgagagatggagggcagttcattctaagtccctgcagcgctgggccggggtcgagggatgtggtggatctcgtggacctcctgaaggcttctgtccccaccccaggtatgtcaccacgccgactgccagcagctgcaccgccgggggcccctcaacctctgcgaggcctgtgacagcaagttccacagcaccatgcattatgatgggcatgtccgcttcgaccttcccccacaaggtgagcacaggcgggagccgcagctcggcccccagagctcctgtgtcagtgtttcagtaactgtcggaaacgtgctagggcgtcataaggacaagtcgactgtaaataatgaaacccgagtatgttacggttccttttgttccaaatgttttttagcaagagagaaagtccatgagcgtgccccttccagaggcaggcctttctctatctggtgctgtgctctcactggttctcacctcccccagctgcttttgcccctggcctgtggcccacacagagaaggcccctttctttctagttctgcctatcctcagggcaggggacttctggacaagtcctgcaagccaggctgtgggcctagcagaggcagtgtggagtgggggtggccaggtcaggaggcacttggagcaggaaataagaaattcctcttgctgagcagggacccagctcaggcccaccatcaactgcctatggaggagtggctcgcaggcacccaggcctggtgagaaatgccaacccccgagtcctttcccagctgatcagaggaacaaaaggattcttctggttgggcacggtggctcatgtctggaatacaaaaaatacaaaaattagccaggtgtggtggcacacacttgtggtcccagctgctcggaggctgaggtggaaggatcgcttgaaccccgacaatggaggctccagtgagccctgatcgtgccactgcactccagcctgagcgacagagcaagaccctgtcttaaaaaacaataaacaaacaaaagactctctcccactgccagggccccttgggaattcaggtgtggtcacagcatgggggaggggaggcctggaagaaagagccatggactttggtcccttcctgtaataacctcagaggcaaggcttccttatccttattttatagaagggtaaactgaggccacaggtgagtttgtttttggggtggagcttcaccatgggtgtcatcccagggcctttgtgtccttttgggtctgtggggatagacagcaatgactaaggccaggcaaggtggctcacacctgtaatcccagccctttgggaggctgaggtgggtggatcacttcaggtcaggagtttgagaacagcctggccaacatgttgaaaccctgtcattactaaaaatacaaaaaaatgagccgggtgtggtggcacacgcctgcaatcccagctactcaagaggctgaagcatgagaattgcttgaacccaggaggtggaggttgcagtgagccgagatcatgccactgcactccagcctgggtgacagagtgagaccctatctcaaaacaaaaacaaaaaacaatgactgagcccctctcctcacagaactgaagggcccttgctacctttaatctgggggttccagggtaacaggctgtggtccctctggaggcagccatgctgcaggctaaggaggggcgggggaggcacaaccctctcctgctttctcccaaggctctgtgctggcccggaacgtgtccacccggtcatgcccgccgcgcaccagccccgcagtggacttggaggaggaggaggaggagagctctgtggatggcaaagggtaggtgagggatgagtgggcagagagatacctggagggccccacggctgggtctcagatcagacattcaggaccagatgctctggcgccttcctcaagtaaggctgatgggcagacctcttcccacgcctgtggctgtcctgactccgggaagaggccacccagcctgggccagcctccagggtgcttgggatcctagcccacaccagaccaggtaccgttcgatgtgactcccgtgttggccaccagagggcgcacagccctatgcgggcctggccgggttgaatccacgcgggttacctgtcacctggggtgagccaagggcggggaggccacaggcccactcgccgcccacgctggcgagggccacccacacctccagcctctgccctcctcgcttccctgcagggaccggaagagcacaggcctgaaactctccaagaagaaagcaaggaggagacacacggatgtgaggagccccccagagccggcagatgcgggttccctacagcctgcgcccttccccgagcctgggccttcctccgggatgggggtggggaggtctgcatcccagggtgcagaggtctgggagatcgctggggttccctttcttgctggggttcccatccgagaccggagggtggggagggtggggaggagggttgggaaggagggtgggaaggagggtggggaggagggttgggaaggagggtgggaaggagggtggggaggagggcgggaatgagggcggtgaggagaagctcacagcccccacccccaccatcctcccaggacccaagcaaggaatgcttcactctgaaatttgacctgaatgtggacattgagacagagatcgtcccagccatgaagaagaagtcactggggtagggcttgatggggctcagggtggaagtgggactgggagtaggggtggccccatgttgcaggctccgggtctctgcaggtgtgacgtgtgtgtctgtgtggtggcccgtgagcgagcgcatccctgcgtgggcagacccgtgctggtgtgcacgccagtgtgagggagtgcggtggggtctgtgtacttgtgcattttaatcatgtatgcaggagccaggcctgcgtgtgggcaggcgtgtgacaggtctgccgtggtatgcagatgcgcctgtgtgagcacctctgcgggcaggtgtctgtggacctgcgtgtgatcccatgcgggcttcccttttccgttgggaaggtgggggcagctggggctgtgggtggggcgggggctcgtgggggcggggcccaagctgaagcgactggccgcctggttctaacacacatgcctcctgtcctgggggcagggaggtgctgctgcctgtatttgaaaggaagggcattgcgctgggcaaagtggacatctacctggaccagtccaacacacccctgtccctcaccttcgaggcctacaggttcgggggacactaccttcgtgtcaaaggtgagaagcagcctgggccaaatggggccgctgggactggcggagcctcctggagatgggcgcccttcccaggctcaggttcccattggtcgtgggcctgagcagcctcattaccatacaggtgtctctgctggatgctgctgggggaggggagggtgctggcagggcggggctgtcgggggagggcaggcaggccttggtgtggatcctccggggagagaggaccggggaccccctcctccaccagaccagggtactgaggatctctcgtggcccccacatgcagccccagccaagcctggagatgagggcaaggtggagcagggcatgaaggactccaagtccctgagtttgccgattctgcggccagctgggaccgggccccccgccctggagcgtgtggacgcccagagccgccgggagagcctggacatcttggtgaggaggagggggtgtgtcaggggagggggtgggaaggggcccaggctgggcccacagcccctcctcagaggcagtcaccctgggtctctcactgccccatcttggggttttaattgtcccttctggaaaatggggttggctgggagagtaggggaccctctctctctggatctagccatagcccaaggtgagggcttgtatctgagactcttctagtgccaggggtcagggaacctgtgtgtgcatgtgtgtgtgagagcacttgtacctggggctacagaccacccagagctgtgttccagagtgcatctgagtgtgtaactctgtgcttcatgcttgaagctgggggactgggggatgatagtctgggcgtatctgtgtctggaccttccagtctccagatatgtctgggtcccaggagaggggacaccccagggtagagatgcagagaccctcctccatcccaggctggcctgaggccctggaaacccgccctggggtggggccatgggggctggcagggggtcccggccctgaccacccttccctgaccaggcccctggccgccgccgcaagaacatgtcggagttcctgggggaggcgagcatccccgggcaggagccccccacgccctccagctgctctctgcccagcggcagcagtggcagcaccaacactggcgacagctggaagaaccgggcggccagtcgcttcagcggctttttcagctccggccccagcaccagcgcctttggccgggtatgtggccccatctgcccagggtcaggcagctggctggccatgacccctgaccctgaccagggtatctttccaggaggtagacaagatggagcagctggagggcaagctgcacacctacagcctcttcgggctgcccaggctgccccgggggctgcgcttcgaccatgactcctgggaggaggagtacgatgaagacgaggatgaggacaatgcctgcctgaggctggaggacagctggcgggagctcattgatgggcatgaggtgagtgcgggccacagtgctgctccctccttgtcccgaaaggaggacagccctcgggaggacccagtgatcagatgttccatgggacgccccaaagaggccactgttaccattagcccactttggagacactgaggctagatgaaaatggtgtgctgcttggctgttttaatggcagaggagggcccagatcttgggtgtcttaactgtgattactcatgtggtgtcaagggtgaccctgctcctcttgggacctccatgtccccattgggaaaatgagagttgcatgcaggttgcttatcctccccggccaccctaaggtgctccaggcctcgtgaatgacccatcctgccctccctctagaagctgacccggcggcagtgccaccagcaggaggcggtgtgggagctgctgcacacggaggcctcctacatcaggaaactgcgggtgatcatcaacgtgagtaggggctgcgctggtccccgtggccaccctgcccccctctttctgacagccctcagctgagtctgagcctttgcagaaggagcaggtgcctggcaatgaggtgggggcaggaaagtcagacaagggctgcgcccagggaggaggtgcctcctagaggaacctgggagggggcttcgggcaggtttgtcaggttcagctgaattagcacaggtgaggcctcattctttcactttcgttcagtggctgtttcccaacacttgctgtgtgctgggtgcccagcaggccacgccctggacgggacagagtgagctggcagtgtagggatttcggctcagggaggggagcacctaccctgggcttggagcttcctggagggaggaagcaccctcagaggtgaaatctggaggctaagccagggcagaggtggagaagggaattccaggcatggcttcaaagccagtctcccccgagcttccctccaggagggaccagggcagtgtgacctcgggagggctatgaggactgggtctttcctcagggtctggactacccaggtgcgaaggccaaagggtacagccttcttatccgtggctgctgtggggcctcctggaacggggaaggggaaggagtggcaggggagcctgaggctgggtggggccctagggctgagacagcctcccgaccccagtcacaccatcccctgatcccacagctgttcctgtgctgcctcctgaacctgcaagagtcagggctgctgtgtgaggtgcgctgggattcgggggcggcggcgggtgaggtaccaggaaggagggcgggacctggacctggggcggggctaacctggcggaggggcgtggccaaccgcacctcccgccgcgcccaggtggaggcggagcgcctgttcagcaacatcccggagatcgcgcagctgcaccgcaggctgtgggctagcgtgatggcgccggtgctggagaaggcgcggcgcacgcgagcgctgctacagcccggggacttcctcaaaggcttcaagatggtacgggcggggccgggcgcaggcgggggcactgaggcagggctggggcgccgaaaagcctccacggcccgatccggtctgcccagcatccccaacctcccccaggcccgtaaccgcacttgaccccttgtggccaagggtgaggaattacgaggcggtcgcccgggtttgagcctccacctgaccatctacccctgatccctggccacgggtggtcactttggctgaggctcagtttcctcatcaggaaacagggatcataagcttgctgcccccttggggtggtcgcccaagtgcagtaaggaagcgcttgcgcagcgcctggcgcgggccggcccgcagggagcgcgcggtaaccggcgccgtggttgttctgccccgggccagttcggctcgctcttcaagccctacatccgctactgcatggaggaggagggctgcatggagtacatgcgcggcctgctgcgcgacaacgacctcttccgggcctacatcacggtgagggcgcgcgtgccgtgggcgggggcgcaggaggacgggaccctggacggggccgggtggggcggggcctgccctgagcccgcccccactcccccaccgcagtgggcggagaagcacccacagtgccagaggctgaagctgagcgacatgctggccaaaccccaccagcggctcaccaagtacccgctgctgctcaagtcggtgctgaggaagaccgaggagccgcgcgccaaggaggccgtcgtcgccatggtaaccctgatggccagcgggagccgtcccccctgcgcggctctctgctccgtcatgaccctggacctgaagctccctcacctgcccctagatcggctccgtggagcgcttcatccaccacgtgaacgcgtgcatgcggcagcggcaggagcggcagcggctggcggccgtggtgagccgcatcgacgcctacgaggtggtggaaagcagcagcgacgaagtggacaaggtgggcgtgtgtgtctgcgggggttgccggctgggagagaggaaggcccagctggcaggcaggggctgtgctgggcatctcactgaggatgcctagctgagatgggagtcagtctctggcctcccctacgttcacgccatccgtccccagctcctgaaggaatttctgcacctggacttgacagcgcccatccctggcgcctccccggaggagacgcggcagctgctgctggaggggagcctgaggatgaaggaggggaaggacagcaaggtgattccagggccaccccacccctgtgccctgcccttcctagggacctcctgggccccagtcactggttctcagctctgcagtcccttcggtggttactcaagaaccagtgaccttgtcatagtgaatgacagttctctgcctgccattcacaaatccagcagtagggtcctagcccttgaaggcaccagttgtgcccatttgttggtgccacatgggttcctggtgggagggcagccatattccacaagtgggccaggaaccccagagccttgctactgtgccatggccccttcaggcatggggcaggctgagagcttgcacacggtgacttcaaagtcaccagtcttctttttaatgtaaacttgtattgagataagtcatcaacgtacatctcagtgaaagagaatcatcttcctcttcattttaattttacttgaaggttcatggtgggaggagtgtttgacaaaaaccgagtgctcccaggggaggctggtgccacagtccctggccctgaccctgctggcctctctggccaccccccctcctgccactgcagatggatgtgtactgcttcctcttcacggatctgctgttggtgaccaaagcagtgaagaaggcagagaggaccagggtcatcaggccacccctgctcgtggacaagattgtgtgccgggagctacgggaccctggtaaggagccctggtcccctgttcctggtcaggggctgtgatgggtgggggccatcgtctctgctgacactgacttgggccttccctaaccagggtccttcctccttatctacctgaatgagtttcacagtgctgtaggggcctacacgttccaggccagtggccaggccttgtgccgtggctgggtggacaccatttacaatgcccaggtgagtgcagagtagtgagtgggtgggcaaggcagattagggagatgctggtcacaacccattctgtcccatgtaccccaaccttgcctgcagaaccagctgcaacagctgcgtgcacaggagcccccaggcagtcagcagcccctgcagagcctggaagaggaggaggatgagcaggaggaggaagaggaggaggaggaggaggaggaggaaggcgaggacagtggcacttcagctgccagctcccctaccatcatgcggaaaagcagcggcagccccgactctcagcactggtacgtctgctcatgaccacccagcaggtcaaaccaggacaagtactctagcccaggactcctgaaggcccagccacgctcccttcctcccaatggcctcttgtcatgaacactgtgggagcggggctctgtctcccccagagtccgggtggggagggcagacacctttccatgtgctgccagccctgatccattcgtggtagctgcctggggtgctgtgctgaggatccttagggcagatccagccttggcagggaagagtgctgggctcgctactgaggtctgttgtgggcactggagctggaagatctgccacacctgccacatgctgccatctctgagcctccagccccaggagggcagagggtataaaccaccgtgcattgcccagcctggggctgcctcaggccatctaggtttcatggcctgggctgactctgctcctggccccacagtgcctcagatggctccacggagaccctggccatggttgtggtagagcctggggacacgctgtcctcccccgagttcgacagcggtcctttcagctcccagtctgatgagacctctctcagcaccactgcctcatctgccacgcccaccagtgagctgctgcccctgggtccggtggacggccgctcctgctccatggactctgcctacggcaccctctccccaacctccttacaagactttgtggccccaggcccaatggcagagctagtgcctcgggccccagagtccccacgagttccttcccctccaccctcgccccgtctccgccgccgcacccctgtccagctgttgagctgcccgccccacctgctcaagtctaagtccgaggccagcctcctccagctgctggcaggggctggcacccatgggacaccctctgcccccagccgcagcctgtcagagctctgcctggctgttccagccccaggtattaggactcagggctcccctcaggaagctgggcccagctgggattgccgaggggcccctagccctggcagcggtcctgggctagtcggctgcctggccggggaacctgcaggctcccacaggaagaggtgtggagacctgccctcgggggcctctcccagggtccagcctgagcccccaccaggggtctctgcccagcacaggaagctgaccctggcccagctctaccgaatcaggaccaccctgctgcttaactccacgctcactgcctcgtgagtggcctggactggggtagggcaggtggctcagggcactggcatgggggcccactcatgcctgggagcatcgcatttggggagggtcatggcggagggagcctgaaccctgcccagtgtctgggcgcagggggctgtggtgggcagcagtgaaggggcctgaggagtgccgtggggaagagagggtgaccagagccactctgaatggcgtcagccaaagaaggactctgtcccctccccaccctgtagggaggtctgagcagagggaggcccccaagagtgccattgaccaagagacagcagacagcctgcctcctggggcgtgccggcacctgcttcagctactgcctcctgtatgcatgagccggatgctgggcaggatccctgcctacgcccgggcccgatttgcgctttgccggactggatggagtggaggaggcccaggccacagtaccaccccacctgcccaggcagcccctcgtcacctactccccgaagttaccagctcagctcgagtcttcagggctgggctcctaggctgcccatcctacttctaccctcactggcctccagtgggattcactcctgccctgcccccaccttcccagtcccacaggccacccctggcttgggctgggttctgtgaagttacgtatttattgagcttttggttcttttataaagacttgtctagactccactgggaagagtcctttgctttggggcccagtgactcggggcacttgagttcagggcggcctccttgtgttcctgtgctcctccacttgccacggatgggccacggatggagcttgccatgggaagcactgggaagtaatggggtgtggggtgccaccagaccaacacccccagacttccccaccttcagccaccatcagagcctctccccaggtgccccccggggattcagggctgaatctgcccagttcccacactcaggccagccctcttgggaaggtgggtcctccatgggggtcccttcaggaactttttttttttttttaatacagagtctcactctgtcacctaggttggagtgcagtggtgtgatgtcggctcactgcaacctctgcctcccgggttcaaacgattctcctgccccagccactctagtagctggaactgcaggtgtgcaccaccacgccgggctagtttttgtattttaagtagagacggcatttcaccatattggtcaggctggtctcgaactcctgaccccaagtgttccgcccgcctctgcctcccatagtgctagaattacaggcctgagctactgcgcttggccccttgcggta

SEQ ID NO: 15738 - DNA, 63581 bp, Homo sapiens
gaagcagaggtggtagccaacggctccatgtctctgaggagcggcgggcggcggcgcgcggacccaggcgcggatggcgaggccagcaggtgaggggcgccctcctgaggctctcgggccggccctccggagggtgccatggggccgtcctcggctggcgccgccgaggcgggagggaggcccggttcccgcagccgcccgcactcgccgcgcctgactggggtagggcggcgcgccccgaccgccgacggaggggctcggggcgggcggaggcgctacgggcgcggcttctttgcggggaaacgaggcgggccgcgcggcctttccctgctcggctctttctgaggtttttcgggcctcgccttccgcgcagctgcgtttgggacctgccgcgcggcgggggcgatgagagcggcgggacccgggccaggccctgcggggtggacgcgcggctggggagggtgcggggaggggcggggccggggaccctgcctgggggcctagcgctgggggaggccgaggcgggcggatcgctggagcccaggatcctgttctagatcagcctgggctacagagagagacctcgtctcctctgttttatttttttgggcagggagtcccgctctgtcgcccaggctggagtgcagtggcgcgatctcggctcactgcaacctctgcttcccgggttcaagcgatcccgctgcctcagcctcccgagtagctggaattacaggcgcccgccaccaggcccggctagtttttgtatttttagtagagaccgggtttcaccatgttggccaggctggtctcgaactcctgacctcaggtgatccgcccgcctcggccttccaaagtgctgggattacagacgtgagactccgcgcccggcccttctcttgtaaaaacaagaaaaattagacaggctggtggtgcgcgcccgaggtcccagctattaatactcccgaatccgagccggaggttcacctgagcccggcaggtcaaggctgctgtgagccgggatcgcgccaccgcactccagcctgggcgacggagccagacccagtctcaaaaaaaatagagcaaggataagacgcggctgcttggtggccagagcaaacggtaaacatgaccggaggactggcctgccataagcagaaaacggatgaggcccggcgcggtggctcacacctgtaatcccagcactttgggaggccgaggcaggaggatcacctgaggtcaggagttcgagaccagcctgaccaacatggagaaatcccgtctccactaaaaaaatacaaaattagcggggcgtggtggcgcatgcctgtaatcccagctacgcaggaggctgaggcaggagaatcacttgaacgcggcaggcggaggttgcggtgaaccgagatcgcgccattgcactccaggctgggcaacaaagaatgaaactctgtctcaaaaaaaaaaaaatagaaaaaacgtgtgagaacgtgaagctttttacagacacttagctgaacaaaattcttcccagaggagaaaccaagtggtaaggatccctaactgctgttgtgctcatcgctgtctgtccatatcaggcaagccctagagaggcaggtacccttagggtctacatggtgtgttggaacttggagcttagagacggttactgactgccctgcttcaggacacaggactgcactcacgtgctccactccactgccctgccccaagctcagtgatggcctccaggcagggggaaggctgctgctgggataagtacaagtgatggcttttaccttacatgctttatgtgggttacctcatctcatccttaaaacagtcctgggaggtgagtgtgccccaggaggcagtgggtgctgtttgcctgcgtttcttcttgtgtgaaatggggacaccagtggcctccctcgtaggggttgtcatgaaaactgaatgagagcatatgtggagtactgggacggtgtgatacagtaaccagtcaatggtagctctctgtgaatgagagcctgtgtggagtactgggacagtgtgatacagtaaccagtcaatggtagctctctgtgaatgagagcctgtgtgtagtactgggacggtgtgatacagtaaccagtcaatggtagctctgtgaatgaaagcctgtgtggagtactgggacggtgtgatatagtaaccagtcaatggtagctctctgtgaatgagagcctgtgtggagtactgggacggtgtgatatagtaaccagtcaatggtagctctgtgaatgagagcctgtggagtactgggattgtgtgatacagtaaccagtcaatggtagctctctgtgaatgagagcctgtgtggagtactgggacggtgtgatacagtaaccagtcaatggtagctctctgtgaatgagagcctgtgtggagtactgggacggtgtgatatagtaaccagtcaatggtagctctctgtgaatgagagcctgtgtggagtactgggacggtgtgatatagtaaccagtcaatggtagctctgtgaatgagagcctgtgtggagtactgggacggtgtgatacagtaaccagtcaatggtagctctctgtgaatgagagcctgtgtggagtactgggacggtgtgatacagtaaccagtcaatggtagctctctgtgaatgagagcctgtgtggagtactgggacggtgtgatacagtaaccagtcaatggtagctctctgtgaatgagagcctgtgtggagtactgggacggtgtgatacagtaaccagtcaatggtagctctctgtgaatgagagcctgtgtggagtactgggacggtgtgatatagtaaccagtcaatggtagctctgtgaatgagagcctgtgtggagtactgggacggtgtgatatagtaaccagtcaatggtagctctgtgaatgagagcctgtgtggagtactgggacggtgtgatacagtaaccagtcaatggtagctctctgtgaatgagagcctgtgtggagtactgggacggtgtgatatagtaaccagtcaatggtagctctgtgaatgagagcctgtgtggagtactgggacggtgtgatacagtaaccagtcaatggtagctctctgtgaatgagagcctgtgtggagtactgggacggtgtgatacagtaaccagtcaatggtagctctctgtgaatgagagcctgtgtggagtactgggacggtgtgatacagtaaccagtcagtggtagctctctgtgaatgagagcctgtgtggagtactgggacggtgtgatacagtaaccagtcaatggtagctctctgtgaatgagagcctgtgtggagtactgggacggtgtgatatagtaaccagtcaatggtagctctctgtgaatgagagcctgtgtggagtactgggacggtgtgatatagtaaccagtcgatggtagctccctgtgtgacacttatccccatttttcagatttcttactgtccctggattaaaagtgagatacacagctcagagaaagcagttttgggaggaaatatggtcccagtgagcagttttctagtctacttaatccaacttacttgaggcaaggatatttggaggactggcatagagggccgtgcgcccctgttaagaggtgatgcctcgtaaatagcacttcattcactcttgattttgataaagatctgggactcagaactgaggctgttctctagcaagatttggaatatagtttttctgtgtttttgattacgggtgcattcaactatttaaaagattaaacctttattatacagtatggtggtgtatcagtttcctattgctgcagtaacacatgatcacttagtgactatataaatttattctcttacggttttagaagtcagaagtcgtaatatgaaagtgtctggttggttatatttattgtgatggttcccgggggagaatctgtttccttgctgcttcttcatcttcagaaccaagggttgcatctcctctcccccctaccctctctctcccatccctttctccttcctgactctagctctcctgcctcactctacaaggattcttgtgattacactgcgcccacccagctaagcagaatctcaaggcccttaatttagtcagatctgcaaagacccttttgtcttgtaagataacattcacaggtttgggggattaggatgtgggtctttcatggggggtgtcatcctgcctgcctaccacaagtggttataatctttcatgagaagtaaggatcctagtcttggaatatggtcattctgctcttgagttgaaggtgatccaaggaataccttcagacaaaggaagggtcttcctttctttttttatcttgttctttttttattttattttttttttagacggagtctcgctctgtcgcccaggctggagtgcagtggcatgatcccagctcactgcaagctctgcctcctggattcacgccattctcctgcctcagcctcccgagtagctgggactacaggcgcccgccaccacgcccggctaatttttcgtatttttagtagagacggggtttcaccatgttagccaggatggtctcaaactcctggcctcaagtcatccaccctccttggcctcccaaagtgctgggattacagttgtgagccactgcgcctggccctcaacctttttttgaggtaattgtagattgattctcatgcatttgtcagaaatgatacagagattcccgtatcacttcaccataacatcttgtgtaagtagagtacaattgtcacaactaagaaattgacattgagacgacccatctaatttattttatcttattttattttatttatttttttgagacgaagtttcactcttgtcacccaggctggagtgcagtggcgcaatcttggctcactgcaacctccacctctagggttcaagtgattctcctgcctcagcctcctgagtagctgggattataggcccaccccaccacacccagctaatttatttatttatttatttatttttatttatttttttttttttgccggagtctcgctctgctgcccaggctggagtgtggtggcgcgttctcggctcactgcaagctccacctcctgggttcacgccattctcctgcctcagcctcctgagtagctgggactataggcacccaccaccacgcctggctaagtttttgtatttttagtaaagacggggtttcactgtattagcaggatggtctagatctcctcacctcgtgatccgcccgcctcggcctcccacggtgctgggatttaattttttgtatttttagtagagacagggtttcaccatgctggccaggctggtctcaaactcctgacctcaggtgatccacccgccttggcctcccaaagttttgggattacaggcgtgagccactgtgcctggcctgacaatccgtctgttttattcaaatcatgtcagtgttacatgcactctcatgagccaccgcgtctggctagttttatgcatttttagtgtcccaagaggcaacagtgtctagccatcatgactctttttgttagtattctggttataaagttgaacaggttttgaagggcctgccctaattgtgtttttccaatgagtccttttatcttaatgagcctttttccaagctcggggtttttcaggaatatatataccctgtcatatccgaaacacttaacactaggtgggatgagggttgcagaagtaggtggcagtcggatcacaaggtcaggagatcgagaccatcctggctaacacggtgaaaccccgtctctactaaaaatacaaaaaattagccaggcgtggtggctgtcgcctgtggtcccagctactcgggaggctgaggcaggagaatggcgtgaacccgggaggcggagcttgcagtgagccgagatcacaccactgcactccagcctaggcgacagagcaagactccgtctcaaaaaaaaagaaaaaaaagaaaaaaagaagcagcagcaggtggcattacaaattaagcacggggttcccttctttcactcagggatgatggcgccacttcctcagtttcggcactcaagcgcctggaacggagtcagtggacggataagatggatttgcggtttggttttgagcggctgaaggagcctggtgagaagacaggctggctcattaacatgcatcctgtaagcactaggtccttctcccacccaggaatatggctgcaacccttctggtcatagcgtggtccttatctaaagagtgggggacacatgagggaactttgagtgaatcaggtgggagatgtgaaggttcccagctctcctttcctctttaacgtcattgagggccacagagaggccactgtgagaagccggaggtgatgggcatctcttttagccatcagaataaagctttcaaggattatgagggagaaattgagagagatccccatttggaggccgttacagtgtggttcttgtgaataaggctggtagtgttaatgtaggggtggagtaaagacctagatgagagggtttgtttctaaagtgctgagtttcccgaaaggtaggaggaaagtttctctaactgtgtagaggatggtcttgtgtctgtgttgactgattctcttgtagaccgagattttagatgaagataagcgcttaggcagtgcagtggattactactttattcaagatgacggaagcagatttaaggtaagcccctgactgcgacaagctaaaacccacttttatgggtgttcatgtagctctgtgactgtcagggagggcatgggaggcttccagtgcacagcagcccatagcccagcagaactcgggcccctggaggccccatcagtcatcacgtaagatgtcctgagagaggtcagttcaggaagactctgaatggtgagaagtagcgtgtctttcagattcttgcccctgtgaaaagtgcgcattctgacttcctgtatgctaccaaggtcaaggctaccctggccctaggctgttcatgggatataggagcaagcaatgtgttttcacttttctctcgctttcttctttctcatcacccctggatgggttggtgactcttaacaggtggctttgccctataaaccgtatttctacattgcgaccagaaaggtgagtgtgtttcatagactcaggtcagacgacctgtgtgtcattctgtggtgggctttgcaactgggaaataggcaaggaaggaaatgtattttaccaatggaaagccttttcattctgatcctgattagggttgtgagcgagaagtttcatcttttctctccaagaagtttcagggcaaaattgcaaaagtggagactgtccccaaagaggatctggacttggtgagtatcacccagactttccaggggtaaatgaggccagagtctacattgttcctggcaggtgggatcggaagaggtagaaattcaggtcatctgttgggtgatggggcggtgtggtgaccgtctataaaattccttccaaagagctctagtggtgttagttggtgccacgtgcagagttggacaaggtgccttgaagtcgccaactctttgacttgtgtgtttacctttgagtgtttaccctctcacccataaagtcctatttctcttgaaccaatgagcgtgatctcttcgcattatagccaaatcacttggtgggtttgaagcgaaattacatcaggctgtccttccacactgtggaggatcttgtcaaagtgaggaaggagatctcccctgccgtgaagaagaacagggagcaggatcacgccagcgacgcgtacacagctctgctttccaggtaaactttggtcttgtgagcaaagcatcagcggttcagaacgacaagatggataggagacaggaacacgtagcaacaaagttaccttaatggctggctctgtttgatacggaaaacttgagcaattaggtagagatttctgtatgttctgtgttaaataaacagtggcttcccaggttatattttatgtgttagctctcttttccaatggaggggtgggtttatggctctaaaattgagtggttgtaatagtaaagtcaccttagaggggaaaagatccctcatcctactgccctaacacaatccatctatgaatttcattaagtgctgagatttacacagcacatctccagagaaccttgggtatcgtccacagaaatttaagcctagaacactaaacactgttcttcaagtatttgagcatcaacaataataggatgcaaagtaaccagttaggaagagaaaatcttgagtaatgaagtttagatgacttcggaagaacctaccttaccctctgacaaaagaggatcagtttgggatgctgaacatttctacagtccctacccggagtccgccttccctggcaatgccacaagttgctttttgaaatattggaaggtgtgatcagagactgagtcctcagagacttgagccatatctgagactcgtctgtctttttccccctgaatagcccgttcagtatttgagcttataggccaatagtggccgcaatggtgggccacttctttagacatggcagagacccatgcacaggctgtgtgaagcccaggcctgctcttcagcctgcatgaggcagcctcctgagtatcaggaccatggtgggatggtcatgcctggctctcctgactggcagcacttaatgttttctttcttttttcttctatttacttatttgttttgagacagggtcttgctctgttgcccaggctggagtgcagtggtgcaatcatagctcactgtggcctcgaactcctgggctcaagcgatcctttcacctcagcctcctgagtaactgggatcacaggtgtgtaccccatgcctggctaattattattattattattattacttttgtagagatgagtctccctatgttgcccaggcctgtcttgaactcctgggccgaagcgatcctcctgcctcccagagtgctgggattagaggcataagccaccatgcttggccctctttttttttttctagttggggtgtaactcacatcatataaaatgaatacatcttacactgaattttctcctgtctgtagagttatcatccaagctattctttatttttttgagatggagtctcgctctgttgcccaggctggagtgcagtggcgcaatctgggttcactgcaacctccgcctcctgggttcaagtgattctcctgcctcagcctcccaggtatctggggttacagacatgcgccaccacgcctggctaatttttgtatttttagtagagatgaggtttcgtcgtgttggccaggctcgtctcgaactcctgacctcgggtgatccgccttccttggcctcccaaagtgctgggattacaggcgtgagctgccacgcctggcccagtccaagccattcttaaaggaaggactgccttggtcgttgaaaccacatcaatttaccttttgtgtttcctcggtttgaactctggtctcacctcttcctactgagttggaactctggtctcacctcctccagaccctggcagctgagttagttgctctcttgttaattcctagtgttctgcagaggggcggtgtcattactgatgaagaggaaacctctaagaagatagctgaccagttggacaacattgtggacatgcgcgagtacgatgttccctaccacatccgcctctccattgacctgaagatccacgtggtgagtggggcagggttgggtcgctgctcacatgaatttcctaacagccaggagatgatcattatgggtgaatccacagaagaatagactttcctggatgtagaactctagttagcacactgtgtgttttgcaggctcattggtacaatgtcagataccgaggaaatgcttttccggtagaaatcacccgccgagatgaccttgttgaacgacctgtaagttttgcttgtgttaccttcatcctaaaatttccagttttctggagagaatattcttcagtgctggagagtgaatctgactcaaagatatgtttgctgcttttcccccaaatactttattaaaggaaatatggagttagaatttttcatcagtttctgacagtatcatttccttttttgttgtatatcactgtatgacatcagtgtttgagctaggcaggatttggacactcgagggaaagctgggacttccgtttgggtagttgatagtgaagggacatggtgaaaaatggatttgtaactagaaggccttggttcaaacatgactttgtggtgttgggaaagtctttgtattcagttttctcttttccgaaatgaagatatcatctctgtgccacagttacctttcagagttgtcataaccaccagaatgaggtgatgtcttttgaagagtttttctcctaaagttctgtgattttaggcttgtcctgtgatcagctgctctcttaggtatgtcagttttcataccatagggagtcgtgatactcttgatgtaggttggttagtcttagggtccttctcccagctctagagccttttgactcttttaacaaccagagggaggtagagcaggctgggggtgggtgttcagggaggcctaatggggagtttagagcttggctttatgcttattttgtccccacaggaccctgtggttttggcatttgacattgagacgaccaaactgcccctcaagtttcctgatgctgagacagaccagattatgatgatttcctacatgatcgatggccaggtgagcaggtggcttctgggaagtaagctcctgggatggggaccttgtctggtccccatactacagcagcatctgccccactgttagtatttgttgagtgaataatgagttagtccaggaatgggagcaaccaagccgttccgacctccagctgtaccctcccctttcgagtgggaatccacacacagagcgtctcttctcaggaagcttaaagcactttcacattgctgtggacttctttgtagtgagaatctctaggcagagtgtgtgggcagggtgggaacgccatttcttggctttgcagcctctgacttgtgctgattgctaatgaacttggctagggctacctcatcaccaacagggagattgtttcagaagatattgaagattttgagttcacccccaagccagaatatgaaggccccttttgtgtcttcaatgaacccgatgaggtaaggaggtatcacttgggaaactacccggtattgtgggaagaacggacatgtggatctttccaaggcctcaggcattccgtcagatcagaattgcagctccatgagctttgttctcagggtatgaccgtcttttctgccagagacgggcggaggggcggggcaggaataagggccaacatgaggctgctgcttctgaactttgggagaggaatttggaatagcttgaagaagagaaagagcagacctctgactgctgtgacttgggttcaggctcatctgatccaaaggtggtttgaacacgtccaggagaccaaacccaccatcatggtcacctacaacggggacttttttgactggtgagtctgtgtcttctctatgagtaactgggcagcatttgagagggagggcgttgcgtggtgcaggggcgcttcccatgtcgacttaggaggtggctcctgggttcactctgcacctcccgtgtctgggttcctccctgggtctgagggaggaatggagaaaggggcattagagcctgacctgcccacttgcttgtctgtcctctttccaacccaggccatttgtggaggcccgggcagcagtccacggtctgagcatgcagcaggagataggcttccagaaggacagccagggggagtacaaggcgccccagtgcatccacatggactgcctcaggtaggggccacagagcagcatggctcctcactgctgtccgtgagcgagatctgaaggcctcttgcagactgtgctgtcaccacatctcatgggaggagggtggcctccgagaggccgtttcaggtcacccaagagtatggcagctgcaaccctgccagggcccgggatgtgctgtctttgactgttgactgacaattcatcagtgaccaggcacattgagcatcagcctctggggtggggaagccgctggaaagacgcactcagctgacaggtcccagacctaggacctcatggagctgctctgcccaggcaaggttgggatgtggcagcccggctgcctcacaggacaagcctcacgggacaaccacagattccatatgagctagggtgggaggcagctcagagcttcggagagtcacggcgttcgggggctctgacatgactggttgggaagacaggtggatgtggaaatgccaacagaaggaggctggaagggaaggaagggaagggagggaggaaaggagggaagggaaggaagggaagggagggagggaaggaagggaagggagggagggaaggaagggaatggaggggcctccacggcctctgtattctgcacagtgccactggggtgcttgcagcctgaatgcgtttctgtttagctctgatgctcagcacttggcttggagagggaggccaggaggctggggccggtttagcgtgtgacggtgtgacagtcctgatccaaggcagggagtgagggttgtgaggattcaggatctgtcatgtggggcagggggaggcccagggatgctggttcttagggaggggttggcacctggggtttttgtgccatccgtggagacagggaatgggtagagaaggggcttgaggcaggaggtgaccctgctaccgatatgctagcctggaagccccacccatatgggggccctgaagaccaccatgaggcttggtttgggctcgcactgtagattgggactcactgggttgcgggtgggtcttggtgaaagctggggtagtggatgaactgaaggcaagaggtaaagtgagagaagaaggccacagggtggaggctgcggggggtggagaccggacatgacccctggacagctgctccagggaatgcgtctgtagggaggaggtagagacaggttccgggtagagtgtggggggccttcttttcttaatttttattttttatttattttttaaatttttattcttcttggcatctgatcacatcttgccttctattaaaggagggtgggcttgagtgtttccgtgctgaagggacagtgtgaggagagaagatcagtgtggttgatagaactaggccccaggggtgcagacctgaggtctggggagaggcccaaggaggtggggcgcccgtcggagaggccacaaactctgctgaggatgggaggaaggcgagggccggaaggaccagtcctggtgcttccttgtgttgtggataggtctgtgagattaactagatcctgatgaagggttttcacaaggtgtctacaccatgtggggccttggtgtgaggctcctgggtgcctgttaggaacttgcatctgtctgtgtggtgcccagttttgccagttctcaggggttcccgggctgcatgttagaatcatcctggcttctgttctcattctccttccaggtgggtgaagagggacagttaccttcctgtgggcagtcataatctcaaggcggccgccaaggccaagctaggctatgatcccgtggagctagacccggaggacatgtgccggatggccacggagcagccccaggcacgtaagccacatcccggctgcccctgctgccgtgtgcacgcatccagatggccacggagcagccccaggcatgtgagccacatcccggctccccctgctgccgtgtgcacgcatgtatgccagcccgctccacccagcaggctgtgtctccgggacacacgtgttttgtcctgtgccggtctccttactgtgtgtgcggcaggctggtcaggccaggctttgctttctgtgcttcacacttgaccctgggctcttgatttttgatggccctgctctctggcgttctctcctcagactctggccacgtattctgtgtcagatgctgtcgccacttactacctgtacatgaagtacgtccacccattcatctttgctctgtgcaccattattcccatggagcccgacgaggtgagcattatctgtcctgtcggcaccctggcctcctcagcccttgccccattccaaatgcactggagctgaatggaggtggatgtcccaggagtgctggcaccagaggcggcagtagaattctggtgtgtgacgtcagggatgtcctttgggaattctctggccctggtgtgaggaagaaaccacaggaggcagaatttgcagccatttaccacgaggttttctctcctttcacactgaagttcagcttaggttcctggactttgcctgcaagtcagggcctttggtgttgcttttggctggaagccttggtttctcttgcaggtgctgcggaagggctctggcactctgtgtgaggccttgctgatggtgcaggccttccacgccaacatcatcttccccaacaagcaagagcaggagttcaataagctgacggacgacggacacgtgctggactctgagacctacgtcgggggccacgtggaggccctcgagtctggggttttccgcagcgatatcccttgccggtttaggatggtgtgcttcttccctgggattcagattcttcccactcttgtgctgtggtaggacccagaagctgcaggggctgaaataaagccccttctccccatcctgtcccacggcccctcaccgggtgtggcttctctggcccagcaccccccgggggcttctttagggcagtgcactgcagattgtgcacatgagtccttccggagctttctcgggcacaacctgccacgtgcagccacagcgtcaaacctgaggcaggctagtgtgggtgtgtttcccctctgaccccgtcgtctcactgttgtgctagaatcctgccgcctttgacttcctgctgcagcgggttgagaagaccttgcgccacgcccttgaggaagaggagaaagtgcctgtggagcaagtcaccaactttgaagaggtaaccatcagggaggcaggaagagccagtctgtgtttggcgccttcttcacagaccacgtctttcagcagcacgtttattgtgcacctgctgcgtgtggtgctgtggacggatgacacagggtctctggtgggacagggcagtcatggttgtgacgtgtgatgctgtcacaaggtcggagggcttcatgagaggtggggtgtgagctgctcctgaaatgcagtaacatggaaggtgggtcctggtgggatgtatcccgtgtcctgttttaaagcattaggactttattttataggcactggggagccattggaggttttaaattttatttactttttgttgttgagacttaaaaatgacagtaaattcctacaaatgacaggattagtgactgtaaaatctgtttacataatggttagaaagcacacttacaaagtgtgttatgtgactggagagggagacaccagttcttctctgatccctgttcctcaggacatggcacatctcaggtcttttttttttttttttttttttttccctttttgagatggagtctcgctgttgttggcctgggctggagtgcaatggcatgagtttggctcactgcaacctctgcctcccgggttcaagcaattctcctgcctcaggctccccagtagctgggattacaggcatccgccaccacacctggctagtttttgtatttttagtagagacagggtttcaccatgttgtccagtctgatcttgaactcctgaccttgtgatccgcctgccttggcctcccaaagtgctgggattacaggtgtgaggcaccgcgcctggcctatctcaggtctttatgtcaggcactgtgcagcactacatcatgttcagtgaggttgctggtttagagtttttaacagttttcacattgatgccaagaaactttttttttttttttttttttttttgagacggagtcttgctctgtcacccacactggagtgcaatggcatgatctcggcttactgcaacctttgcctcctgggttcaagcgattctcctgtctcagcctcctgagtagctgggattacaggtgcccaccaccatgcctggccaatttttgtatttttagtagagatgaggtttcaccacgttggccaggctgctttcgaactcctgactgtaagtgatctgcccacctcagcctcccaaagtgctgggattacaggtgtgagccactgtgcctgccctcaagaaacatcttgtaatagattcactagtcaaaatttaaacaagaatatgtgtacactcttggcaagctgtgaagcactgtttggctattgtcagccacatccattattatacttcagggaactcttatgaaccgatcaggaagagagccttgtctgaataacaaataggagttaaagaatgtcggccatggccgggcacggtggctcacgcctgtaattccagcactttgggaggccgaggtggatcacgaggtcaggagattgagaccatcctggctaacacggtgaaaccccgtctctactaaaaaaatataaaaaaattagccgggcgtggtggcgggcacctgtagtcccagctactcgggaggctgaggcaggagaatagcaagaacccgggaggcggagcttgcagtgagccgagatcgctccactacactccagcctgggcagcctggaatcccagcattttgggaggctgaggcgggtggatcacctgaggtcaggagtttgagaccagcctggccaacatggagaaaccccgtctctactaaaaatacaaaaaaaaattacccaggcgtggtggcgagacgtctcagaatctgagacagagtttcactcttgttgcccaggctggagtgcaatggcatgatctcggctcaccacaacctctgcctcctgggttcaagagattctcctgcctcagcctcctgagtagctgggataacaggcgcttgccaccacgcctgggtaattttttttttgtatttttagtagagacagggtttctccatgttggccaggctggtctcgaactcccgacctcagctgatctgcccgcttggcctcccaaagtgctgggattacaggcgtgagccaccgcgcccgacctagaagcagatatttaaagtctttaagaaacagtgagatgggcaggtagagtgaggctggaggtgtggtagatgtgaggatgccaggctccctggtgagtgaggaagagagctctgtagatgtgaggacgccaggctccctggtgagtgaggaagggagctctgtagatgacattgtcctgttagcgattcctaagtcctcgcaagtgcccttgaaagggaagcccaggatcgcctttgtgtccctgaagggtcacctgttgggcggagggtggctggggggatgtcagcaggggctcacagccacgtggggcatgtccaggtggtgtccccaccatggaaacttggccattcacttgtcccagcccatcctccccttcttgactggacagcctttcagaacacgccgttactgggcagagaagggtgcagtggaggctcttccccggctgattcgtttatctgtaattcaagtagaaacaataggtgttactgttgtggtatttcctgttctatggaatagatgttattccttgtaatcacttttttcttaaaattttaggtgtgttttctatttttactactttggagggttttaaggatttttctttttctttttttttttctgaaacaggatctggctctgttgcccaggctggagtgcagtggtgcaatctgggctcactacagccttgacctcacgggctcaagcgattcttccaccccagcgttccgagtagctgggactacaggtgccaccgccacacacggctaattttttattttttatagagacgggggtcccactgtgttgctcaggctggtctcgaactcctgggctcaagtgatcctctggcctcggtctccgaaagtgctaggattacaagcatgaaccactgcacctggcctaaggattttttttaatactaaggagagtttagtgttcaagtaattttctaatgactccaccaaatttaatgtatttcatagaaatgatggcaacccttcttaacttttttcttctggctagtttttgctctatttatatatttttcagctttttcctctcctgaatgtctaaaaggggttggtgaactgcacacgaggcaagcttggtcaccagcctctactgagtttcgctttctctgcaggtgtgtgatgagattaagagcaagcttgcctccctgaaggacgttcccagccgcatcgagtgtccactcatctaccacctggacgtgggggccatgtaccccaacatcatcctgaccaaccgcctgcaggtgagactttacttcccgtgtcagagtcggagctctctctgcccagccctaagtgctttctcacccctcccagccctctgccatggtggacgaagccacctgtgctgcctgtgacttcaataagcctggagcaaactgccagcggaagatggcctggcagtggaggggcgagttcagtgagtgtcggccgcctgggtgggcactcggtgggaaacgggtgggtgagtgtcggccgcctttctccacttggtgggaagccggtgtgtctgtgcctccttttgaacttgcccccattgcctccttcccagtgccagccagtcgcagcgaataccatcggatccagcaccagctggagtcagagaagttcccccccttgttcccagaggggccagctcgggcctttcatgaactgtcccgcgaggaacaggcgaaatacgagaagagaaggctggcgggtgagtgcctgggcatggtcacggctgtaaagatgtggctcctgctcccactttctgttcttactgggctgcgttggtccatcccagctggggccccagaggtgttgtcacagcagaccagaagctgctctaggtcactgtaagctgtgctctcactgcagggtcctttatttgcttccccatctgcaagtgttagacactgctgctctgtggtcttggggtatttggcctgttcctacccctgggctgtcctatttctttctttttttttttgaaatgaggtctcactctgtcacccaggctggaatgcagtggtgtgatcttggctcactgcagcctcaacctcccaggcaccggcaatcctcccatctcagcctcctaagtagctgggactacaggtgtgcgccaccatgcctagctaattttttgtattttttgtagagatggggtcttgccatgttgcctaggctggtctcaaactcctgggctcaagtgatccgcctgcctcggcctcccaaagtgctgggattacaggtgtgagccaccgtgcccgcccacctttttcggtatgagaaactagcagtgtatctgagctgttgctcctttgtggtgacgtagaagccatgttcttcagcacccctgtgccctggctccctctgctctgggagatctcacccacctgctctgcccatctccgtcgtgcttagattactgccggaaagcctacaagaagatccacatcaccaaggtggaagagcgtctcaccaccatctgccagcgggaaaactccttctacgtggacaccgtgcgtgccttccgggacaggcgttacgagttcaaagggctccacaaggtgagctctgaggggctgcaagctttggcctctgtgagggcagtttcagtcggctcatgaagtgggcactcttggctccttgcctgggatcctctgagcaggcacttgcactcggatggtaacgtgcaattgtttttgacttggaagagttgatggccacgaaggatgcagaccatcatccaccctggtctgaggcctcagaaggaccctaaaggatgatttctaaagtgattatttagagcaggggtcagcaagctacagctggctggccgtttgagtacatcaagttttacgaacccaactgccttcgcctattgtttatctctttcccgctgtcatgggaggtgaggagttcctagaaactctaaggccttctcatctatggtattcaccatccggcccctcgtgtttaactgacgtatttcatccggtaggaacatggaaaatgcatagcaacacctctgttttgataccaacgggtcattattttatatctgatcagattgagccattttttttctgagagaccttcactgtagactcagcacggcccctgctgtgcggccccctggcatcctgcactgccctgctgaactcatcgtcacatgttcttttttataatggtaaggcggacataatatgacatttagtgtttttaagtgctcagttcaggggcatgaagcatattcgcactgttgtgcaactatcaccaccatctacctccagaattcttcgccttctgaaacggaaactcttatctccatcaaacagtagctccccacctcctccctggcccctagtgaccccattccactttctctctctgaattccacgactctagggatgtcatgtaagtgaaccgtgcagtatttgtatctttgtgaccggctttttcacttagcatgatgctttcttttttggagacggggtctcactctgtcaccaaggttggagcacagtggtgtgaccttggctcactgcagcctccacctcccaggctcaagtgatcctcccgcctcagcctccccagttcctgggaccacaggcgtaccatcacgcctgatcgttgtatgtttggtagagacggggtttcaccatgttgcccaggctggtctcaaagtcctgaactcaggtcatctatccaccccagcctcccacagggctgggattacaggcgtgagccaccgcgcccagtcttagtatgatgttttcaaggtttatcaacatacagcgtgtatctgtactgtatttttgtaaatggctgaataatatttcattgtgtggatttgtcacattttgtctatccttcatacaccgacgtgcacttgggttgcttccaccttttggctgtcgcgagcaatcctggtttcaacatgggctgcaagtgcgtcttcaggtctctgcttttggtgattttggatatgtacccagcagtagagttgttgggtcatatgctaattctacatttaccttttaaggagctgccttactatctcactttattttaattaagcaactgctaaattacttgttcatctgtctccctcatcaaataagcaccaaaagtgtagtgactgtctcgtgcttcagagtacaatggagttcctggcacatactaggcactcagtaattatcttaaggaatttgcttttgttccttaaatacccagcctttaaaaaccttttctcatgttgggtggggaatttgatgagacatctgtggtcttagctgcatttcttgattgattttaccaggcacccccgagtagctcttgttccctagaaactgtgctgaagcgtttaggatgtcagaccgtgaaatctacaatgttcaaatgattctgtcaacacagagagacagaataaaggaagtgtgacaaaatattgacagttggccagtctaggagaagaatgtacactcttcattgtactggttttttaggttttctatagatttgaaaattttcaaaatactaaaaacctgggctattgactttgtagaatgtgaaatggaagaatctgtgaggtgctccatgttcatgtgcttctcaggtgtggaaaaagaagctctcggcggccgtggaggtgggcgacgcggctgaggtgaagcgctgcaagaacatggaggtgctgtatgactcgctgcagctggcccacaagtgcatcctgaactccttctatggctatgtcatgcgcaaggggtaggtgggcccgggcccgggagaggcttatgggaggaatggatgagtccacgtttagggcagcttcaggtgtaggctgctgtgcatggagggccgttcatctgattcaaggaatgttggagggagaaggctttgggctggggtggggctgggaggttgaagagagtgggggccacgctgactttgagggtctgggtgtccatgagtgatgcgtgctgtggggtgtatgtgtctctgcatcatgggctggagacacgacttgccattttccagcgcgttcatgtctcccagcgtggatcctcactcagggacttgcagagtgtcgggcagttgcttcacagcatgtctgcgtgtccgggaggggcagagaagcaactgacaaggggcatggggctggtgccgggaggggagggtgggacagctgacagcagggctgggacccaggctggaggagggttgggcctggcagctaggcctgggctttctctgagaagctggaggtgagaatggggcttgggaggaggtgtgaagagagtagagaaggcgtgaatgggtctgggtggtattaagagtcctgctgaggctggagtcctgaacggctggacgcagtggcacatactgcacccttccagatccttcctgggcaccaaggtggggacagagaggtgtcctcgggcagagccagattccaccttagttctgtcctggtgcacgcacatttggctgcttcccttgtccctgtcgcatctctcctttcctcctccctactcctcactgcctctgataccccctggaggagccatgccagccccacccaccagtttgtggtgtcctctcagggctcgctggtactccatggagatggctggcatcgtctgcttcacaggggccaacatcatcacccaggcacgggagctgatcgagcagattgggtgagtgcagaaggggagccgtggggctgggagcaggtcctgggggcaagcatgggcaggaaggaaggagggaaggctggaggccacacactgggcaggaaggaaggagggaaggctggaggccacacactgggcaggaaggaaggagggaaggctggaggccacacactgggtgaaaaggaaaggggaactcacgaccttgctcctctctttctctgaaggaggcccttagagctggacacagatggtatatggtgcgtcctgcccaacagcttcccagaaaattttgtcttcaagacgaccaatgtgaagaagcccaaagtgaccatctcctacccaggcgccatgttgaacatcatggtcaaggtgagtctggggcctctggtcctgaagctctggctggcctggcgtcagtgccctgatgtcactggctctgcagcacctcacagtgtgcatgccttcctggcacccagcactgctcacattgcttttctatagcctgaagaccatggtcagaggtatcaagtgattccactcctttctctttcagcatagctcccagaattttttgcttttaactttttattttgaaataattttaaacttacaggaaattacaaaaatagtacagagaatttctgtatccccttcaacctgccttcccctaatgctgacctcgcataaaccatggtgcgcttgtcaaaactaagaaacctatgtctgtgccccagtaactgcactgcaggcctcacctggatttcccatttcccaccatagcccctcttctctcccaggatcccagcaaggacccacgtggcgccgagttgtcctgtcccggtctgtcctcgtgtcacgacctccccctctggtggtgccggccaggcgatggttggctgtcccttgatcaggggttgtctgttgtttctcgtgactagactgaggtgatttgggtttttggaggagctccacaggtgcgacaccctccccacgttctcacacgcatcgtgttggtttgtggtggtgtgggagtgtgggtgtgttgtggggacggcttagtctcctgcctgaggggcttctgcaggccttactgtggcgctcctgtgccccctcccatacggctcttcagtcgtaaatacacacccagtggggaggatataagcgtccctggaggagggctgtcagagtttctggacctgtattagagccatcacagcagcaaatagatatcgtggagcaggtgcttcgagacagtgtatccacagctgctccataagcttctgcccactgtgttagcgttgctgatgggctgtgtttgctggtgggccgcacctgcagcagttacgcctgaggtttcctgtcgtggtttttctctggcgattgtctgtttccttcattccttctactgtatcaattgggatcctgtagggaagcgttgctatccttctcttccatttgttctcgtttatttgtctgcttattgacatcagtgtggatttgcggatcagagtggacatcccagggttattgttcataggaccggagtggcttcctgctccacgtgttccccttgggccactggggcctcctagtttgtggcgtgttcttgggacacgccctcttctggtctttgtttctggagcactttcctacttcttggtactgtaaggtccaccagcctcatcttgtattttccctgctccaacctggagtcagccagttctccgagaagaatgatgtaaaaacccgagatggggtgcttgctgtgctcactgttcctgggagtgtcatagcttccagtctctcatagtggaggcagccaggaagtatgtctctagtaacgcacgcacacagaactgtttatttctgtgtctgtctgtctgcatggatgcatttaaacacatgagtctgcccctttcttattagtgacttctttctccttcagtgataaacctgtttcgaatttctcaatatatgtgtttgttcaatcctagagtccatgtaaagtagttttagaattgctaacagacttgtgtcccatgagaaataatttcaccagccactgtacagcatttgtagatagttacttttgttttcagccttaccctgtccagtcagcagagttcacgggcagctccttcctccccaccctgttggcatgttctgctgtatgtccacagtgctgttgggctcatttggcccagtctgcacccctcttgggatcccagcaccatggctggatggcttgtaatttgcacacagtgacgttcactctgtagcgtacagccctgtgggtttggacaagtgcatagtgtgtgtgtccagcaccacgaagcaacacaaaacagctgcaacccctttgtcagcaaatcctctccctaccccgaaaccctggcaacccacaatgtgttttttgtactataattttgctttgtcgaaaatgtcatgtaaagggaagcatacggcctgtagcattttgggtctggcttcttggacctaacagatacacctgagtttcaccacttggttgcatgcatcagaacttccttccttcctgctgccaagtcgtgttagttatgtggaaaagcctcggtttgtcaatccatccactcctggagggacaccaggtggtttccaggtttgggccatcatgagtgaagctgccccctcttcactcttgtttctcaggaaggcttcaccaatgaccagtaccaggagctggctgagccgtcctcactcacctacgtcacccgctcagagaacagcatcttttttgaggttgatgggccctaccttgccatgattcttccagcctccaaggaagaaggcaagaaattgaagaagaggtgggactctcatagcttttgtgctttagaaaggacatggattgagatagattaaatttagcccagaaaggaggttggatcaggagccaggatagaaacagacctgggttcttgtgatcttactgattccgtttgcaccagctctgtctgcccgcctgctgtattctggctctgtggctgcaggcccttcagccattttccttttagagaagcagtggcctaagggagagagacgtttgctgcctcgtggatgacaggtggagggttggaaagggaagaggcgggcagagaggatgaggcacagctggtggctccccagcgctccttgccactgctgtgcttgccttttttttttttttcaggtatgctgtgttcaatgaagacggttctctggctgagctcaagggctttgaggtcaaacgccgcggggaactgcagctgattaagatcttccaatcctcggtgtttgaggccttcctcaagggcagcacgctggaagaggtgtatggctctgtagccaaggtggctgactactggctggacgtgctgtacagcaaggtaaaggcctaccctccaccctcacctgctctgagggatgaaggatgaagcaagaaggggaccccgtgcttcctgggctcctggagaccaaggtgaccgaagaacacagggccagtcctaatgaaatcccaagacctcctgagcacaattacccccttggagttcccctcaacttctgcatccagggacacaactctgagggaaacgtttttctaaatagcgtgataagcctggcatggtgatgcgtgcctgtggtcccagctacttgggaggatcacttgagaccaggaagtagaggccacagtgagccgtgactgcaccactgcactccagcctgggatatttgtttatttctatgttactttgtattttttatatttttcaggctacataacattttgacagtttacataccttaatttacgtaactagcccacgattatttactaccagataggtttcacatttccattgttatcaatggtgttgcattgaacgagatatctcggtgcatatgtttcccaggcacaggcgtcttgggtagaaggaatactggaacactctgcagtgctttcctggcttgctttgctgtgtgggcttctgtttcttggcatattgtcttgtatagagtgaaacacacgagcaagggagcaccagggtatcacacagaatattcatgagcccagcactccttacaggatgtggggggcctgtggtcaggaacatgtgtgcaaagcacagctccagctggatgtgggtgccacactggaactgctcaggcctccactgctcaggccactctccagccggccggagtttctctttcctctcttctggctcttcctgccccttctttctcttcctttcaaggagaaaaacttcctgtcttaggccgagcaacatccttttctgcagccttggtgctcttcagtaaattcttcttgatattttgtgcacagtttaataaaataaaagccaagccaggcgtggtggctcacgcctgtaatcccagcacttgggaggcctcggcgggcagaccacttgaggtcaggagttggaaaccagcctggccaacatggcaaaaccctttctctactaaaaatacaaaaattagctggatgtgatggcatgtgcctgtaatctcagctacttgggaggctgaggcacgagaatctcttgaacccaggaggggaggttttagtgagttgagattgcaccactgcactccagcctgggtgacagaatgagactctgtctcaaaaaaaatataaaagctaaagttttgtgtgtgtgtgtatgttttaaagtattgccacacaggcatattagagagctcttgaaattgcagccttctgcgtctcaggctagagaagggcatggcctagaggagcacagtccagggtgagctcagactctgccccttgatttctgcagtgttttacccattgtctttctctaggcagccaacatgcctgactctgagctattcgagctcatctctgagaaccgttccatgtctcggaagctggaagattacggggagcagaagtctacgtccatcagcacagcaaagcgcctggccgagttcctgggagaccagatggtcaaggatgcagggctgagttgccgctacatcatctcccgcaagcccgagggctcccctgtcacggagaggtgagggctccccccatcacggagaggtgagggctcctcccatcacggacaggtgagggctccctccgtcacggagaggtgagggctcccctcatcacagagaggtgagggctgccctgtcacggagaggtaaggggttccttacagatttgggctgtgtttaacaccaagtttggggatggcataagtgtccatcaaccagaaatggataattgccattttgtagggaatgagatacactataccagagttcaaagggttgaattgcagctacaggttacaacactgacagtttgaaaccactttggagaaaaaagcaaaaatcaggttgaaggaagacccttatgcctccgtgtatgtaaaacttaaaaacatggaaactgctctttttttttttttttttttttttttttggtggttatatacaaataggaccagtacaaatgcctgcatggggttgatgaacaccagaataagggttgtctttacttctgtgtgaggagggaataggttggggtcacacagggcttcactctaatcgtctcacaaaggaagtcagagtggccaagtgttgaagcttgatggagccgagtggatcatagtgtgcgtgtcttctttaggtctccttatgtttgcagtattcaccacagatgtttcctccagtgaaagggaagcactgacggttgccagttgctttgctagtgacatgaaaacaggctcgttttttctagaaagcagcctgagtcttctgtgtgttactcagcaaggaacatgtagacatggttatgaacgtgcacgtttgcctgtatgcatgcacgtggttactcagaaacgcagacatgtttacgcacacacgcatgtctttgcctatacgcatgcgcgtggttactcagaaacgtagacatgtttacgcacgcatgcgtttatgtatgtgcatgcacatggttatgccgtgagaaacatgtagacatagttacgaacatgcacgtgtttgcctgtacgcatgcacgtggttactcaatgagaaacgcagacatgtctacgcacacgcatgtgtttatgtatatgcatgcccatggttacgctgtgaggaacatgtagacatgtttacgtgcacacacgcacgtgtttacacatacgcacgtgttactccccgaggaacctgtaggcatgtttgtgcatacatatgcacgcagatgtatacattgatgtttgtgaacagctgttacacgtccttatttccatgttcatttgataagagttaggatcagattttgggtgattttcactgttactgagctgtgtgcctgtcttccttacccagggccatcccacttgccattttccaagcagagcccacggtgaggaagcactttctccggaaatggctcaagagctcttcccttcaagactttgatattcgagcagtgagtgccagttgcgttctctactcttaaaagtttacaaggaaagctagacagagcagaatatgtctgagttggattatgttttttgtctggcgtcttcactcttgacttcctcctttctgataagtaataggtgagcacctaataaccttttagggcaaaactgaaaacatgaagtgcctggggccctttagctgttctattggatggactaaggccaggggtgttggctcagccacctactagctctgtgatctagaggagtcagtgaagctccctgccttggtgtcctctgttgtgcaatgggcacctttcatcatagagtttctgagaggattaaataagacacagtggttagccctgtgctcagcatgaagtgagccccactcttggctgctgccacctgctgttctctgtgcccgtttcctgcacatgcagattctggattgggactactacattgagcggctgggaagcgccatccagaagatcatcaccatccctgcggccctgcagcaggtaagggcggggtcagtggcacgggctgtggggctaaaaactgtgcagttagacaagggtctctctctgatgggtgttggcctcacacaggtaaagaacccagtgccacgtgtcaaacaccccgactggctgcacaaaaaactgctggagaagaatgatgtctacaagcagaagaagatcagtgagctcttcaccctggagggcaggagacaggtgacggtggggccccaaggctgggctgggcgggatccttgtgacacacaggactccaggcttcttgcgctgctgtgtgtgctgtagtgaagcttctgttcaagcatcgaaaatggactttttctgaaaatgtgcccattggcactttactctctaactctgagtgtcactcttttgttaataggacaccattgtgaggctgaggtgagggcaaggaactgtctccttatgtgaaaatattagggtgcactacttagactcagtgccttgggcaaatcactgtctcttgaagccccagttttctgaatgtgaaatgaatatcttccctatggaaacacttagaaacacaggacacagtgtaataaaaggtacagtgaaagtcagaagagcaaaaggaaaattcttaaatgctgaaaattaaaagtaagctataaatcagagcagtatacaaactcacatgacaagaacaaggttctttgaccaggtgcggtggctcacacctgtaatcccagcactttgggaggcctaggtgggcagaccacaaggtcaggagatggagacaatcctggctaacacagtgaaaccccatctctactaaaaatacaaaaaattagccaggcgtagtggtgggcgcctgtagtcctagctactcgggaggctgaggcaggagaacagcgtgaacccgggaggcggagcttgcagtgagccgagatcacgccactgcactcccctgggcgacagagcgagactccgtctcaaaaaaaaaaaaagaaaaaggttctgagatggattggattttaaaatttaactgtcttatttgtaagagttatatatgtattctttcccctgccccccaagacggagtcttgctctattgcccaggcaggagtgcagtggcacaatgcagcttctgcctcctgggtttggctcactgcagcttctgcctcctgggtttaagcagttctcctgcctcagcctctagtgtagctgggattataggcacacaccaccatgcctagctaatttttatttttttaatttttttctgcctcagcctctagtgtagctgggattataggcacgcaccaccatgcctagctaatttttatttttttaattttttttttaaatttttagtagagacggggtttcaccatgttggccaggctggtctcaaactcctgacctcaggtgaatgcacccgccttggcctcgcaaagtgctggaaatacagcactgcgcccagtggcttatgggccagtataacaatttcaagagttatattgaaaagataggacgcaggaaaagcaaaaggagtaaaaaatacgtataccaggtaaatgttaaccaaaagaaagctgatgtggctgtattaataccagacaaaatactctttaggccaaaagtattaggaaacataaggactattgttacataatactgaaagtcacaattctctggaaatatatactaattgtaacaatgtagcctcacattaaataatgtaaacatttacctaattataagaagaatttacctccaatcagtttgggagatgttaacatccctccctcaattgatagttggagcagaccaaaaatcagcaaaaatatgtttggaatgacacaatcaactaactagatttagtcactagctataatacatttagtgaacaaatgtagtcttgcactaaaattagagaatacctatccttttcaagaatacataaaataatgaccatatatataccacagagtaagctgcaaccaattctagataacttaaatacagaccatgtttggaaatttaagaaaaaaaaaacacatttataacttgtggatcaaaaaagtcatagaacttagacaatacttggaactgaatgtaaatacaaatgctattaaaatttgtagtatgcagttaaacaggacttgtatacgcatttatatatctaaatgcatgtattagtaaagaaaaacaaatagaaaattaagtttccaactgaaaaagttagagaacaacagatccatcagaggaagtagacagaagttataaagagttataaaggtaaccaggcatggtggtgcacacctatagtcctagctactcggaaggctgagaggcaggaggattgcttgagcccaggaatttgaggttgtagtgggctatgatggcacctgtgaataggcacttcaccccagcctgggcaacacagggagaacccaactcaagaaagaaaagaaagaggttacaaaattgagccagaatgagtgaaacaaacaatacaaccaaaatgttgttctttgaaaagacttaggaaaatagtcacatctttttcttttcttttgagacagggtctcattgtgtcacccaggctggagtacagtggcgcagtcatggctcactgcagccttgacctcccaggctcaattgatccacctgcctcagcctcctgcatagctgggactataggcgcacaccaccacatccagctaatttttgtaattttttgtagagacaaggttttgtcatgttgtcctggctggtcacatctttttcaggacagagttttttattttaatgaaaacagacatcattatagatatagtaaagcctaaaaaaatggaaggattcccattttctgctaaacagttggaaaacatagatggaacggacagtatcctcaagttatgcactgacctaagaagtaataaaaacctgaatagaactttaaccattacagaaattgacacttaaaaagaaacaggccaggcgcagtggctcacacctgtaatcccagctctcagggaggcagaggcgggaggatagcttgagcccaggagttcgagacctgcctgggcaatatagcgagaccccgttctccacaaaaagaaaaaaaaaagagacgaaaaaaaataagtgtaaaagaaacatcaaacccaaatgatttttaagagaaaaaggaaaaaaaaaacccttagctcatttggtaaccttggcaatccttgttactttggtaacataattgaaaacaggaaaggaaagttacgggccatgaacaatagatgaaaaaatatcaacatacatgaacaataacaatatgaccaactaggacttatgctgggaatagcaagcactgtttaattttagaatttgccaggttagtttttcttgggagaaatccactaattcatcattaaaggagaaggctcgtaagatcatctccaatagatgcagaaacaacatgcggtaaaactttaacatctgctcatgttaaagtttgaacaatcaaaatcagaatagatgagatgtttcttaacctgataaagtgttcttgaaacctaacagcagacctcatacttaaccacaaaacactggaagcattgaagtaaggagtaagaaatggatgcctgttaaccactgcttctgttcaaaacagtttggagatcctagccagcataattaaaccagaaaaagaattaaggattgaaaagggagacatcaacttattatttacaggcgatgtaatttgttaacagaaaatgtaaggaaacctagattttgtgttaacttatatgtatttcagcaacaattagataccaaggtaagatataaaagtctattgctttcatttatactagaaacaaaatattttttgaaagataccatttacaatagcaataaataatgtactaaggaataaattcatggtaacaatgtgtgtaagacttttacagaaaaaattacacaacttttttctttttgagacatggtcttcctttgtcacccaggctagagtgcggtggcaagatcatggctccctacagcctagaactcttaatctcacgttatcctcccacctcagcctcctgagtagctgagactgcaagtgtgcaccaccacacctggctatgtattttttgtagaggctgggtctcactgttgcccaggctgatcttaaactcttgggctcaagtgatcctcctgcctgggccccccccaaagcactgggattacaggtgtgagccaccatgcctggcctatacacaactttattgaacatataaaaatttacctaagtaacaaaaagaggtaccatctttacagatgaaaggactcagtattaaaatatggcagtttgccccatattaattcataaaattcagtgtaattccaataaaaaagaatctgccaaaagctttttggatagaacttgacagacgaatcctaaaattcatataaagggtaaggataagaataaccaaagaattttgaagaataaggagggcacgttgatcttactatgtaacgagacacactatcatggcatcttgacaagatgagaggagagcagtagagccgattgggagcctagaaacagactcccctgttagtcggaagttggtaggtcacagatcgttaaggagagagtggactgcagtgagtgatgctggtgaaaatggtttttcatatttggagaagtaagttgttgtatcacactgagtgtgaaactaaggctgagtgtgatggctcatgcctgtaattgcagtgctttgggagtccaaggaaggaggatcagttgagcccagaagttccagacgagcctgggcaacatagggaggtctcgtctctacaaaaaaaatccggcacaacattaggcatggttgtgcatgcctgtagtcccagctacttgggaggctgaggtgggaggatcacttgagcctgggaggttgaggctgcggtgagccaagatgaccactgcactccagcctaggtgacagagcgagacccctgtgtctttaaaaaaaaaaaaaaaaaaaaaaaggaaactacaatctttggtaaacaactcaggagactatgatgctggggtgggaagggcttttttaaggcacatgtgaaaaacatcacaaagggaaagaatgatcaattaattaaaagttaaatcttgtgtagtctgtgacaagaaaggcagaatgttgataattgttgacactggtgataagaacatgggagctcattactgtgctttcgtgtatgtttgaaaactttcctgataggaagtcaacacacacaaacttacatgtagcacagaagtcaccatgaaacaaaggcctgagtcacattttgaagatgtttagaatgtataaaagttagaaatggctcataaacgtgttagctatctattgctgcatagcaagtaaccccaaaacttagcaacttaaatgcactcgtgtatccgagggctccactggagaaggagccacttccgagctccctcccatggggatggcaggactcggttcctccttggcctttgtctggacgttatccttagtcccctgctccatggggctcttcacaggacagctcacagcatggcactggacttttgagagagtgccagccaggcagaagccacagtgttttatagctgctctcaggagtggcattccatgacttttgctggaatctgttcattacgggcaagtcaccgggtcccacccccactcagggaaggagtcacacagggtgtgaacaccaggaagtgggggtcgttgggccattttgggagctgcctgcacagggccaagatgttcagccttactgttgatgaggtaaatgcagcatgatgtatttagatagcaggtcacactgaaggcaagtaagtgtggtggcatcaagtagcaagattgtgggaagtaggaaatccctggtgctagaggtggaggtggttgttctccgggaccaggcaacacatacagagatggtcattgagtcacagtttgtagttttgaaaaagtaggcgcttgtcattcttcatttgcaaagtcatgggtaggtaggctgatgtgtttatatgataaatcatttcacatcagttacaatgaacgaaccatatgtgcatgtttcacccggtgtcagtctcaaaaatacatggctgaataaagaaacaagttgcagggacaggcatgtggctcacgcctgtaatctcaacactttggaaggctgaggtgggtggatcacttgaggtcaggagttcgagaccagcctggccaacatggtgaaaccccatctttactaaaaatacaacaaaaaattagccgggcttggtggcaggtgcctgtaatcctagcttcttgggaggctgaggcagaattgcttgaacccaggaggcgaggttgcagtgagatgagatcgtgccattgcgctccagcctggacaacagagtgagattctgtctcaaaaaaaaaaaaaaaaaaaaaggaaacaagttgcagtcagatgtgtcccacatgttactatttaggttaaaacttacagctgtggcatgtgtctgtggacatgtggtaaaaatttaaaggtgtgtgggggcagacagaagagggctgtacccattatttgcaatattttctttcttacaaaaagcattctggagcaaacatggcaaaatgcaaagatttacttattggtggtattgagtgacgttttatttttcggtttgatcttttcactttttttttgaaagagggtctcaccctctcgcccaggctggaatgcagtggcgcaaccttggctcactgcaacccctacctcctaggctcaagtgatccttccacctcagcctcccaagtagctgggaccacaggcccacacaaccacacccagctaatttttctattttttgtagagacggagtttcaccatgttggccaggctagtctcaaactcctgggctcaagtgatccgcccacctcagcctctcaaagtgctgggatgacaggcgtgagccaccacacccggccttcactattaaaggttcaataaacttgtgtaaacgaacatcccatttcaggtgatatacttatactagatttcgagaagtagaatttgtggggatgagatcctgagatttttgtttgcttgtttttatgaggcaaggtctcacttgcccaggctggagttcagtggtgtgatcatagttcgccgcagcctccaactcctgggttcaagtgatcctcctgcctcagcctaccaagtagcttgggactacaggcgcactaccacgcctggctaatttgtaatatattttgtagagacagggtcttgctgttacccaggctggtctcaaactcctggccccaagcaattctcctgtcttggcctcccaaagtgctggcattccaggcatgagccaccctgcgcagcccgagatcctgagatttaaggcttcactgggtctttccaggtcacgatggccgaggcctcagaagacagtccgaggccaagtgctcctgacatggaggacttcggcctcgtaaagctgcctcacccagcagcccctgtcactgtgaagaggaagcgagttctttgggagagccaggaggagtcccaggacctcacgccgactgtgccctggcaggaaatcttggggcagcctcccgccctgggaaccagccaggtaaggcacacagctgtgatactgtctgtctctgaggggtctgcacagcccagggagcccgagatgcgtcctgacccctagggaggctgcttgtgagaaagtcatggcgggcattcccatctcaccacttgcacactggctgtgctcaccatccatcccaggaggaatggcttgtctggctccggttccacaagaagaagtggcagctgcaggcccggcagcgcctcgcccgcaggaagaggcagcgtctggagtcggcagagggtgtgctcaggcccggggccatccgggatggtcctgccacggggctggggagcttcttgcgaagaactgcccgcagcatcctggaccttccgtggcagattgtgcaggtatagaccttgatccaaggggagggcagtggctctgctgatggcccagggagggggtgtccagctgggccctgaggtctgggatgggagggttagagtgggcctggagtttcctgcccatcgtagggaggcctaaggccctgtgctgggagctgcaagctacctggaaggtggccccgtctgtgggttccagtgtgtcctgtgatgtgctgtatgtccgtgtggcctttcagatcagcgagaccagccaggccggcctgttcaggctgtgggcgctcgttggcagtgacttgcactgcatcaggctgagcatcccccgtgtgttctacgtgaaccagcgagtcgctaaagcggaggagggtgcttcgtatcgcaaggtagggaggagctggtgctgcctctgcagtcatctgggcagcctgaggtggctttcccatgatctagcctggcctccagcctccatctcctcagtaccttatggggatgttctaggaattcctcaaaacaacgtgtgtgagcgctgagcaccgagcctggggcagagcgagtgccgggaatggagctgctggtgtccttgtcacgatgagcttgtctgcccgcgaggtccatgttgcggggacaaaccaagtggcattggttagagattgtgaactctgtctccgtaggctctttggttgttaacagctttattgggatgtaaagttacgccatccaactcacccatttaaagtgcagaattcaatgacttttagtggcatgactattgccagtcaatagtgacattttctttttttttcttttttttaattttactttgatttctgggatccatgtgcagaaagtgcaggtttgttacataagtaagcacatgccatggtggtttgctgcacccatcaccccgtcacctgggcattaggccccacatgcattagctgtttatcctgatattccccctcccctcacccccccattcggatattttcatcactccaaaaagaaacctggcatcccttacctgtcaccatcctcccccagccctcagtagccactgatccacttcctgtctctgggtttgcctgtttgggcatttgatgtaaatggaaccctacagtaggtgggtctttgtgctgggcttcttccacctgcagaaactgcgagggttttcatgtggccatgagtgcgctgaggctcttagatggcatctccacccgaactccccgttgttaatgtgtcggctcagcacatttcttgactggatgctgtgaatcacgtaagaagtgacacgtagttggggagatgaggtgtgcatatttgtacctacacaaggaggttttctggagaaggtgaaactcgattccagccaggtgattcagtagaatgtgcatatagaaagtagacgcagagccaggtgtggtggttcacacctgtaatccccgcactttgggagaccgaggtgggcggataacaagaggaaagcggacgcagaggcatcgagaccacagagaacaggtgggactgtggggtttctacaccttcctttcgatgcgtggtgctgtggtgctgtggccgtgtggaagtgccctaacttttgggatgtttccctttatgactatcagctcatctcgagggaggttctggcgctgtgtgaatattctgtcctcaacgtttgactggatggtgtcagcatccatgtctcgtggggtccatggggctccaggatgatatcttcagattctgttcctctgtgtgtattagctgtttcctttataacgaagagctttgtgcagatcaggtagaaatgaactctattccttaaaaagcaagatacgagagggataatacgctttttttttttttaagcaagataaatgctttttccctttaaattatttttaattttcaaggtagggcatggcaaaatgggtttattcctttcatttttcctctctttttaaagtattactatggattagaggatttttgtttaacttttttgtttctgtttttgagaaggtctctcactccatcacccaggctggagtgcagtggcatgatcttgcctcactgcagccttgtactcttgggctcaagcaatcctcctgcctcagtgtttaatgttttaacatcaaccgtagccaaatcccgcccaacacacacacgttaggtatgttaaggtacacggtaggccctcactttatgttgttgataggtccttagaaactgcaattttaagtgaaatgactaagtaagatgatgtataatgaaacagattttttttcttctcagaaactataatgaaactgtgttggccaggcgcagtgctgcatatctgtaatcccagcaatttgggaggctgaggctggtggattgcttgagctcaggcattcgagaccagcctgggcaacgtggcaaaaccccttctctacagagtattttttaaatttatttatttttatttgtttgtttgtttgttttgagatggagtttctctcctgttgcccggctggagtccagtggcgcatctcggctcaccgcaacctccgcctcccgggttcaagaaattctcctgcctcagcctcccaagtagctgggattacaggcacgcaccaccacgcccggctaattttgtattttttagtagagatggggtttctctgtgttggttaggctggtctcgaactcctgacctcaggtaatccatccacctcggcctcccaaagtgctgggattacaggttgaaccatggcgcccggccccagaatttttttttttttttttttaaaggaagaaagaatgttgaacaaaatgatgttatttgaggacctgctatacattacttcacttaaccatcacagtttccaggaatccattgatgttaagtgaggacttactgtaatttacatatagttaagtgcagatttttaaatgtgcagttgattgggtttttggacacatgactatgcctgtgtcacccacacccccacccaggtgcagaacgtttccatcacccgggagggtgctcttgtccccctgtgcaaccttctgctggcctgatttctgtatttctgtaactgtgtgcatgtgactttctagaacttcatattaatggaaccagacagtagactctttggtggtcaatatcttcttgagactcaaattatcccaaattgggctggccagatcccttcaagctggcacctgagtccttttgacatgccctgttggtctttgaaaacttccttgctttttggccactaagagaggccaggctcaccttgaacttccagacgtggaattagctgttcctctaaagagcctgagcctcgttgagaggttatgttgagaaaccaagcttagagctcaaggggtatcatttcatctagattccttcagtgaacagccaggaaatatatacattttaaaaagtgcaattacactaattgttccagttcatatttaccagaacataatttttcatttctttgattttgtgtgtgtgtgtgtgggtgtgtgtgtgtgtcggtctaatttcatgttactggaaaaatctaaccctactggttctcttctcgcttgagaattattcagattttcctggttgttgttacgccaaataacgctttattgcaacctggacattttacatatttgagactttgggtatttttaaaaatcctttagcgtgtcaggtttttttgtttgtttgttttagcaacaaccaacacggttaattccagtgcccaagctcttccttgcctctttgtgcaaagcttccaatgtcagctcagcctccagagcctctgctgcgttgttttgggtcacctgtgcaagtgcagctcgtagtgagcctgggacttgtgctgctggttcatgcatgaagctagggtgctcctctccaggattcccccagccccccacacacgaagctagggtgccccctctccagctctcctctccaggattcccccagccctccacacagggagctagggtacccctctccagctcgcctctccagaattcccccagccctccacacagggagctagggtgccccctcttcagctctcccagaccccccaggaccccacacaggaagctagggtgcaccctctccagctctcccagaccccccaggaccccacacaggaagctagggtgccccctctccagctctcccagacccccccaggaccccacacagggagctagggtgcccctctccagctctcccagacccccccaggaccccacacaggaagctagggtgccccctctccagctttcccaggcccccccaggaccccattcacgaagctagggtgcccctctccagctctcccagacccccccaggaccccacacaggaagctagggtgcccctctccagctctcccagacccccccaggaccccacacagggagctagggtgccccctctccagctctcccagacccccccaggaccccacacagggagctagggtgcccctctccagctctcccagacccccccaggaccccacacagggagctagggtgccccctctccagctctcccagacccctccaggaccccattcacgaagctagggtgcccctctccagctctcccagagccccccaggaccccacacacacactctggctcccccaggggctctctttccgtttctctgactaggaaaatgtgatttctctcagtttttgccatctacaccctcaggttaaacccatgagagaatggaggaagatgaactgggaacctccccagatcagtgttgactgctgtattctgacagctcttgtctattctcagaggctgcaggttgcttttcaaaattgcgtccagaggccaggcatagtggctcacacctgcagttccagcgatttgggaggatcacttgagtccaggagtttgagaccagcctgggcctcatagtgagacctcctttctacaaaaaaaaaaaaaaaaaaaaaaagccatccgtggtggtgtgttccttgtcccagctactcaggaggctgaggctggaggaccacttgagcccaggagttggaggctgcagtgagctgtgatcacactgctgcactccagcctgggcaacagactaagaccctgtctgtaaaaaataaataaataacataaaaattacatccagagtttttagttgtaatcattgagagaggtggactgtggcgtggtgggtgtaccccgtcgctaggggcaccagaagtctaggactccgaatagcgtgtgctttgtgtgtgtaccacagacattaccacttacgcccagtgacgagatcatcgtcgtattctcgccaggtaaatcgggtccttcctcgctccaacatggtctacaatctctatgagtattcagtgccagaggacatgtaccaggaacacatcaacgagatcaacgctgagctgtcagcgccagacatcgagggcgtatatgagactcaggtgactccccagccaccctcgactgaactgggggaggctccagcagggtggtatggaggaaagaaacccgcccagggtgtgggctggggaacagcagcgacagtggactcgttcccacaggtgaggtgaatgtcagcagtgtgtctgccaaaagtggcctttgggcagtgggccgggcagctgcaggggcacagccacatcccgggcagaagtcacgtgggcagccagagcccccaccatccagcccttgccggcctgtctgcccgattcttccaggttccgttactgttccgggccctggtgcacctgggctgtgtgtgtgtggtcaataaacagctggtgaggcacctttcaggctgggaagcagagacctttgctcttgagcacctggagatgcgctctctggcccagttcagctacctggaaccaggtatggcctgcaccagccgcccatcatgtgcctgcctcccacacatctggggtgacggtcttgtttccttctccagggagtatccgccatatctacctgtaccaccacgcacaggcccacaaagcgctcttcgggatcttcatcccctcacagcgcagggcatccgtctttgtgctggacactgtgagtcctgggccctccatggcagcacattggctggggcagggtttggggaaggaggacatctcccagggtgcccaggccctccaggtcttgtcctcaagggcctttgcccatgagtgcttgtcgtgattgaattggcagtgccgtggcagtggtggagtctgccccagggctgcccccacttcctcctgcgcagggggaggctgacgtggcctgcgttggtctaggtgcgcagcaaccagatgcccagccttggcgccctgtactcagcagagcacggcctcctcctggagaaggtgggccctgagctcctgccaccccccaaacacaccttcgaagttcgggcagaaactgacctgaagaccatctgcagagccatccagcgattcctgctcgcctacaaggtgagagtggttggggtcttgctgtgtgagccccatcttctttgaggctgggtccacccaggtcttttcttccattttgccttgacccaggaggagcgccgggggcccacactcatcgctgttcagtccagctgggagctgaagaggctggccagtgaaattcctgtcttggaggaattcccactggtgcctatctgtgtggctgacaagatcaactatggggtcctggactggcagcgccatggagcccggcgcatgatccgtcactacctcaacctggacacctgcctgtcgcaggccttcgagatgagcaggtgagcacagtactgtcgttgtgggccagtggtccccaggcagagccggcctcggtggtctctgtgacccggcgatgtgccccggtgctgacctgtgccctggtgcaggtactttcacattcccattgggaacctaccagaggacatctccacattcggctccgacctcttctttgcccgccacctccagcgccacaaccacctgctctggctgtcccctacagcccgccctgacctgggtggaaaggaggctgatgacaactgtcttgtcatggagttcgatgaccaagccactgttgagatcaacagttcaggctgttactccacaggtaagtgggcgggaggacgaggcccatgagacctggctggtgtttctgccattctgtgacatcttctcaaggcaatagtgccgaggatgggctcagagttcgaccgcgcaggtcagagctgaggctgcaggagacggtcctggggtcaaggtccaggtggggcctcctgtgccctcgggaatctgaatagcctggcaggtgtgaggatgggtgtgggcaggtctgttgctggttctggaggtggtggtggctggagtcaggcccagggggctggtggtgctggagctggcaggatgctggctgagcatggcgtcttcctgtgcagtgtgtgtggagctggaccttcagaacctggccgtcaacaccattctccagtctcaccatgtcaacgacatggagggggccgacagcatggggatcagcttcgacgtgatccagcaggcctccctggaggacatgatcacgggtggtcaggctgccagtgccccggccagctacgatgagacagccctgtgctctaacaccttcaggtgccaccctctctgggaaggagtgttactaatagaagggtcttatcctttgcccttaatttggaaagctaaggtctaagacagggtccattgggcttcccttagtcttaatggcagagccagagaccactgtgtggcgagttttccatagtctattgtctttaccactgtgggggtccggcctggtccctggcgactgttcagtgtgctgcctctgacctccctgtggccagaggtacttcacacagagtctttctaaccagggccacttttcgatgtgaccaaaggtacatcacagggatctccagccagctctactgagtatgatgtgtgaggcatcagcacttaggtgtcaggagccgtcggtctgctgcagagggcgtggttgagggtcaggagccatcagtctgcggagagcatggttgagggcagctactcgcattacccaccagcggtggttcatgctgggcaatgcttgctgtgtaccaggaggtgggccgagcacttcgcattctgcctctgtccccacatcagcccagggacggggagcggttattgtctgtttttcagataaggaaactgaggtcagaggggctgcctttgtggtcataccacaaatgaatggaagggtaggtgctcaaaaacaagtctttgtaattccagagcctgtactcagctgtagttttaatgactccatacaaaaggggagagggagcatgccagagctgggaaatgaggcagggagaggactggtggaaagaggcagggaggcagttgggagccgggagcagggtcttggcagagagacagtagcccaggcctgaaaggtagaaggagtccaacagcagatacccaaactgccgctctggagaatgtggggtttgccaaattattgaagagtttgtgatgaaagggagttttaggaatgggacttggacctctgtaggttctcttgtaacattctgttcttgaccccattgaagttcccgcttcttcagtagggtgatgtgcagttttggaatcctttagctgaattggggttccagtaccagagcagctggcatctctgccccatgggaagtgaagggggccagacagggcgtgtacagtgcactggccaatgcctagctgtctggcctgtgaccagggccccccggaacgggaaacttgtttacactggcacacgcccttgtggcttttgtgtgacctgtgtctaggtaccacctgcctgaccattgcttcggtgtaggggcccagccttgtgttccccctagtgtcgtagggaagacccagcccagggcagcccctgcctcttcagagggaaggcacaaaatcagtcaccaccacaatagggaacaagtgcaaagatgtgttccttacagctcctgggcagggagggtgccgtgagtagggaggccatcctccatccctgggtcctgcaaggcaggactgaagagtcagacagggagggtgcccagggcagctaggcgtgtgagggaatggggtgtaggcatgtgttagttcacgggcgagcgcctgaatggtccatttaaaggaagtggcgggaaggcagggcccagcctgctaggcgggagagaggcctctaagttcttgtttctgaccagctggggccatgtgggtatggtgatgttttgttttgttttgttttgttttgttttgttttgttttgtttttgttttttgagacagtctcactctgtcacccaggctggaatgcagtggcaccatcttgggtcactgcaacctccacctcccgggttcaagcgattctcctgccttagcctcccgagtagcaggattacaggcatgcactagcccagctaatttttgtatttttaatagagacggggtttcaccatgttggccaggttggtctcaaactcttgacctcaggtgatccacctgcctcggcctcccaaagtggtgggattacaggcgtgagcctctgcatccggcctagtgtggtgttctgatgtctaggcagtggctttgctgtgtccttcctgtcagggtccccggcccgtcacacacttgctgctttgtactgtgctgccctcccgtcctgctttagaacacacagagtttgggatgcggtgaagcctgaacaagtttaaggaatgaaatgggaagaaacagatgaggcatgagggtgaagggatgaaatttggaccgtgacttaaggtggggacagtgagaaggggaggcgacagtgacggatttggacccagccgtgtagggaaaacctgtgcccatttcagttggagcgtcccgcgtggcagcagcgtgggaggctgagggtacgagggtgtcgtgcaccttctctttcaggatcctgaagagcatggtcgtgggctgggtgaaggagatcacccagtaccacaacatctatgcagacaaccaggtgatgcacttctaccgctggcttcggtcgccatcctctctgcttcatgaccctgccctgcaccgcacactccacaacatgatgaagaagctcttcctgcagtgagtgctcctcctccctgggctgtccaccgcgtcctcagctgggctggtcccttactccccagaaccagagacatggccagccagtgcctctgggataagtagtgtatttctgagtttgtggagcataacaatccaaaggatcccagagaaacacgcagctgctgctgcagcgtcgcctgcacatcctgcagagaacactaggtggcacctcctctcctgcccctttcctgcacaaagtcatgctacacattgtattgctgtgtgccttgttgttttagtgaaaatatgcctgtgtcaggagatctgtgtgaggacatgccatatgaaagaacatttagcctctctccagccttgtgccgttgttacaaatagcaaatcagtgagaggcttcatgcatgagctcatgcagatagatccgtggggtaattgctggggcgtagccctcttgcaggcctcagaggtgttgtaactcgggatgaatcctgatttgatggacttcaccagagcggccccacagaggccccttgtggacacttcttccctggccgcgcctcaccaacatggccggggattattacccaactgctgggataaaagtgcttcttggtgcagtcttaacttaggattcttacaatgaatgaagtcgaattttctcttctagtcctttgtctatttttctgtagttttggtggttcttctcttattaaatatcgaatgagttgtctccatacaaaaagttgccatttttctgtgataagaatttgctaattttttcctgtttttggttatcttttgcctttgtttgtggtggatttttgccatgcagaaatctttgctcttcattagcttctgggttctagtgtatctcggaggcttttctgcttcaggaccctcagctcttttccctcttggattttctgggtgccctctggctctccatgactgtggcgtctccaccacggactctcaacttgctccacaggctcatcgctgagttcaagcgcctggggtcatcagtcatctacgccaacttcaaccgcatcatcctctgtacaaagaagcgccgtgtggaagatgccatcgcttacgtggagtacatcaccagcaggtgcggctggctggtcctggtgacgcagcactgtggctttgagagggatgctaaaatgaccccctgaggtgccagctctcctcctgggtgggctgggaggtcgttagaagtgcaggactcaccatggtgaatctgagcagcgtgaaaagggggttaccgccacctgtgcgcggtagcagatcggaggccactcagctgtgcagcttgagttgggcaagttcaggaagtggcctgcctttgctaagaaggttccacagtgatttttgtttgtttgctttttttccccatggatattcagggcacagattcaaggtgccctgaatatatgcaccccgtaagtgttgacgttgtaagccttttcatagacgtcagtgttggcgagtggagtggtgtggttcccgggtgctcaggtgtgcacagctctcagctgtcagagcctggtgtggttttgacttcctgccttccaggccatgttcctgaggttccctcctaggccttgctgtgcttctcacacactcagcactatttaaatctaaatagaagacaaagcaacagaaaaatctccaccagcaacttttgttcaactgatagtaggaagctccctcctaggtgcgctcaccctggggatgaatgcagccctttctgagcacagaggggagttgcttgtggaggcacagagagtctgcatgggtctgatctttgcatggttacaggggtagcatctgggggcgctgcagaaaaggctgacactaaattgataataggccttatcactgagaagtaggaaggtagagcttataagactttcattcctaatcaaaccatatgcactggattaatttgaaacacaaaagcactgttgtcctcctgcagacccactgtggccccttatgtctatccaagatgagccttgatggtcagtggtcacgctgtgtgcctgggaaagctggcttgggctagaattgtatttcggagcatggctgagataatgggaaggatgtgcctctccccacgttggccatgggcagctccaggggtgccctgtacctgaggaggccggggttgctcatgtcgagaaacaggctgctattcttccttagcgcgaagagcagagttagggagaacataaagttctcctgcaggagctgcgatgtgggctactcagctgcattttgaaactgtgatttaggatgttcctccttccttcctctctttctttgtttattcttccattttttggggttttgtttgttttttaggagatggggtcttgctctgtcacccaggctggagtgcagtggtgcagtcatggctcactgcggcctcaaactctgggctcaagctatctgcccacctcagcccactgagtagatgggactagaggtgcatgccagcatgcccagccaatttttgtattttttgtagagacagggttttgccacgttgcctggggtggtcttgaactcctgaactcaggcgatcctcctgcctcagcctcccaaagtgctaggattacaggcgtgagccaccgtgcctggcctgttctttttttttttttttttttttttttttccttaaatggatctaatgtgcagaggattgggtcagcgctagggaggcttaaccgaggagtgacaaggatgacgatagcttaaaagagcttggcagtgggaagcactgtggttggttaccagcaggtgcaggtcacctaaggccgcagagcagaggcagaacaccctgtgggccatccccagcacgaggaggcacccagctctctttgtggcgccagctcccaggggcctggtgggcctccttagttttacgtttaccacatttccccaggaagcctgagggatgatgtggtctgaatgaactttcaaattcagtgttaagtaagtggagggtacagatagatacaaggggaaataaaggaaagttgagaacaaggtcgatttcactgaagcagcgtcttcaatgcttcctctgcagcatccattcaaaggagaccttccattctctgacaatttctttctctcgatgctgggaatttcttctctggatggatccatctaactatggcggaatcaaaggaaaagtttcatctcgtattcactgtggactggtaagcgagctgcagtgtggcacccgagccagctttgggggtcgcgttcattcctgcagcaagtgctgagtgctcagggccccggcgggcctggccgtgagcagcagacactgcacccgcatcctgccctcatgaacacggggagggaccatgcgcagacaagcacgtcagtgtggagtgtggcgtcagccctggtgatggcaaggcttgccgtgggcaacagggaggtggaggcccatgaggtggtgacagggaatccgagagctgatgaagtgcaccatagttgtgcgagcataaggcgcctccagcggatggacaccagggaggcaaagcacaagtcagtggagcagtggttgcagatgcaggcagagagctgacagagccaggcaacttgggcatggcagggcagggcctcggctttcgtggggatgggagcttctgtgtgggtgatgttggagctttcttggccccatgtggataacccaccattggagggcacaggcaggtaaagccggttagtgcctgtgtcagggagatgctgggcagcgaggttggtgagaagggcctgggtgggctttgaagtggagccaaggggccagcggatcggatgtgtgtaaatgcccaggtgcgggccaggctgtgggtgagtggaggtggctgtcgggagcagtctggggaaggggtcacgtctggctggggctcatggtgtttgcaaggttgagacgtgggtggtcagctggtgcaggagtggccagagagtggctgggtgggttgagaggaggcctgtgtcctccacaggggccctcatagtggactgagaggaagctgtgggtaccagagccaggggctcagatgtcagagggaaagccctttgtaaggacgcagacgcttctgggagctggcaggatgaagccaagactgcccaggacacctggatgggagcgattctggttggagttgggggataaaccctgattgaagggattcagaacaaagtgggagggtagaaactcaggcagtgtagaccgctctgaggaggggatcagcgtgtggtcagggcaggtggcagtgggtgtcggtgtctacacagacgtggatggtgccgtggcacgaacacaggctgcgcgggaggctgggtctgtgatggggtcgtgccgtcccaggagattcatggactcagaggagagaacagtcaccgggaagctctggctggttctttcgtccttggggggtgggagttcaacaattaaagtgaactctggaagagcagagtgaagctcacagtcccaggtcacgagcacttctgtgtgccaggcgcttcccacaaagcactttgtactgggagccaccctgggggattcacgcaggctccaggggatgccttgactgcgaggaaggcctctggtcaaacggggcagatggacccaggttggaggagccttcgctgtggcatcctacccctctaccaggccgcgatggtgcaaacacagccgcgttgtctcatgtgttacagcaagactcccagaaagcagggggagcagaggatgagcaggaaaatgaggacgatgaggaggaaagagatggggaggaggaggaagaggcggaggaatccaacgtggaggatttactggaaaacaactggaacattttgcagtttttgccacaggcagcctcctgccagaactacttcctcatgattgtttcaggtaagcccagagcccagggctgcgcagcccccactgaagggactcatggttagtagatgtggctcctgtgccatggtatcgcaagaagggagacagggaaaatcagatcgggcggagcctgcccagcagttgggactttgtgagccgaggggcctcctctccaggctccaggcatgttccactggagggcccggagaggggtgactgtcttccctccagcctttgctctcaggaaactccatggggagcggctgcccctggccgtgtcattgaggagtttcctagctctgctcccgccatctgattcggtaactcagtcacatacattcccagggaacatttgtgtgtgtgcacgttcagtagctgaagataaagccctgggtcaggtcagctgccccctggctggtctgtgaggcctaactttctggtgggggagttcctatgccttggtttgggtctgcaggcttagagtttgcaaatcaagctatgcaggttagtgtgcagatgaagtgtatcgaggaagcactgtttgtagttgacagccctaagttaaagaatgccctaagtaaaaacagcaggttgtgatgtgcacacacaggtggatgcggtcacagaggccttcgttgatgatcattttatatttttgtctacttgtccttgagtctttaactttctcagttctctcttgcaactttctatgtctcttttgaaaagttccgggttggccgggcgcagtggctcatgcctgtaatcccagcactttagggggctgaggcgggtggatcacgtgaggtcaagagtttgagaccagcctggccaacatggtgaaaccccatctctactaaaaatacaaaaagtagccaggtgtggtgcgcacacctttaataccagctactcaggaagctgaggcaggagaatcacttgaacccaggaggcggaggttgcagtgagctgagattgcgccattgcactacagtctgggcaacaagaatgaaactgtgtctcaaaaaaaaaaaaaaaaaagggtaagtgccaggtgacaggcccggagtagtttttggagaagcttgctgatgccaggggccctgcctttgcttgtgttgggagctgtctttcacgcgctacccagtgagaggcttagtgtacatggccccatttatacagttttctctctgacaatgaactcaggtgtcagcgagtgttccttctcatttccacttctcacttctctaatttacttttagctcatctaaaggctgcagataaaattattaacaatgacattttagcctcatctgtgaggcaatctgaccagccatgggtcccctcagattctagggtgtttgcagcagcccgactcagggcctgtggtgtgtgtgcctctccacagcgtacatcgtggccgtgtaccactgcatgaaggacgggctgaggcgcagtgctccagggagcacccccgtgaggaggaggggggccagccagctctcccaggaggccgagggggcggtcggagcccttcccggtgagcagtcttttgtcttttgaggccactgccatgtgccagtgacctaactcctctgtgtgccatgggtggtccccggtgccagtcccccaggtgggaggtccccagtgccagacaggtcccagacccctccctcagcatccttatacttccaggaatgatcaccttctctcaggattatgtcgcaaatgagctcactcagagcttcttcaccatcactcagaagattcagaagaaagtcacaggctctcggaactccactgagctctcagagatgtttcctgtcctccccggttcccacttgctgctcaataaccctgccctggagttcatcaaatacgtgtgcaaggtgagagtgccagcgtgcgtgtgaggagaggacactaacgtacatgtgtaaggcgagaatgttactgtgtgcaaggtgaggctgtaatgcgtgcaccatgaacgtgctagcgtatgtgtgcaagataaggacaccgacatacctgtgcatggtaaggatgttaatgaatgcaggatgaggctttcagctgtgcaagggggaggtacctacatgtgtagggtcagggtgccagcgtgtgcaaggtgaggagcaggtgtaagttacttgttcattccaccaacatttatcatgtccctgtcacatgcagccacagttgcggcatctgtgctcaggtgtgagcaagacaggaaaggtcctgccttgtggggcctgtctgctgccagccgacccgagaagggagagggccgttcagaggcgcaggtgctgtggggatggagcctgtgaggggcgctgggaccaggtgcaggaggagggaagacgcaaaggccctggggggtgagcttggtgtgttggtgaaggcacagccgaacacccagtgccaccggctgggaggatgggtcaccggagaccagtaggctggaccaggacccagagctgatgagatgagagcttgctcggatgctgaggcctttctgggaaaggcaggctgagtccaaggagggataatattaccagataacgaccgcgggtgtcagcccttacagagcagagtgcttcactgtccatttcctcactcagccttcccagcaaactgcatctcacacacggctaaggttacgctggagatcaggtgacagcctcaaggtctggttgtggtgaagaagtgtttttagctcaccattttaattcctttattgacttttacatattttaaattcatttttattaaggtgtaatttatatacagtaaaatgtactctgtggcgtgcagttctgtgatttttcctaggtgaatggaattgcatcatcatcagcaggatacaggatagtcaccgcccgaaaacattccccgcactgccctcctcacctgacaccctttagccactggtgtgtcttccgtccctgcattttttttctcttctagagcgtcacataagtagagacattgtgcagccttttggatgtggcttcttagcaaaacacacctggaattggttcatccacgcgctcgtgtgtatcagaactccctttctgttgcgagcagtgtccattgtgtgggcaaaccacagcttgcttttcattcactggtggaaggacatttgcgttgctttcactttggggtgattaataacaaagctgctgtaaacattctgtaggtgtaggtttttgtgtgaacataaatttcaattctctgaggtcattttttaagtgtttgtttaacttgataagaaactgccaaactcttttctgaagtggctgcaccgtgtcagggtctcctcagcagtgtgtggcaagagttgctgttccacatcctcaccaggacttggtatcattgggtttttaaattgcagctattccagtaggtgtgtagtggtatcgcattgtgtttctgatttgcatttccctggcgactaatgatgtggagcttttttttggagatggagattcactctcattgcccaggctggggtgcagtggcgcgatctcagctcactgcaacctctgcctcctggttagctgggattacaggtgcctgccaccacgcccccccaattttttgtatttttagtggagacggagtttcaccatgttggccaggctggtctcgaactcctgacctcaagtgatccacctgcttcggcctcccaaagtgctgggattacaggcgtgagccaccacgcctggctgtggggcattttttaatgggcttctttgctgtcctggtgtctgtcctctttggtgaagttttaggttttatccatttgagttaatttttatacaatgtgcatgctgtagatccaagtccatatttctgcatgggatatctgattgcaggcatatcctgtcttattgtgcttcgaagcggttacctgtatttttataaatggaaggtttgtgggaatcttgtcttgagcaagtctcatctttccaacagcatgtgctcactgtgtctgtgtcacatgttggtaactctcaggatatttcagacttttccactattattatatcagccgtgataacctttgatgcttctatggcaattgttttggggcgccatgaaccgtgcgcatagaagacaatgagcttcatcaatgttgtgtgtgtcctgattgctccactcacgggccattctgccatctcgccctttctccttgggcctccccagtcccggtgacacaacactatagaaattaggtaagttaatagccctgcaatggcctctacgtgttcaagtgaaaggaagagtcacacgtctctcactttacataaagagctagaaatggctaaacttaggaaggcatgttgaaagtcgagacaggctgaaagctaggcctctcacaccagttagccaagtcaactgcaaaggaaaggttcttgaaggaaattacaagtgctcctccagtgaacacatgaaagataaagaagtgaagcatcctgttgctgatatggagaaagttgagtctggatagatcaaaccagatataacatcccctcaagccagagcctaatccagagcaaggctctcactctgttcagttccatgaaggctgagagctgaggaggctgtagaaggaaagcttgaagctggcggaggttggttcatggggtttagggagagaagccgtcccagtaacataaaagggcaaatgaggcaacaggtgcgggtggagaggctgcagcgagttctccagaagatctgtctgggatcattggcgaaggtggctacactgacaacatattttccgtgtagacaaaacagccttcttttggaagaagatgccatctaggactttcatagctagagaggaggcctcagagcctggcttcagaggaaaggctgactcttgttagcggcagatgcagctggtgactttaagtcgaagccactgctcattcagtcttttaaggccactacctgcagctcagaaaaagattccttccaaaatagtactgctcattgacagtggacctggtcacccaagagctctgatggagacgtacaaggagatgaatgttgctttcatgcctgcggacacagcatcccttctgcagcccatggatcaaggagcaatttcgactttcaacgtttattatttaaaaatatatttcatgaggctatagctgccatagatagtgattcccctgatggaactgggcacagtaaattgaaaaccttctagaaaggattcaccattctggatgccattaagaacatttgtgactcatgggagaaggggtcaaaatatcaacattaacaggagtgtggaagaagttgattctgaccctcatggatgactttgagggattcaagactattgtgggaggcgtgactgcagatgtggtggaaacagcaagggaactagaattagaagtggagcctgaagatgtgaccaagttgctgcaatctcaggacaaaatttaacagataaagagtggcttttcatggatgagcagtaaagtagttttttgttttgttttgttttgttttgttttgttttgttttgttttgagatggagcctccttgctctgtcgcccaggctggaatacagtggtgcggtcttggctcgctgcaacctccgcctcctgggttcaagtgattttcctacatcagcctcccaagtagctgggattacaggtgcccgccacaatgctcagctaatttttgtatttttaatagagacagagtttcaccatattggtcaggctggtctcaaactcctgacctcaggtgatccacccgccttggcctcccaaagtgctgggattacaggcacaagccaccacgcccagcccaaaaaagtagttttttttttaagatggagtctcgcactctcgcccaggctggagtgcagtggcgcgatcttggctcactgcaagctccctcccaggttcacgccattctcctgcctcagcctcccgagtagctgggactacaggcaagcgccaccacacctggctaattttcgtatttttagtagagacagggtttcaccatgttagccaggatggtctcgatctcctgaccttgtgatctgcccacctcggcctcccaaagtgctgggattacaggcgtgagccaccgcacctggccaaaaagtagtttcttgagatgaaagtgaacattgtggaaatgacaaaggattgagaatattccataaacttagttgccaaagcagcagcagaatttgagaggaccgactccaattttgaaagaagttctactgtgggtgaaatgttatcaaacagcatcacatgctacagagtctttcatggaaggaagagtcagttgatgcagcaaacttcattgttgtcttgttttaagaaattgccacagccaccccaactctcagcaataccaccctgatcagtcagcagccgtttacattgaggcaagaccctccaccagcaaaacgattgcgactcactgaaggctcagatgatcgttaatatttctgagcaataaaacattttaaaattaaggtacatacattgttttttagacataatgctgttatgcacttaatagactacagtatagggtaaacctaagttttgtctgggtagagtgactcacacctgtaatcccagcactttgggaggtcagggtgggttgactgtttgagcccagcagttcaagaccagcctgggcaacatggcaaaacccatctttacaacgattacaaacattacctgggcatggtggcgcatgcctgtcgtcccagctactgggaaggctgaggtagaaggatcaattgagccccaagaggtcaatgctgcagtgagccatgattgtgccactgcagtccattctgggtgacagagtgaaatcctgtcccaaaataaaaaaaatcacatagctttttttttttttgagatggagtctcactctgtcactcaggctggagtgcagtggtgcaatcttggctaactgcaacctccacctcctgggttcaagcgattccctgcttcagcctcccaggtagctgggatcacaggtgcacccgccaccatgcccagccaatttttgtatttttaatagaaatggggtttcactgtgttggccaggatggtcttgaactcctgacctcaggccatccacctgccttggcctaccaaagtgctgggattacaggcgtgagccaccacaaatcacgtaacttttatatgtactgagaaaacaagcgtgagccaaaaatcatgtaacttttatatgcactgagaaaccaaataatttgtgtgatttgctttattgtgatgttagtccattgaggtggtttgaaaccgaacttgccatatctccaagatacgcttgtattcaagaaccatttgttgaaaagactattctttttctatcgaatcatctttgtacctttttccataacttagtaaccttatctatgtgagtctctttctggattatgtattctttttttcgatcttgcattcaatttgctaatatctcgttgcgcatttttgtgtctgtgctcaggctgttattggtctgtagtttcttagtacggtctttggttctagtatcaggggatgctggcctcatagaatgggttgagtgctctctctcttcagtgttttgaaagatactgtgtagaatcagcagcatttcttccttaaatgtttagtaaattccccagggaagcctgtcctcaccgatggaaaactgctaatgtagagaagtcagctgaggcgtctaaagggactaaggaagggaggaaaggacaccaggaaactgtagcctaaggtccagagggttctggtccagacagagcagcagggaggccccgggagctccttcccgatgtgggctgtggtctctgcaggtgctgtccctggacaccaacatcacaaaccaggtgaataagctgaaccgagacctgcttcgcctggtggatgtcggcgagttctccgaggaggcccagttccgagacccctgccgctcctacgtgcttcctgaggtcatctgccgcagctgtaacttctgccgcgacctggacctgtgtaaagactcttccttctcagaggtgcggctgagctccagcgggcccttcactgtggagcagaacatccgagggcactgcggtgtcttgagggcttctgcagctccagctctgtgggtcacacctgctgcccctctgactcacatggattggcaacaggccccttcccaggcctccccacaccatgttcggaatgttgtcctaggaagggctcaagtgcaggtgggaggccagagtgcgtgcagctgcactcaggagactcgcccgtcaccaggcgcttctcacagccccttcctctcctgagatcctgcccatggcactgtggtctggaggctgggctggtgacctctcgcactcttgctctgcctaggatggggcggtcctgcctcagtggctctgctccaactgtcaggcgccctacgactcctctgccatcgagatgacgctggtggaagttctacagaagaagctgatggccttcaccctgcaggacctggtgagtcgtgcatgccgcctgcccgtgtgccctggagtccacaggggggtttctgtgcactcccgggagccggggtgtgtgcaggtcctgaggcacgccctggtgtcttccaaggggcctgccctgcagaccagtccatgccctgagcctgatggactgttctgtccacactggttgagcacctgccttgggtcaagagctggccttgtgggtgcttcgttctagcggaaggaggcagacactcccaagtgtgaagagaaggaaaggaggaagagggagttgcacagctcggccacaggaaggtcttgccgaggggcatctgagcagaggctgggggacgcgccaagctgccgtgtggtggtgcacggcgttcaggcctgcaggatggagggagtgagcagggcctggaggaggcctcaggactgggcatctggggtggaacatccacagcgagggtgggtgtagggaaggcgctggcaccgtgggatgaggtcgtgcattttactcataaccgagggctggctgcacacagcaggggctcgaggcttactgatgggcccacgaatgtgtctcgcgagcctgtgaagaagcagcaggcaggtctggccagcgcgggagggctggcgcccatcggggctgctccctttcaggtctgcctgaagtgccgcggggtgaaggagaccagcatgcctgtgtactgcagctgcgcgggagacttcgccctcaccatccacacccaggtgggctctccctcatctgcctcggctcagcctggcctccttggcctcctctctgagtggactggggtctcactgtgcctgtttattcctgcaggtcttcatggaacagatcggaatattccggaacattgcccagcactacggcatgtcgtacctcctggagaccctggagtggctgctgcagaagaacccacagctgggccattagccagccccgggccccgggtgcctctgcgtccgtgccaggcctcctgatgccaaggccacatccccgtgcttccagtgaccagaccactgaccaccctgactgtccaaacctgtgaccccaggccagggaacggggaggaaaccaaagaaaaccattttcagggagctcagacgtcacaggagggagcgggagcaggatgtggccctggcctcgccagagcacctgaagaagcaggccgtgagcgaggctgcgagtgccctgggcgccgtttctcacgcagtgaatgcttttccaggcctctgttgcttcctgcaccacacctggtggggtgggagcgtcctctaggtgcccctagttctttgtcctgcctcccagagggaggaaaagcccctgggggcttctggctccctgagattgggctctgagacgagacgggttcccaaggccctggtggggctggagtctcacctgtttgcatggagaaatgggctggccccacagcctcacaggagcagtttgtgggctggtttccccaggaatccagaccctaacccgtgagaatctggattttggcttgtgagccctgcttatttggagccgggtctagagggaaccctctatcagcctcaggaaaacaagacctctgtgcacctcacttttggctcactgcagcccttgtccttcacctccacacaggaccagctggaagcagaaagaagaaaggccaatttcacagggcaccaaacaagtatgaaatgtaaatcagaaatgcagacaccccagacgagagcctcacaggagggagggggccccacaggctccccaggaggctcgtgtctttggcccagagccagccttagtttgtccctgccatctactgtctgaggccatcgctgctacactttgtttttatttgtatttcatactgaagtttc
